United States Patent Application Publication US 2007/0192889 A1 - sequence listing, part 6

SEQ ID NO: 13479 - DNA, 14214 bp, Oryza sativa
  Clone ID: TFbOSC900265j.C1.o8.fg
atggatcccggcgggatgctgctcgaggacttcgggcagcgggtggacctcacgcggcgcatccgcgaggtgctcgccaactacccggagggcaccaccgcgctgcgggagctcatccagaacgccgacgacgcgggggcgtcccgcgtccgcctctgcctcgaccgccgcgcgcacggcgcaggctcgctgctcgcgcccgccctcgcgcaatggcagggcccggcgttgctcgcctacaacgacgccgtcttcaccgacgaggacttcgccagtatctcccgcatcggggacagcaggaaggtgtcccaggtctggaagaccggccgcttcggggttggttttaactcggtgtaccacttgactgacttgccatcatttgtgagtggcaagtacattgtcctgtttgatccccagggtgcttatcttccgaatgtgtcagctgcaaatcctggaaaacgtatagattttgtcagttcttcagcaattacactgtacaacgaccagctttcaccctatcgtgcatttggttgtgacatgaaagcaccatttcagggaactttgtttcgctttcctttaaggactgctgagcaagcatctcttagtcggttatcgagacaagtgtacacagaagatgatatcttatctctgtttgctcaactttacgaagaagctgtatataatttacttttccttaaaaatgtgctgtcacttgaaatgtatgtatgggaatctggtatgagtgaaccaaagatagtgtactcttgctccatagggtcacagcatgacaatttgcgctggcatcgacaagcccttgtcaggttttctggcactgctgctgagtcctctgagcaaaagatagattccttttcaatggattttgtatcaaagtcatttttgggtgagaagtttgagaagaagagctatacctattttattgtacagggaatggcatctgcattaagtaaaattggtatttttgcaacaactgctgccaaggattatgatcttcacctactaccttgggcttctgttgctgcttgcatctccaacgtgggacctgaggaagttattctcagacaaggccgcgcattctgttttcttcctttgccagtaaagacaggattatctgtgcatgtgaatggttactttgaagtatcatccaaccgacgtgacatttggtatggagctgatatggacaggggtggtaagcttcgctctgactggaatatgttattgttagaagatgttgttgctcctttgttcagagaactgctgctacagttgcgtacagttttggactccaaaatatcatattattccttatggccaactggtttgtacgaggagccctggagtattctcgtggaacaaatctgtaaatttatttacacctctccagtatttcactcggagatcaaaggtgggacttggataacaccagctgagagtttgcttcatgacgagggattttcaagaagtgatgatctcagtgaggctcttgtgatgttaggcatgcctgtcgttcgtctaccaggtgcgattgctgatatgtttcctaagttccattcgaagtatatgctcaaaatagtaactcctgctacagtgcgacatttcctcaaggattttgaaaatcttggtacattagaaaaatctcagaagctaatattattggaatattgccttgctgatctggacagtggtaatatcggcaaatgcatgaatggcctcccattgattccattagcaaataaacagtttgggattttttctggtatttcacaggagaatcaatattatgtctgtgatagcatagagtatgagcttctttctgctgttagcgatagaataattgaccgaagcattccccctgtaatactagacaagttgtatcagatagccagtagttctcaggttaacatttcacttattgaaggccgaacatttcttcagttctttccctggctatttcctcctggatggaaatgccgaaaccaagttccctgggatccagaatcgggtggatcatctcctacagcagcctggtttaaacttttctggcaatacattggggattgttcatatgaccttgatttgtttagtgattggcctatattaccttctacctcagggcacctttatagagcatctacagtctcaaaattaattaatacaggctcactgtctaatttgatgaaggaactcctgaccaaattaggttgcaagatactagacacaaagtatttgagtacgtgccagcatttgtctaattatgtgtatgatggtgatgcatctggagtactccattcaatctttggggttgcctcattggagggtgttgatttgcaagctttgtttcagcgcatcactcctgctgaaaaaaatgaactatatcagtttgttcttgatgcaaaatggtacttaggaccccacctttctgatatgagcataaatctatgcaaaaagttacccatttttagggtatttgatggagggtctcccagttcttatggtttctcggatttatccacttcaagaaagtatctgccacctcttggtgttgcagagcaattactgaatgatgactttgtcttctgcatatccccaagtgatgaagatataataatgagatattatggtattgagcgcatgccaaaatcaaacttctaccagaggtacgttctgaataggttagatgagttgcaaacagagtttcgtgattcagttctactaaccatcttgcaagatctgcctcagctgtccttggaaaatccaaggtttaaggaagccttgaaggtccttagatttgttcctacgaccaatggggtcttgaaaagtcctcaatctctttatgatcctcgggtggaagagctctatgctcttctccaggaatcagattgttttccccatggcttatttcaaaaccccgaagttcttgatatgttgctctgcttggggctaagaacatctgtatctattgataccataatacaaagtgctcggcacatcgactcactcgtgcacaaagatcaccacaaggcccattcaaggggtaaagtgctcctttcttatctcgaagttcatgctcacaaatggtatgtacataagccatttgatggccgtaagaaggtaaatatgctagctaaagttaccaccgtgctcagatctcgcgatacatcttgggaagctgatcttgaaaaattctggagtgatttgagaatgatttgttggtgtcctgtgttggttactgccccaagtccagctttgccatggccttcagtatcatcaatggttgctccacctaagcaagtaaggatgcaggacgacatgtggattgtttctgctagctcacgcatacttgatggtgaatgcacttcgtcagccttgtcatatagcttaggttggttgtctcctccatctggaagtgtaattgcagctcaattgcttgagctgggtaaaaacaatgaaattgtgactgatcaagtactccggcaagagttagcgttggtgatgcctaagatttattcgctactgagtaatttgattggatctgatgaaatggatatagtgaaggtggtacttgaaggctgtagatggatatgggtgggggatggatttgcaaaaactgatgaagtagttttaactggacaccttcatctggcaccttacattcgcgtgattccaattgatttagcagtattcaaggacctgttcttagagcttggcataaaggagcaacttgaccctgtagattatgctagtattttgaccagaatggccacaaggaaagcttcgacttcactacaagctgaggaacttagaacagctgtcttggttgtgcagcatctagctgagtttcggtttcaggaccaccaaacacaaatatatcttcctgattcttcagctaggctctgtctgtcttctgaacttgtatttaatgatgccccttggcttcttgattttgatgaggacatcactgggaatgcaccaagcattgctttcaattcgaagaagtatgttcacaattttgtccatggcaacatttctaatgatgtggcggaaaggctaggtgtccgctctctccgccgtctcttgcttgctgagagttcggactcaatgaatttgagtttgtcaggggttgctgaggcttttggacagcatgaagatttgactacacgacttaagcacatcgttgagatgtatgcagatggaccagggattctgtttgagttggtacagaatgcagaagatgctaaggcttctgaggttgtgtttttactggataagacccattatggtacttcatctattctatcacctgaaatggctgaatggcaggggcctgctctctactgcttcaatgactcaatttttagtccccaggatctttatgccatctcacgaattggtcaagacagcaaacttgagaaaccttttgcaataggcaggtttggtcttggcttcaattgtgtatatcacttcacagacattcctgggtttgtttctggtgagaatattgttatgtttgatccgcatgcctcttatctgccaggaatatctccatctcatccaggtctaaggataaaatttgtaggaaggaggatcttagaacagttccctgatcaattcaccccattcttacactttggttgcaacttgcaacagccatttccaggcacactcttccgcttccctcttaggaacgaggctgctgcttctagaagccaaataaagcgagaacaatatacaccccaagatgtggaaatgcttttctcttccttctctgaagttgtatctgaggctctactttttctccgcaacgtaaagaatataactctgtatgtcaaggagagtgacagccaggagatgaaacttgtacatcgtgtctcgaagcataatagttatgagatggccaaagaacctcatgcgcttaatacgatgcttgcatttataaatggaaatcaaccatcaggaatggataggaatcaatttttcaataagttgaataagactaaagatagtgatttaccttggagttctcaaaaggtctctatctttgagcaaagccctgctgcttgcttggtgcattcatggatcttaacagagagtataggtgggggccatgctagaaagttgtcaactgcctctggtagtaagtcccacttctttgttccctgggcatctgttgctgcttatctgcattctgtgactgtggacaatacaaaagaactgtctggtgaagctgaagtcaaccttgatgatttggttctcaagcaactgtctcttggatcctctaaggacaggaaattttttgagggtcgagccttctgctttcttcctttaccaatcaacactagcatgccagtgcatgtgaatgcttattttgaactatcttcaaatcgaagggatatctggataggaaatgacatggctgggggaggaagagtacgatcagaatggaatcttgcactgcttgaagatgttgctgctcctgcttatggtcacctgcttgcagccattgcacaagagcttggtccctccgatctgtttctctcattttggcctactgctgtaggtgtggagccatggtcttccatggtgaggaagctttatgtatctatcgcagaacttggacttcatgttctgtatacaaaagcacgagggggacattgggtgtcaacaaggcaagctatctttcctgatttcagtttttcaaaggccattgaactggcagaagttctttctgaagctggtttgcctgtggtatctgtatccaaacaaatagttgacagtttcttgaacgtatatccttcagttcatctcttgaatcctcatctgctgaggaatttgttgatccgacggaagcgtggcttcagaaatagagaagaagcaatacttgttctggagtactgcttgagtgacatgggagatccttcctttcctgataaattgcaagggttagctcttcttcctttggcaaatggatcattcacaacatttaccaaccggggggagggtgaaagagtattcttttcttcacaaatggaatttgagcttctgaaggactctataccacatcttgttgttgataactctttaccggatgccattttgaagaagttatatgacatagcttgttctgcacggtcaaacatttacttattcacatgcaattttctccttgagttgttgcctaggatcttgccacctgaatggcagcatgctaagcagttattttggtctcctggacatcaaggtcagccaagtgtggaatggatggtgtcactctggaatttcttgcgacattcatgtgaagatctttcaatttttgcaaaatggcctatattaccactggtagatggcaagcttatgcaacttggcaatgcttcaaatgtaataatagatgatgggtggagtgaaaatatgtactcgttgcttcagaaactgggatgtttctttctgagatctgatctgcagatagaacatccgcagctggcaaattttgttcaggaagccactgcagttggtgttttgaatgctgtgcagtctgttgcttctaattttcaggatatcaaggaattgttcatgggtatttcactggcagaaacacatgagctacgcagttttattttccagtcaaagtggttttcaggaaatcacatgaactcttcccatatgaatacaatcaggaatcttcctatatttgaatcctataaatctagagagcttgttagcctgacaagtcctagaaaatggcttaaacctgaaggtgttcatgaggatctgttgaatgaaagttttataagaacagaatcggcaaaggagaagtcaattttggtatcatactttgctattagggaacctcaaaaggctgaattttacaaggaccacgtgcttcctcgaatatccgagtttctatcacaaccagctgttgtttcagcaattctccgtgatgtgaaactattggcagaaaatgatacttctgtgagagctgcattacatgaaacccctttcgtcctggcagcgagtggtgcatgggtacatccctccagactttatgatcctcgtgtgcctgagttacataagttgctgcacaaagaaaccttctttccttcagagaagttcatgacgactgaagtaattgaactgcttgcaagctttggacttaaaagtaaattgggttttagtactttgcttgacattgcgaggtcagtttcactgcaacaagatgatgcgcttgagcatgggaaaaggctacttacctatctaaattttcttgaattcaaggcttcaaacatggaggataaaaaaaccttccatggggatgacaatcaggaagcttctaagactgatggaagttttgaagcagaaaacgatggggatgggtatgatccagaagaaactattttatctttgttctcaaacttcgatcatgatctaccagaagacgaattttggtcagagctgaaaaatatatcttggtgtccagtccatgttgcaccattgctaaaaggacttccatggttcatatctgaagatcatgtggctcctccaatcacaacaaggccaaaatcacaaatgtggcttgtttcatcaaaaatgcggattcttagtgctgattcttgctccatgtatctgcaaagaaaacttggttggttagacccaccaaatgcaaacattttatcttcccagttagttgagatctccaagtcttatgatgaactcaagatgttttctgaagacagtaccaatgatgctgttccgcaaaaggaaattcaactgatctactcaaaattgcaagatattattgacacagccgataccaacattctaaaacggaatctggatggacacccatgggtttatataggtgataggttcgtgccacctcaggcacttgcttttgattcacctgtaaaatatcacccttacctttatgcagttccatctgaactgtcggaatataagaggttactgtcggttttgggtgtgaagcagacatttgatgcagcagattatctgaatgtacttcagtgtttacaaagcgatgccaaaggagagccattgtctacagagcaactaagttttgttcatcgtgttttggaagcatttgttgattgttatcctgataaccaagcacctgatatgatggtgaattcattgttgattcccgattcatttggtgttttgacacctgccagaaatcttgtctacaatgatgcaccctggatgaatgctgatcctacttcaaagagctttgtgcatcttagtattggtaatgatctagctaataggcttggggttcgatctcttcgtggatcatcattactggataacgagctaatgacggatttgccttgcatggaatatgctaaaataagtgagttgctggctttatatggtgagagtgactttcttttgtttgaccttatagagctagctgatcattgcaatgcgaagaaagtgcaccttatctatgataaacgagatcatccaaagcagtccttgctgcagcagagtttaggtgacttccagggttcttcattgacagtcgtctttgaaggaacgataatgagcagagaagaagtttgcagcctccaacttcctcctccatggaaattgaagggaaacattcttaactatggacttggacttcttagcagttattttgtgtgcgataccttgagtattctttctggtggctatttctacatttttgatcccttgggcttgactggtggcacgacttccactgctacctcatccgctagattcttctcattgataggaaatgacctggtcgagaggtttcatgatcagttcacaccaatgcgtgttacacaggaggcttcactatcttcagcaaactccacagttattcgtatgcctttatcatcaaagtgcctgaaagaacttgaagctggttgcaatagagtaaagcatatttttgatcgatttacacaaaatccatccagcactctcctattcttgaggtcaatcattcaggtatctttatcaacatgggaaggtggagcttctcagccaactttgaactactctgtacttgttgacccatcagtagccactttaaggaatccattttcagaaaagaaatggagaaaatttcaactatccagaatatttgcaagtacaagtgctgctattaaaatgcaagctattgatgtgcatgtgattgacaatggctgcaattatattgacaaatggtttgttgccctttgccttggatcagggcaaacacgaaacatggctcttgacaggcggtatctcgcctataacttaacccctgttgctggagtagcggcacacatagctcgaaatggagtatcaaccaatatacatgcatccagttgcatattatctcccttaccactatctgggtctataagcatgccagtcacaactctaggccattttattgtgaggcataatggtgggcggtacatttttggcagctcacatgataaatctctgtcagaccttgaaatgcataaaaacaaattggttgaggcatggaataaggaacttatgctatgtgtgcgtgattcatatgttgagatggtcctggaatttcaaaagcttaggaaggatcctctgtcttctgctattgaatcaaggtctgcacactcggtgagtacaattttacaggcttatggtgatagggtgtactctttctggcccagatcgaagcagcatcctgcttcactcactgggtatggctctactgtaactaatgtgaattcaccaagagcatctaaagcagattggcaatccttggtagagcaagtgataagacctttctatgtacgcttggctgatcttcctgtttggcaactttatggtgggaatcttgttaaagtggatgagggtatgttcttatcccattcagggagtggagatgatgataatctgccatctgctagtgtctgtagtttcattaaagagcactaccctgtattttctgtaccctgggagctggttagggaaattcaagcagttggagttaatgtaagagagatcaggcccaagatggttagggatctactaaaagcttcttcatccattttactccgatctattgaaacatatatggatgttcttgaatattgcttctcagatatggacccataccgtttctcagatcttcatatacatgaggaatcacgagttagcaatcaacaatctgaaataatgaattcttcaatatcaaattctatgccatcttcaagcagctctgtgtcttaccatagaaatacacaaaggcagggtgcttctgggggtgacgcgcttgaaattgtgacatactttggaaaagctctctatgactttggtcggggggttgtcgaggatatcagcaagactggtggctcagcatcccataggacccaagctgctgaaaataatgtgctgtcatctatcatcacagagctcaaaggagtcccgtttccgacatcgacaaaatgtctaacaaggctgggatctaccgaactttggatagcaagtgaggagcagcagctattgatgcgcccattcttgcatcactttatccatcatcaatgtttacaaaagcccttcttggagctattgctcaccactcaagttattcatagacctctaaagctaagaagtttttctcctcacttgttgtcaggccatttgaagcacatatttgatgaacgttgggtgcaccttgcagtagagaagaagtctccatggattccttgggataataatgctaattcatcaactgctggaccaagtcctgaatggattaggctcttctggaaaatatttagttcaatgagtggtgacctttcacttttatctgactggcccttaattccagcatatctagacagacctgttctctgccgtgtgaaagaatgccatctaatatttgtaccaccagcagatgattcaaatcctgatagtggagatagtgcagctagagtagttgacacgtctgcccacccaggagatgagactggagaagctgaacagaacagcatacttgatactgcatttcagtcaatgaactcagcatttccatggttacctgctctgctttacaagttgaatataccagtttttgatttatcttttccagagtgtggtacaatatgcaatttgtttccttcacgtgaccggactcttggacaaattattgcttctaaactggttgcaataaaaaatggtggccatttacctttgccacttagtctatcaagtgaagactgtgataaactgtttgcattgtttgtctcagagttcagattgtccagtaaccacttatatcagagagaagaattggatgtcctgagagagcttccaatgtataaaacagttacaggaacatacactagtctgtcagggtccgatcattgcattctttctcccacagcattctttcaccctgctgattctcggtgcctttctagtacagctaatgcagatctatttcttcaggctttgggggttgaacaattgagtgaccaagaaatactagtaaggtttgctttgcctggctttggaaataaatcagctcaagagcaagaagacattctagcctacttgtattctaactggaaagatctgcagctgaactcttctgttgtaaacaccttgaaagagactaattttctgacaagtgcaaatgagttttgtacagagttgttcaaaccaagggaattacttgacccttcagatgctttgcttacttcagtattctctggggagagacacaagttcccagctgaaaggttcttgtcagatggttggcttgttatactcagaaaagcaggtcttcgaacatctacagaggctgatatgatagtacagtgtgcaacaaaaatagagtccatgggaaatgatattgtgtcatcttcagaagatcctagtgactttgaggcagacttttcaggcagcaaaaacgaaattccttttgagctttggtctttggcagaatctgttgttaatgtgattcttgctaattttgctactttgtatgacagttctttttgcgaaaagattggcaaaatcgcatttattcctgccgaaaaaggttttccaagtattggtgggaagagagggggtagaagggtacttgcctcatatagtgaatcaattttatcaaaagactggccattagcatggagttctgctcctattcttaccaatcaagcaattatccctcctgaatattcttggggagcatttcgactaaggagtcctcctgccttcactacagttctgaagcacttgcagagtgttgggagaggcaatggtgaggacacactggcacactggccaacttcatcaggaataatgacggtggaagatgcctttctacggatcttgcaatacttggataaaatatggggaacaatatcttcttcagagaaaaatgagttgcagaccctggcttttataccagttgcaaacgggactcgcttagtcacagtgaaatcactttttgctcgtctgacaatcaacatgtcgccttttgcttttgaacttccaagtctttatcttccatttgtcaccatcctcagagaaattgggatgcaggaaacccttacaaacacttatgcaagggaacttcttttggatatacaaaaagcatgtggttaccaacgcctgaatccaaatgaactccgcgctgtgatggaaattttagacttcatgtgttctggtgtcaaccaggccacagatggatcagaagacatatttgattcagtaataccggacgatggttgcaggctggtatcagctgtatcgtgtgtatatattgacccatatggttctcatttactgagtaacatagatacatccaggataagatttgctcacccagatcttccccagaatatttgcaacacgttgggcataaagaagctttctgatgtcattgtagaggaactggatggaaaagaagaactaaagatggtgaatagcatttgctctgttactctggacaaaataaaagagaagctgcttagtaaatcgttgcaagatgcgttaaggattgttatgattggtgtatccaatcattttccttcatttgaagcactcaatctggcgcagatagaaagtgtactaaaggatatatcacagaacctgcagtttgttcagcgtctccatactcgctttctattactccccatgctccaagacgttacaagaagcagccagcgtcctccatttcctgaatggtcaagcaatggaaagcacagaagtgtttgctttgtgaacaaatccacgggtcaaattctagttgcagagcccccaaactttttgacaatacacgatgctattgctattgttgttagttacagattaggggcacccgtgatcttgccgattgcttcagtatttgcatgcccagatggcacagagaaagaggtgcttaaaatactccgtctgggcactgacattggagtttcaaaacgtgaaggaaggtacaatggttccctgggagcagagttgttgtcccaagatgctcgccaggttcaattccttcctttaagaccattctatagtggagaaattgtggcatggaagacggggaaagagggtgaaaagctcagatatggcagggtccctgaagatgtaaggccatcagctggccaagctctttacaggtttccagtggagacttctgctggtgaaacttgcatgctactttccagtcaggtttactcatttaaaagcgtttcaatggctgatctctcttctgcaccattgcaactggatagtggtagagctgcaggtggacagcagggcttctcacccatcaacacaggaactgaagctgcagatgatgtggctactggccttgaatatgggaaggtatcttcaaccgagctggtacaggcagtccacgatatgctttcagctgcaggggtaaggatggatgctacaaaggaaacgcttctacagactactctttccttgcaagaccagcttaaagaatctcaagtggctctactcgtggagcaggagaaagcggaggcagcagttagagaagctgatgttgccaagtcagcatggtcatgtcgtgtctgcctgaatgcggaggtcaacatgactataataccatgcggtcatgttctttgtaatcgatgctcaagttcggtttcacgatgcccattttgtcggacgcaagtatctaggatgatgaaaatattcaggccttaa

SEQ ID NO: 13480 - DNA, 224 bp, Oryza sativa
  Clone ID: TFbOSC400770j.C1.o13.gp
atgacctgatatgctatttggtgccttttaagaacaagtgcagcttcttctctaggaagaagaatgatgagtaatgtgtgatatgtaaatcgacttataaaagccgacagaaattgataagattgccctgcagccactgttaccatgcggattgcataactcgctggcttaagatcaacaaggcatgcccagtctgcaatgaggaggtatttgggtgaatcaca

SEQ ID NO: 13481 - DNA, 1446 bp, Oryza sativa
  Clone ID: TFbOSC408415j.C1.o6.fg
atgccggcggtggaggggatgcgggacgtggtcgccaccgtgagcggctaccacggcgacgagcggcacaggctggtcaggctcatcgcggagaccggcgcgagctacgtcggcgccatgagcagatccatcacccacctggtgtgctggaggcttgaggggaagaagtatgacatcgcgaggaggcttcggacgcgcgtcgtcagccaccggtggttcgaggactgcctcaaggaggggaggcgcctccccgagaaaccctacatgctggaaagtggtgaagaagcagggccagtccctgagctgcccactttcccgcgttcacgatccaagagaaatgcaagcatggaggatagatgcttgaaagaattacctgatgatttctgcaatacttcatatgcgaccgatgtgcttgtggttgctgattcaggttctgattgcaatcatcagcgatggtctgattcctccctactgaaagaaaattttgttggtgatcgcgataattctaagattggtgcaacacacgtgaaggaaagaagaaaacgtttaaagcatgcacaaaattcaaccaatgaagatgcactagatgcagaagacaatatttctaggctcatggcaagacaagggcgttatgagtcaagttatacttcatctcggagcgcatcaaatcagaagggagatttgttaaagcttctgcataatgatgatgctagcatgatgagaaaaagaaatagtctcatgaaaaaggaaacaagaaccaagcttgcaggctatcttatagaaagctgtgaaaatggaagtttgacagacagcttcgatgaacctcaaatgtcggatactccgcccactgaagatcgaagaaaaataaggaagacaagactgcgacaaagtacgttggacagtatatatgattatggtgaagccagtgagcatgatcctgaaaaaagtgaggatcaagaaaattttgaattgggtgaaagttcaagaagctttcagtcaagtgattcatccagacaagaaccagctttctgtactgagaaaacaaatcaaggaagcattgacattgcagctgatgatgacaagggagatgatgagaaagccactttggaagaaccaaccagttgtcaagggcaagctgaactttcctgtgtcatttgctggactgatttttcatccacaaggggcatcttaccatgtggacaccgattttgttattcatgcattcaagaatgggcggattctctgtcttctaggggaaaagtttcgacatgtcctctgtgcaaaacaagttttgcctggatcagtaaaatagatgaggctggtacatctgatcaaaagatatactctcaaactataccttgctcaacttctaccgacactttcatatttgatgatagagtctacggcctcccagaatcaccggttgatgtgatgaaaaaggactga

SEQ ID NO: 13482 - DNA, 636 bp, Oryza sativa
  Clone ID: TFbOSC405088j.C1.o1.fg
atggattggttcgtgcggtgctacatgctggcgatcgccaacggcgtgtgcatcggcggcgcggcgatgatcgtctacgggatcgtgcaggtgtcgcggacgggcggcgacgcggggtccctcgtcgtgctctccctcttcctggcgctctgggtcgccgtcggctcctgcgtctacgcctccttctgcggcgcgttcttcccgtgggcgtcgctgcggcgcccgctggctcctgtccgggacgcgctctcccggtgcgcgcgcgcgctgctcccgcgccggaacggcggcggcggcgatggcctgccgagccacctgcgcgacggcgtgcagccacgggagacgccgaccgtgcgcggaggcggaggcgcgcgggtggcgacggcggacgacatccccgcgtacgagcagccgcctgcgggagagggcgagggcggcgcggcggcggcgccggagtgcgcggtgtgcctcggcgaggtggagaagggggagatggcgaagcggctgccggcgtgcctgcacgtgttccaccagcggtgcatcgacgcgtggctgcggggcaactccacctgcccggtctgccggcgcaacgccttcgccacggcggcgccgccattgccggctcaaatggtgtag

SEQ ID NO: 13483 - DNA, 388 bp, Oryza sativa
  Clone ID: TFbOSC900281j.C1.o9.gp
tgaaaaaaatattgagccatcatccaatataccagccataaatattcagttgaatgcagagcgacagattccagggattatttactgcaggagggggcagtttgcagggaccagttcttttaccttttttttaatcaaatttgtaggtcaatggcaaaaaaaatttctaatcaaaaaacggcacggtaatatgaatcactaaacgatcttgcgatcgaacaagcacgcagtgtttacagccctgtgctttttctaagacttcagagcagtatttttgcatatgggacaggtgttcttcacaaccagccattgcctgacgcatccaacatggaagtcatgtccacagtccagtgtcccgagatcatccccatcaacatactcttcctgg

SEQ ID NO: 13484 - DNA, 183 bp, Oryza sativa
  Clone ID: TFbOSC9137j.C1.o1.gm
gaagcgcaggtgagcgaggcgagggagagcgactgcgctgtgtgctttgagggcttcgaccaaggagagaagctgacgaggatgccctgctcgcattgcttccatgcgacctgcatcttggattggctctcgctcagccatctctgcccgctctgccgattcccgatgccaacggggcagtag

SEQ ID NO: 13485 - DNA, 579 bp, Oryza sativa
  Clone ID: TFbOSC423581j.C1.o10.fg
atgaccaagcctcagctagcttgcttacgtagaagtgcatacgtcacgtcacgtcaatcgattccgactccgaggagccaattaatgggcgccggcgccggcgactggcccgtcttcgtcgacggaggaggctcatcgtacaaaacaagctggtccggcgccgccgccgtcatcgtctgcctctgcgccgtcgccgccgtcttcctgatcatggccggcatcacgcagctctgcaaacgcgtcttccctgcggcgccgcccgcgccgccgcctcaacgccggcgcgacgacgacgacgacgatggcattgtggtcgccgtcggcatcgacgaggcgacgctgcaggcgctgccgctggtgctgtacggcgaggcgaggacggcgcagacgagctgcgccgtctgcctggagagctacggcggcggcgacgtgctccgggcgctgccggagtgcggccacctgttccaccgggactgcatcttcacgtggctccggcgccgcccgacgtgcccggtctgccgggcgccgccatcgccggcgccgcccgccgacgttcttggtctgcagctctctgtttaa

SEQ ID NO: 13486 - DNA, 633 bp, Oryza sativa
  Clone ID: TFbOSC900408j.C1.o20.fg
atgctggggtcggggctgaatctggtgaccacggtgatcggcttcgggatgagtgccaccttcatcgtcttcgtctgcgcgcgcctcatctgcggccgcgccgcgcgggccgacgccgaggccgacgccgccgagggcagggtcgcggccgcgcgggccatggcggctggccccgcgccgttcgacttcgacgtcgagttccgggccacggatctcgaccgcacgattgagcatacccgtagtggattggaaccttttgttgttgctgcaattcctacaatgaagtacagctacgaggccttccaatcaaaagatgatgcccagtgctccatatgtttaggtgaatacaatgagaaagagattctgcgcatcatgcccaaatgccgtcataattttcatctttcctgtatagatgtatggttacaaaagcaaactacttgtccgatatgccggatctcattgaaggacctacccagtggaaaacctgccgagtcccctgtccgtagtctccctcaactattcagccaccctgaaagctcaaaacgccgtgcgttcttccagcagcagggcagcacgtacacggctttggcacagaattgcaaggaatttgtttacgacaggactggattttag

SEQ ID NO: 13487 - DNA, 1236 bp, Oryza sativa
  Clone ID: TFbOSC400887j.C1.o6.fg
atggcgctctactccaccgacagcaagaaggttgggtttctttccttcctcaatttctttcacaactccactgcattttccaacctgatcgggtgctgccttttcattcttccctcctacctcgttggccactacattgagcatcaccatttggtctcaccattcatacctgaaaaccagtatatatgttgcatcagcagcatcatcaaacctggtctatctagctcagtagctcacctgcttgtgtgcttaagctcgtgtttgcagcaaaccatggatgcagacagggaccccatcttcccggtgcaacagatgccatcactgctgttcccgccaccgccgccacggccattggcactcgactccacttcttcagcatcttcttcttttgtgcctcaccatccatccatcacgagcttcccaatactggtgctcaccgtcctgggcatcctcaccacctccgtcctcctgctcacctactacatctttgtcatccgctgctgcctcaactggaacagcagcagctcctccgacacgcggacggctggcctcatctcccgccgtcgacgcggtgccgcctccagcagcctcccggcagtggccgagccgcgtgggctggaggaggcggccatccaatcattgccggcgttcaggtacaggaaggccatcaaggacactactgctgattccagcgagtgtgcagtgtgtatcagtgagttccaagaagaggagagggtcaggctcctgcccagctgcctccatgtcttccatgttgactgcatcgacacttggctccagggcaacgccaactgtccactctgcagggcagccatagccaccaacgacagccagcttccattggatcagttcgtgagacctgaggtggtagtcattcaggtgatcactggcgcggaagaagaaggtgcacaagcaccacagcaggaggccaatacggcagcttctgatcctgcagtagatgctactagtacaaatcaacaggtcagtagtaagaagacgaagaaccagaatgcatggcatgtcagcatcagtaagggagatgagtgcattgcagtgaggagggacagaaatgttcttccattgaggaggtccttctccatggactcactgggtggtgctggagaggtgcatttgcagattcagaatattctgcagaggagcacccacttccacagggatatcagtgacagcagcagcagcagcactggaacattgtag

SEQ ID NO: 13488 - DNA, 1161 bp, Oryza sativa
  Clone ID: TFbOSC415629j.C1.o5.fg
atggcttcttcctccccttcctcctcctcctcccccccttccgccgccggtgcctcctcctactggtgctacagctgcgaccgcttcgtgcgcgcccccgccccccacgacgactccgccgtcgcctgcccggactgcggcggcggcttcctcgaggagatgagcgcgcccccgccgcgcgccgcctacctccgccgcccgcgcgcgcaccacgccaacgacctgcgcctgcgccgcacgcgccgcgccgcggcggcggcggcggccggcgaccgctcgccgttcaaccccgtcatcgtgcttcgccgctcccccgccgccgccggcgacgacgactccctcgccgccgccaccagcttcgagctcttctacgacgacggcgcgggctccggcctccgcccgctcccggagaccatgtcggacttcctcatgggctccggcttcgagcgcctcctcgaccagctcacccagatcgaggccggcggcctcgcccgcgccagggagaacccaccggcctccaaggcctccgtcgagtccatgcccaccgtcaccatcgccgcctcccacgtcggcgcagactcccactgcgccgtctgcaaggagcccttcgagctcggcgacgaggccagggagatgccctgcagccacatctaccaccaggactgcatcctcccatggctcgcgctccgcaactcctgcccggtctgccgccacgagatgcccaccgacgccgcccgcccgcggcccagcaatgccggcacagaggaggagacggtcggcctcaccatctggaggctgcccggaggcggcttcgccgtcggtaggttcgccggagggaggaggcccgaggagagggagcttccagttgtgtacaccgagatggatggagggttcaacaacggcggcgcgccgaggaggatctcctggggttcgaggcagagccgatcgacggagaggagtgccattaggcgcatcttccgcaatgtgttctcgtgctttggtcgcagccattcatcgaattctcaggcctcgtcttcgcattcgaggccggagttgaacgatgcgtctgaccggagcgccgtgttcagccatggctcaagaagccggagcacgagctggaggctcgaagatggccatgccgacgccatggtgcaaagatag

SEQ ID NO: 13489 - DNA, 648 bp, Oryza sativa
  Clone ID: TFbOSC24360j.C1.o1.fg
atgactgtttacttctttgcaaaagaagagctcaactgcaatctaacggcggtgaaagaagacctgattaagcctgttactgtaagcttcaaagagggtcttggtcagaagttcagacagccttctggcactggaatcaacttctccgtgtttgaggattccgagttattgaagcagggggacatggatgtatatccacttgcagttaaagctgaaacaaccatgcctgttgatcaaaagttggaaggagaagatcaaaagatgaaaactccaaactcacagatcacacaggctctgtttgaaaagaaagaaagcggtgattatcaagttcgagttgctagccagatcctttgggtcaatggaactaggtatgagttgcaggaaatatatggaataggaaactcggtggaaggcgatgctgatgccaatgatcctgggaaagaatgtgttatttgcctctcggagccaagggatactaccgttctcccatgtaggcatatgtgtatgtgcagcgagtgtgccaaggtcctgaggtaccagacgacccggtgcccgatctgccgacagcccgttgagcggctacttgagatcaaagtcaacaacaaagctgaagagcagcagcagccgtcacccgattcaccgatcaaa

SEQ ID NO: 13490 - DNA, 723 bp, Oryza sativa
  Clone ID: TFbOSC900028j.C1.o10.fg
atgactgtttacttctttgcaaaagaagagctcaactgcaatctaacggcggtgaaagaagacctgattaagcctgttactgtaagcttcaaagagggtcttggtcagaagttcagacagccttctggcactggaatcaacttctccgtgtttgaggattccgagttattgaagcagggggacatggatgtatatccacttgcagttaaagctgaaacaaccatgcctgttgatcaaaagttggaaggagaagatcaaaagatgaaaactccaaactcacagatcacacaggctctgtttgaaaagaaagaaagcggtgattatcaagttcgagttgctagccagatcctttgggtcaatggaactaggtatgagttgcaggaaatatatggaataggaaactcggtggaaggcgatgctgatgccaatgatcctgggaaagaatgtgttatttgcctctcggagccaagggatactaccgttctcccatgtaggcatatgtgtatgtgcagcgagtgtgccaaggtcctgaggtaccagacgacccggtgcccgatctgccgacagcccgttgagcggctacttgagatcaaagtcaacaacaaagctgaagagcagcagcagccgtcacccgattcaccgatcaaagtcaacagcaaagccgaagagcatcagcagcagccatcccaatcgctgccaatcccacacagggaagaggtgtag

SEQ ID NO: 13491 - DNA, 921 bp, Oryza sativa
  Clone ID: TFbOSC422248j.C1.o9.fg
atgggcaggtcgttcagggactcgctgaaggtgctcgaggccgacatccagcacgccaactcgcttgacacctgtcaccagatatactgcttaagtggccaaagctatctcctttggccttgcagtgctgctgaatttagaagggaatatgatggcgcctgtcttcagatgagaatgtcatactgtccagctgcacacttcttcctttttcttgtgcagtggacagattgcaaccttgctggtgcacttgggctgttgaggattctcatttataaggtttatgctgatgggactaccaccatgtctgctcatgaaaggaaagcaagcattagggaattctatgctgtcatatttccttctttgatgcaactacatgaagggatcaatgaagtggaagacaagaaacaaaaggcaatctgtatagaaagatatagaagacgagatgaagatcagaaaatggtgatttcagagattgatgataacatcgaggaggaatgtggcatatgtatggagataaatggcaaagtagttcttccaacttgtagccatgctatgtgcattaaatgctaccgtgactggagatcaagatcccagtcttgtccattctgccgcgatagtctcaagagagtgaactcggccgacctatggatatatacagataacagggacatagtggacatagcgacggtccgaaaggaaaatcttaggcggctcttcatgtacatagacaagttgcccacggtcatccctgaaactgtttttgacgtttacgattcccactgctgtagaaattgtggagcccttggtgttcatgctgccccgcttgtagaagcttgggttactgggctcagcttcagaacacttcagagggctcccggaatggtccagcttcagagtgaaaacgcctgtcggagcgcgtga

SEQ ID NO: 13492 - DNA, 873 bp, Oryza sativa
  Clone ID: TFbOSC400555j.C1.o39.fg
atggcgtcgcccccgccgtacgacaacccgacggctgggttccccatcgcgatcgtgatcgccatcgggttcatggtcacctcgctcatcctcgccagctactacttcctcgtcgtccgctgctggctccgtggcacgggcggcggaggcgccgccggggccgggctgctgcaccgctcgcgccgcgagagcgcggcggagcgcgtcgccgcggtgttcttcaccgactacgaggccgaggttggaggcgggctcgacccggacgtcgtggcggcgctccccgtcgtcaagtaccgccgcgccgcctccgggaagtcggcgtcgccgcaggagtgcgccgtgtgcctgtcggagttcgtccgggacgagcggctcaagctgctgccgagctgctcccacgcgttccacatcgactgcatcgacacgtggctccaccacaacgtcagctgcccgctctgccgcacggtggtcaccggcggcgcgatcggcctcctcgtccgcgacgaccagtatgacgcgtccagccgggaactggccgccggcgagaggcgcatcgacgccgccgcgaggatgggccacgggatcagctcgtgcaggttccccaagaccggggccgagcaggagccgatccggcgatccttctccatggattgcttcctaggcgatctcggccggaagccaccgccgccgccgccgaaggatcccgcaggctcggaggccgggccgagccaccccgacgcggccggtagcagcagtatcgtcggcaccgccggcgccggcgagaccagcggccggtttcggcggttgctgtcgtcgttcgggctcggccggagctcgcggagcacggtgttgcccatccacctcgacccatga

SEQ ID NO: 13493 - DNA, 1569 bp, Oryza sativa
  Clone ID: TFbOSC413563j.C1.o5.fg
atggtgtggacacatcaagttgccagtcctgaaaaccaagttcaacctgaaagtttctatcatggaggtgctgggagcaacttatctaacctgagtgtgcaagttgctgttggagttccaggaaatactgatttccggagtcactatgagagcattaatcttcagcaccagcatgttcagaatccatacccacatgtgggtgttgcttcaagttctgtgttcccatctactatgtacaacccctgcatatcaacaacagcagtggacagatatgttcctcctattcaaagttttggattgggcaatccactactactgcctttatatcatcaacttgctcaaggatccatggatgagaacggcagcagtggcaatttttgtgacagcgtcagggaatttatcaagaggaaaaatgcattacttgtgggtggccatcattttgttaatagttttgcaagctcaagctcatctgcttatgtgcctccaaatcctttacataggtcatggaacgcttcatttgaagcaaatatcctacccagcactggagtttccaatccaccagagtactcttctgcagattcactgaacaattccaattcgatggcttcacatccagaattggtgcatcatggcaattatgtatttccagctggtcacatgagccaatacaatgcatggattgcacaggcaagcagaactggtggagtaccacagtgggaacatggcaatgcagcggctaatcctccaggtggatttgttcattctggaaccatagacatgccaaatggaggtcttcagggataccaagctggcccttttgccaattattatgggcctctgccccatttccaccaaaatcctctgaatagcatgcagcatcctgctctatttaatcatatccaaatgcaagtacctcatcaacattgcctcagtaacaatttattgcatcacccttctggcaatggcctccccttggatccaagaattctggcaatttcatccaattctgggcatacctttgggcctacagctcagccatctttagcaaaccaagttaatgctgggagttcgagaattcagccatatgagttcctgtttttcaaactggacaatactaaatttaaaggatatcagaatttagttgaaaaatatcacctgatattgttcctgaatgctccgttcgtggatctttcgagattgtatgaagcaggagttattgatgaacatagagatatgcggcttgatgtagacagcatgacttatgaggagcttgtagcgttggaggagcggattggaaatgttaatagtggttttacagaaagctacattgaggaaaatttgaagtcaagttcttatgtcccggacgctgattgcatgcctgatcagtcttctgtggagaaggatgcttgcataatctgccaggaggaatatgaggctaaagaactcgttggaacccttggttgtggtcacaagtaccatgcgatgtgcataaaagggtggctgatggtgaagaacctgtgccccatctgcaaaacaacagctttgccagctgatagaagaaacggatga

SEQ ID NO: 13494 - DNA, 558 bp, Oryza sativa
  Clone ID: TFbOSC401369j.C1.o3.fg
atgaacacgcccaactcgtggctgttcgcagacaactccaagtacagcacgcgggcgcggctgctgttcatggggctctccttctccatcggcatcctctccttcctcgtctacctcgccatctggtacacctgcacccgccgccgccggagccgtcagctccgcggcggcggctcggcgtccgcggatcaggaggcgcccgaggcgaacagccacggcatgagcgccgccgcgatcgccgcgctcccgacgttcgggtacgaggcctcggcggcggcggcggcggcgctggattgcgccgtgtgcctcgggcaggtggacgccggcgagaaggtgcggcagctgcccaagtgcgggcacctgttccacgccgagtgcgtcgacgcctggctgcgcgcgcactccacgtgccccatgtgccgcgccgccgtcgaaggccccgccacggccgccatcgccaagaaggccagctccggcggcggcgccaccgacacgccccccgtcgtggcaccagccccaccggcggcggcagaggcactgccactgccacctgtctag

SEQ ID NO: 13495 - DNA, 2862 bp, Oryza sativa
  Clone ID: TFbOSC401238j.C1.o36.gm
atgcgggtcgaattggaaatggactgtgcaatggtagcaacaaggctgactagcaaagtacaagacagatcgcaatggtcctttcagatcagagaagcttcggcgagcaatggcaactcttcagatgagtggctggcgccgtcattcaacaggacggcgccagcctctttggcgccgtccccctgccgacgtggcggggcgatgctgagggaccgcgcgttcgacgccgggtacaaggacgacgtcttcgtctgctcgtcgctgctccacctctacgcgagatggggcgccatgggcgacgcggtcaaggtgttcgtccgaatgccgaggagggaccgcgtcacctggagcaccatggttgctggtttcgtgagtgctggacagccactggatgcgattcagatgtacaggaggatgagggaggatggtgtgaagggagatgaggtggtcatgattggggttatacaagcgtgcacagcagccagaaatgtccgaatgggagcttcagttcatgggcatctcttacggcatggaatgaggatggatgttgttactgcaacaagcctcgtggatatgtatgcaaagaatggactacttgatgtggcgtgccgagtttttggtctgatggtgcaccggaatgatgtctcatggagcgcgatgatctcaggttttgcacagaatgggcaatcggatgaggcacttcggttgttcagaaatatgcaggcttctggtattcagcctgactcaggagcacttgttagtgctctgctagcttgctcaaatattggattcttgaagctagggaggtcagtacatggtttcatcgtgaggaggtttgattttaattgtatcctcggtacagcagccattgatatgtactcaaaatgcggctccctagcaagtgcacagatgcttttcaacatgatcagtgatagagacttgatcttgtggaatgccatgattgcgtgttgtggtgctcatggacgaggccaggatgcgctcactttgttccaagaaatgaacgaaactggaatgagaccagatcatgccacatttgcttctcttttgtctgctctaagccattctggtcttgtggaggaagggaaactatggtttggtcgcatggttaatcacttcaagatcacacctgctgagaaacactatgtctgtctagttgatcttttagcacgttccggtcttgtggaagaagccagtgacctgctcacatcaatgaaagctgagccaaccgttgccatttgggttgctctactttcaggctgtctgaataacaagaagctggagcttggagaaagtatagcagacaatatccttgaattgcaacctgacgatgttggcgttcttgcgttggtctcaaatctctatgctgctacaaagaaatgggacaaagtcagacaagttagaaagctaatgaaagattctggaagcaagaagatgcctggctgtagctcaatagagatacgcggaacacgccacgtgttcgtgatggaagaccagagccatcctcagcgtgaagagatcgtaagtaaggtggcaaagcttgatttagagatgaggaagatgggctacattccgagaacagagtttgtgtaccacgatctggaggaggaagtgaaggaacagcagctcagctaccacagcgagaggctggccatcgccttcggtttgctgaacacaggcccaggaacaaggcttgtgatcataaagaacctcagggtctgtggtgattgccatgatgccatcaagtacatctcgaagatcgcggaccgggagatcgtagtgcgagacgccaaacgcttccaccatttcaaagacggagtctgctcctgcagagattactggctaccgagaaccagcatggcaagaggatgcgtgttgctgtatgtatacccaactgatccccctaggcggggaccatcagaagaagttcagccacgcaaggcggccacgtccgtccgtccgtcacgggggacccggcggcgtggtagtggtgcggtgcccgtcgccttcgccattcccggccgcgggcgtcatctgtcgcggcgaaaacgacccgggaggtggcggcaaaggcttttgcttcctacccgctggggcgcgcgcgtcgccgatgatcacccaagaccgctgcactgcacctgccccatgtgggagcagcatccagcatggccagttcgcaacgctacaccgctccgatgtcgtcgtcatcctcgccgcctcctctgcgccctcatctgcgtcgtcggcctcgccgccgtcgcccgctgcgcccgtaaccgccgcaacagcggcggagccggcgccggcgccggctccgcctccccgtcgcacagcccggcccacgcggggcacttcggcggaggagggagcggaggtggcggcgtaacgacgacgacggcggcgacgaccgccgccaaggggctgaagaagaaggcgctgaaggcgctgccgaagctggcgtacgcggacgcggtggcggcggcggcggcggcgaggggcacggtggtgggggaggaggaggaggggaaggtggaggtgctcgccgagtgcgccatctgcctttccgagttcggcgagcgggaggaggtccgcgtgatgccgcagtgcggccatggcttccacgtcgcctgcgtcgacacctggctccgatccaactcctcctgcccctcctgccgccgccccatcgtcctcgacgacccctcgccgcccaagcgctgccgcaagtgcgaggccatagtcctcgaggccgtcgtcgccgcctcctcctcctcctcctcctccgccgccaccgccaccggcagcggcggaggcggcggcggtggcggtggccgattcttgccgtag

SEQ ID NO: 13496 - DNA, 642 bp, Oryza sativa
  Clone ID: TFbOSC405088j.C1.o2.fg
atggagtgctgcttccgcgtgtacggtctggccatcgccaacgcggtgtccatcggcggcacgagcctgctcgtctaccagctcgtcaggctggcgcggacgccggggagcaagggcggcgtcgtggcgctcgccatcttcctcgtgttctgggtcagcatcaacgccgtcgcctactcggtcttctgcggcatgctcttcccgtggtccgcgctgaggcggtgcctcgcgccgctcccgagcgccgcccggtggctgctctgcctgccgtgccggtgcgcgcggcggcggcggcggcgtccggcgacgagcacctcctcgtccgcttctgctctgccaccgcacatgtacgtgctggaacgcgagccgccggtgaggtggggggcgcgggttgcgacggcggacgacatccccgcgtacgagcagccggcggcgagcgagggcggcgcggcggcggcggcggcggagtgcgcggtgtgcctgggcgaggtggagaagggggagatggtgaagcggctgccggtgtgcctgcacatgttccaccggcggtgcatcgatccgtggctgcgcgaccactccacctgcccagtctgccggtgcgacgccttcgccgcgccgccattgccggcccaaatggtgtga

SEQ ID NO: 13497 - DNA, 721 bp, Oryza sativa
  Clone ID: TFbOSC400261j.C1.o18.np
cctagggtttcttcaccgccggcgagtgctccagctcccagccctgcgcgtcctcctcgccggacgctgccggtgacgtctgggccaagctagtgccctccgattccgtgttcccggaggtggagctggccgaggacgacgccgtggtgtgctcccgggtcaccccggatggcggcggggaggtggtcgcgtggtgcaagattaggcgcggcggcgacgtgtcggcggcgacgatttggaatctgagcttggatgcaattattgtcgatggaagagttatccagcaagaagcagttgacatcaaaccggggagtgaaattgttccagggccccagaaagatgggtatctgttgtacacctttgatataactggcctgaatgactaggacaaaaataatatcaattgtgctaggtattgagaatgcaaagtgcagcatatgcttaaatttgtgggatgatgttgttactgttgcttcatgcctccacaacttctgcaatggctgcttctttgagtggttaagaaggtcttcagctaattcgcgtgataaaagttagagtgctgcctgtccacaatgtaggacgacagtgcaattagttggtgggaatcacttcctacataatattgaagaggctatactgtaagttttttcatcgctacagcggtctgatgaggagattgcattgttggagtcatatgccccggtcaagacaaatattgtga

SEQ ID NO: 13498 - DNA, 642 bp, Oryza sativa
  Clone ID: TFbOSC900165j.C1.o12.fg
atgtcgctcaccaatgctccctcgtcgatggtgtcgatcgtgacgccggtgacggacagggacagcgggcgacgggtggcgggcgtgccgccggtgctcgtcggggcgtccgtctcgtcggcgccggagctgcgggggcgggcgtacctggtgcaccacgtcttctacgaggacggcagcgccagcgccgacggtggcggcggcgtggccccggcgtccagggcatcgatcgcggcgctgagggaggtcgaggaggaggatgacgacggcgaggaggcgtccgactgcgcgatctgcctcgacgacggggaggagtccagggagacgtgcgggagcgggaggaggaaggagatsccgtgcgggcaccggttccacggcgagtgcgtggagcggtggctggggatccacggcagctgcccgctgtgccggcacgagatgccgccggcgacggcggcggaggcggaggaggaggaggtggtggtggcgatggtgcatggggagagggtggtgatgagggggaggcgcgtggtgctgagcgtgctggtcatgggccgggcccacgatgacggcgagggcccggagcaacgcggcacggatccgattcctcctcttccgcgtgtgctcatagatgatgtggattaa

SEQ ID NO: 13499 - DNA, 663 bp, Oryza sativa
  Clone ID: TFbOSC14849j.C1.o7.fg
atggacgacgacggcggcgcgggccgcgacggcatcctagcgttcgcgcaccagctggccaggcaagccgcgttcctacttcaagcctccaacgacctactcgcatcgcttcttcagtccacctcgcgcggcggcggcggcgccgacatcctatcgttcgcgaatcagctggccaggcaagccggcgcgttcctccaagactccaacgacatactggcatcgcttctgcagtccacctcgcgcggcgcttccgctggcgccgccgccgcctcggacgaggcgatccaggcgctcaaggacgtgggcggcggcgacgtcgacggcggcgggcagaagctggactgcgcgatctgcctcaaccacgacgatccgtcagcgtcggcggcggcggggtggaaggagatgccgtgcgggcaccggttccacggcgggtgcctggagaagtggctgcgcatgcacggcacgtgccccatgtgccgccaccagatgccggcggcggaggtggtggagggggcggcttcggaggtgaccacgtcggagccgctcctgctgatagcgcgcgtacgccgctccggcgacggcggcaatgaagaggagcattaccattactatctttacgaaatacgagtacagtactccaccaatgtcgaaattaacccttaa

SEQ ID NO: 13500 - DNA, 546 bp, Oryza sativa
  Clone ID: TFbOSC400505j.C1.o10.fg
atggagatcttggtgagtgcactgctcctgctcctcgtgccacccttgtccgccctcctcgccgtcgccgcgccgagcctcgcgtggccgtcggggtcgtcgtcggtgaggaagctgatcgccaagaaggtggcgccggagcaggcggcgcgcgacgagctgctgcgcgtggcgcggtacagtagcgctagcgccgccgctgccgctagtgctgtccaacaaccaggcggcagcgagagtagtcgtccggcggcggcggcggcggatgatggtgggcggccggatcagtgcgcggtgtgcctgagcggcatcgaggagggcgacgaggtgagggagctccggtgccggcacctgttccaccgtggctgcctcgaccggtggtggttgtcggcgcggccgcccgccacgtgcccgctctgccgctgccggctcctgcagagcccgtcggcggcggcggacgacggcgacggcgacggcgaggaggattcggactcggacatggtgatgttcatggcgtacctgcgaagcagtagcacctggctctag

SEQ ID NO: 13501 - DNA, 1050 bp, Oryza sativa
  Clone ID: TFbOSC2013j.C1.o1.fg
atggggcggcgcgcgcgctgcctctgcctcctcctcctcctcctcctcgtcgtaggtggcggtttccacgtggccaacgcgcaggcgtcgccggcgccgccacagacgggcacgagggcggtcaaccgcgccgtgtccaccgtcatcaccgtcgtcatcggcgtcttcttcgtcctcgtcttcgtatgcgtcatcgtcaaccagtgctgcgactgcgactcctccgctggcgctggggctgggcaagggcagtcgtcggctgctcggcgccgccgcgggctcgacccggcggcggtggcggcgatcccggtcgtgccgtacgcggaggtcaggaagcacaggagcggcggcggcggcgcgctggagtgcgccgtgtgcctcaccgtgttcgacgacggggacgacctccgcctcctcccgcagtgctcccacgcgttccaccccgactgcatcgacccctggctcgagggccacgtcacctgcccgctgtgccgcgccaacctcgagaagcagccagcgccgtcgccgcctgccgtggagttctcctcctcgcctgctgcggccgcggcggcggcggaggagtcgcgtacgcccgaggccgcggcggtgcgggttgaggaggtggcggaggcgagcgacgaagaggagacgaggaggagggaggaggaggccgtggagctggagagtctgcgcgccgtgcggcgggcggcgaggatgccgaggtcgaactcgacggggcactcgctgtgcgcgctgccggcgccgcgcgcgccggggccgggcgacggcggtgaccacgagaggttcacggtgcggctgccgccgcacgtccgggaggaggtgctcaagtcgaggcgcctccggcacgccacgagcctcgtcctcggcatcaggggatcgagccgcgagggcagctcgaggggcggcggcgggagctggcacggcgcgcggcggtggccgtccttcctggcaaggacggtgtcgtgggcgcgcggcggcgtgggagcggacaccagcgcgaaggagacgccatgccgtgatgcggtctga

SEQ ID NO: 13502 - DNA, 807 bp, Oryza sativa
  Clone ID: TFbOSC416014j.C1.o1.fg
atggggcggcgcgcgcgctgcctctgcctcctcctcctcctcctcctcgtcgtaggtggcggtttccacgtggccaacgcgcaggcgtcgccggcgccgccacagacgggcacgagggcggtcaaccgcgccgtgtccaccgtcatcaccgtcgtcatcggcgtcttcttcgtcctcgtcttcgtatgcgtcatcgtcaaccagtgctgcgactgcgactcctccgctggcgctggggctgggcaagggcagtcgtcggctgctcggcgccgccgcgggctcgacccggcggcggtggcggcgatcccggtcgtgccgtacgcggaggtcaggaagcacaggagcggcggcggcggcgcgctggagtgcgccgtgtgcctcaccgtgttcgacgacggggacgacctccgcctcctcccgcagtgctcccacgcgttccaccccgactgcatcgacccctggctcgagggccacgtcacctgcccgctgtgccgcgccaacctcgagaagcagccagcgccgtcgccgcctgccgtggagttctcctcctcgcctgctgcggccgcggcggcggcggaggagtcgcgtacgcccgaggccgcggcggtgcgggttgaggaggtggcggaggcgagcgacgaagaggagacgaggaggagggaggaggaggccgtggagctggagatctgcgcgccgaattcaggatttggtacttttaatgggattgcagagaagggagaattgatgaacgacttcactaatattgccttttctctagaattgttcgcacttgaaagatgcttttaa

SEQ ID NO: 13503 - DNA, 425 bp, Oryza sativa
  Clone ID: TFbOSC32353j.C1.o1.np
ccccccgcccttgccgacgccggccaatggagttgccccgactgctccggggactccacagacgccccgcccccggccccggcaccgctggcccctgggagtgccggccaactcgtcgccgacatccgcgccatcgagtgcgacgccaccctctccgaccaggaaaaggcacgccgccgccaggagcttctcggcggcgccgcgcccgccggtgccgacgccaatgatgacgagggggacgacgtcctccaggtcatcggcaagaacttcagctgcgccttctgcatgaagctgcccgaacgccccgtcaccacaccatgtggccataacttttgcttgaagtgcttccagaaatggatccacagcggaaaaaggacatgtggtaaatgccgggcacaaataccagcaaaaatggcagagcagcc

SEQ ID NO: 13504 - DNA, 630 bp, Oryza sativa
  Clone ID: TFbOSC33081j.C1.o8.fg
atgccgccgccgacgcggacgcggcgaggcgtcacgctcgccgagcagatggccgcgtcgtccaacctccgcgacctcctcaagctccgcgacaacgacgacgacgacgacgacggcggcgggcaaggtggtcgccgccagccgcggccgctgcccgacgcggtggtggtggcggcggggcggcgacgcacgctgctcgacgtcatccgcggcgtcgacgacgacgatggccacgaccacccgcccaccggcgtccttgagggacaccgccccgcgacgtcgacgaggacggcggcggcggggggagcgcggggcgggagggtgtcgctgatggcgctgctggagcaggcggagcggcagtggacgacggccgccgccggggacgccagccggaggcgcgtagcggacgaccacgcggcggcggcggaggcgggcacgaacaagggcttcgccggcgccgccgccggcgtgggagggcggtgctgcgtgtgcatggcgcgcggcaaggccgcggcgttcatcccctgcggccacaccttctgccgcgcctgcgcccgcgagctccgagtcggccgcggccgctgcccgctctgcaacgccgccatccacgacgtcctcaacctcttctga

SEQ ID NO: 13505 - DNA, 300 bp, Oryza sativa
  Clone ID: TFbOSC33082j.C1.o1.fg
atggcgctgctggagcaggcggagcggcagtggacgacggccgccgccggggacgccagccggaggcgcgtcgcggacgaccacgcggcggcggcggaggcgggcacgaacaagggcttcgccggcgccgccgccggcgtgggagggcggtgctgcgtgtgcatggcgcgcggcaaggccgcggcgttcatcccctgcggccacaccttctgccgcgcctgcgcccgcgagctccgagtcggccgcggccgctgcccgctctgcaacgccgccatccacgacgtcctcaacctcttctga

SEQ ID NO: 13506 - DNA, 681 bp, Oryza sativa
  Clone ID: TFbOSC33082j.C1.o1.np
gtggtggtggtggaggaggaggaggaggagcggcggctgcggggggcgctgcggagcctgcagcaggaggccggggtgctggagcggctggtgtacaagcaccggaaccagcaccgcggcgccgcctacttccagtacctcctcaaggtgaggcgcgacgtgaggctgctcctcgccgccggcctcggggacgtcctcaccgccgtcttccccgtcctcgcctcccgcaagccggccaacaccatcctcgccgtcaacagtaggcagagtaagaagaagcctggtgcaaaccattgtcaccatgagaggcttttgggtgtcgcacgcttgttatcagagatggctgaacctgttatgatgggagcaagtcagatctcgtttttacttgcaagatcattttttgttgatctttgcacagcgattcttgctttgctagcaagagtgagggctctggttcaacagatgctacttgatgttgtctcagtttacaacaaggcttctgatcttattgataggaagcaatctgttaagattagtattggtggagcgcaggctttcagagagtactatccctcaagcaatgatgcccgtacttttctggaatgtgtttgggtgaaagataaatttgttttgcatgaaaatacaaaaggtagcaagaggtcgaagcccactccgcctcgt

SEQ ID NO: 13507 - DNA, 471 bp, Oryza sativa
  Clone ID: TFbOSC406125j.C1.o4.fg
atgtgcgccctgtgccagggccaccgcaacagcagccgcgcatcagccgcagccgccgccgccgccgccgcggctcaatcgcgaccgccaccgcagatgcgcagtggtggagatggtggcgacgacggcggcggcggcgagcggcagctcggcaggtcgagcgctagccccagcgcgccgccgtggcccaccgccctcgtcccggcgttcacgtacagccggtcggtgaggcgcaacgtgggcggcgacgacggcgaggaggaggagacggcggcggcggcggcggcgtgctcggtgtgcctgggcgcgttccagctcggggagacggtgcggctgctgccggcgtgcctccacctgtaccacgccgagtgcatcgacccgtggctggacgcgcacaccacgtgcccgctctgccgctccgacaccggcgacccatcgccggtggacgccggccggataccgccggtgtag

SEQ ID NO: 13508 - DNA, 447 bp, Oryza sativa
  Clone ID: TFbOSC932j.C1.o3.fg
atgctgttcttgaaagagctgcccatctggcaagcgttcgggttttccttattcacaggggccctcgccggcagcatcctgtacgccgtgtgcgtgctcctcctctgctgcgtcgatcgccgacgtcgacatgccggtgcgccgccgcctgatccgaagatctggctgccggaccacgcgcaccatcgccggcggcgggatgagtcgtcggagatggagtgcagcatatgcctgggggaactggaggagggggagaggtgctgcacgctggcggcgtgcaggcacgagttccacaaggaatgcatctaccgctggctcgccaaccgcaacacctgccctctctgccgccacatctccctcccccctgcttcatcaccaccacctgcgccgccgcctcaccatgcttctcctcctccttccaatgtactggctgctgctcatgtttag

SEQ ID NO: 13509 - DNA, 783 bp, Oryza sativa
  Clone ID: TFbOSC12971j.C1.o1.fg
atgccatcgtcatcgtcatcctcggtcgccgctgccccttctggcagcaatggcacccgccgcgacggtgggagcgggagcgtcacgggctgcctcccggctgaccaggcatgcttcgcgctttcgtcgtcggccagctcgccaggctacctgcacgcctcggccacaacgacgcgtcgcgatgcttctgccaccgtggcgcgcgcgtgctgcaccaccgcgtcgtacgtcgtcgtcctcgggatcagcttcggctccctcctcgccatcctgctcatcctctgcatcatccggtggtacctcgtgtggaggtcggcgcgaccacggcgggacgacggcgccgcggatgaggcggttgggtcagccaagaagcggtcggctgggctggatgacgacgccatcgcggcgctgccggtgttcgcgtacaagcaaagggaggagggcggcggcggcgcggtgggggcagcagaggaggagaaagaggaacgggagtgcgcggtgtgcctccccgtgatggccgacgggaaggcggcgcggcggctgcccagatgcatgcatgtcttccaccggggctgcgtcgatgtgtggctcagggagcactcgacgtgccccgtctgccgcgccaaggtggttgttaggccggccggtgcggcgcgcgttgagaagttgccgaagagcagcgcgtcgcgggcattgacatcgccggtgccggcaccggcgccgaggccgacggggacagtggtggacgacggcagggagagggacctcgaggcgcagcagtag

SEQ ID NO: 13510 - DNA, 516 bp, Oryza sativa
  Clone ID: TFbOSC900034j.C1.o1.fg
atgaaccctgcaagccgaagacattatgattctctcgtcgcgcgatatggtgaccaagatgcactcgccgaccgtttcggcggccaaaacgacggccctgacgcctggtggtccaacctgcgtgtgcggatgtctcaggatcatctactgaggcacgaggcgcggaggcgagccgccaccttggaggttttcgaggatagagaaaactcgcatgatggtgcctttggttgcggtgaccgggcctctgctaaggccatggtaactctgcatcagcccaatttgggcgagaccagggagcaggattgcgccgtgtgccttgagcctttcgaggaaggcaacacgcttagaatgatgccatgtttccattccttccatcagcgctgcatcttcagttggctccgcattagccgcatctgcccggtgtgccgtttcacgctgccctcccaggctgattttgagtcggagaaggctgagaaagaacgagttagtgcttcacctgaagatggcaataactga

SEQ ID NO: 13511 - DNA, 572 bp, Oryza sativa
  Clone ID: TFbOSC900034j.C1.o1.gp
atatcaaccatgaagcataaataagatcaactcaattgtgagacaggacacaagcaaagtaactcactaagcagattgatcactcaaaatcagcctgggagggcagcgtgaaacggcacaccgggcagatgcggctaatgcggagccaactgaagatgcagcgctgatggaaggaatggaaacatggcatcattctaagcgtgttgccttcctcgaaaggctcaaggcacacggcgcaatcctgctccctggtctcgcccaaattgggctgatgcagagttaccatggccttagcagaggcccggtcaccgcaaccaaaggcaccatcatgcgagttttctctatcctcgaaaacctccaaggtggcggctcgcctccgcgcctcgtgcctcagtagatgatcctgagacatccgcacacgcaggttggaccaccaggcgtcagggccgtcgttttggccgccgaaacggtcggcgagtgcatcttggtcaccatatcgcgcgacgagagaatcataatgtcttcggcttgcagggttcatcgtgtaccaacagggacatgaaccccctaaa

SEQ ID NO: 13512 - DNA, 633 bp, Oryza sativa
  Clone ID: TFbOSC401539j.C1.o112.gp
ggctccaccccggcgcggcagaccgggcacgacgagctggacgcgagccacttgtcgatgcaggcgacgtggaacacgtggcggcaggccggcagcacgcgcaccgcgtccgcctcctgcatggcgccgaggcagatggcgcactcggtggtgccgcccgccgcgtcgccgcccgccaccttcccgtacgccgcggtcggcagcgccgcgatggccgacgggtccagcccgacctgcttgggcggcgcccccgcgttcacggtcgccagcgcggccgcttccgccgcgcgcctgcggttccggcggcgtacgtggcagacgtagaggtggaggaacagggccagcccgagcacggacacgaacgcggcgacggcggtggcgatgagccgcacgttgcgccccggcccggccgacgagctcctctcgccgccgccgaaccacgcggaccccgggtcgctcactctccccggcacggctgacgtccgatccatcgatcgatactccgcttatccgctacacgcgagcgcgagctagttggcggagctaagcttctcccttggtttggtgagatggcgcgcggtttgggtgtgctaagctgagtagtactatctggtctctttataagctaagcag

SEQ ID NO: 13513 - DNA, 717 bp, Oryza sativa
  Clone ID: TFbOSC401539j.C1.o91.fg
atggatcggacgtcagccgtgccggggagagtgagcgacccggggtccgcgtggttcggcggcggcgagaggagctcgtcggccgggccggggcgcaacgtgcggctcatcgccaccgccgtcgccgcgttcgtgtccgtgctcgggctggccctgttcctccacctctacgtctgccacgtacgccgccggaaccgcaggcgcgcggcggaagcggccgcgctggcgaccgtgaacgcgggggcgccgcccaagcaggtcgggctggacccgtcggccatcgcggcgctgccgaccgcggcgtacgggaaggtggcgggcggcgacgcggcgggcggcaccaccgagtgcgccatctgcctcggcgccatgcaggaggcggacgcggtgcgcgtgctgccggcctgccgccacgtgttccacgtcgcctgcatcgacaagtggctcgcgtccagctcgtcgtgcccggtctgccgcgccggggtggagccgccgccgccgcctccgtcaacggcggcggcgaggtgcgtgcacgagaagcaggacgcggagaaggaggaggcggccgccggtagctcggcgccggtgcgggtgctcggcgcgtcgctaatgaagatgctgagcagggagagaccgtcgccgaggaggcagccgggagtccacgccgtggaaatggaagacttggaaagccagctgccgcggccgcaacagcagtag

SEQ ID NO: 13514 - DNA, 2079 bp, Oryza sativa
  Clone ID: TFbOSC409503j.C1.o6.fg
atgggcgccgggagcagccgcgccgatgcgccgccgcggcggcgggcggcggcgcgcggcctcgggctcgggctcgcggggtgcttcggcggcggatcctctggggcggccaccggaggcggcggcggcggcggcgcgaccgccgcgtcctcctcgcgagctcacgaggtggaatcttggcaagcagctcgagcggttgctgagatggactttcgggcttctgtcgctgctaaggatatccgcatatcaagtgagtcagatccaagagtgcatccatcttcaagcacaataagtcatcatctcaggttcaatcacttaaacagtcacgaaaacaaggaagatgccctgggaacagaaatcgctgaaacaagtgttcgtcagagttcatcaggaaaggaagtcatgcctaggggaaatttcagtaatgaagttgcttatgctgagataacgtctagagaaggaatcagtcatattggacgagatattttagaacctgcagcaaacaatgctgagactgacacagtttgcattccagaagttggtggccccgtttctgaatctggtttctcctcctcacagagggcatctgaaaggatcatggctgacttggaggctggagagattgctcatgggacttcatccacaactattatgtcaagtgaaagatcagatacttctcaatctagcttaacatctgtgttgcctgctacttcaactgcaccatctacaattggagaatcacttccagatacagtccctagcagagaagatgtccccatatttagtgggacacaaggtgagattggtggaaatacattacatgatgacatgatgagcattttctcaaacgatggtccagcgcgtgttagagattcaagcagcaatgaaatgaggaggagccatagaagggttctgtgggacacattttccagacgtagttcaagaggatatttagattctgataccgatgatctgggattttacagcagatggctagaccttggtgatgaactttttgcggatgagattgaggaggcacggttctttcatcggagacgccatggttcaatcagagtaagccagtattcaagatctcggattagggagcatcggcgtgctgtttttgatagcggtactgaccaaagtaccgttgcttgtcctttggggatccaccaaattggcagatgcacctgtgattccttcttgattgctgaagaatctagtgcccgtgcaagtatatcaagaattgtcatgttaaccgaggcattatttgaggtattggatgaaattcaccggcaacctgcatcactttcgctttccatggtctctgcccaggctccagaatctgtggttaattcattaccatgtaagagctacaaaaagcagacagcccaatgcagtgatgacatggaacagtgtcacatctgcttaactgaatatgaggatggagatcagataagaagcctcccgtgcaaacacgagtttcacttgctgtgtgttgacaagtggctcaaagaagtacacagcgtaccaaagctaataagcaaggccctgaccaacagattgcagctcatcatcgactatctcattgaccctatgcaatcaagttttatcaaaaacaggtcaatctcagaaaatttcattctagcatcaaagatggttcaatctgcgctcaagagaaaggagccaatgatagtgctgaagctcaatttccacaaggcgttcgacacagtaagctgggatgccctgttcaaaacattggaagcaagaggatttcctgaattatggataagatggatgaaatgtctcctttgcacagggaaggcccagagacagattaaacaccagggcaaacaacaacccacagacttcatcaatcttaagacataccggctcagtctttgggaggtgctcataggggtaggaccctatggaaagcacgcaacgccaggatctttgatgggtagcaaaattctctctctctcgtgtcaagtcaagtcaggaaatccattgaactctggagtcatcgaggccaagaaacaaccagggctaagctcttgtcctggtgtgaaaggctag

SEQ ID NO: 13515 - DNA, 1788 bp, Oryza sativa
  Clone ID: TFbOSC407936j.C1.o30.fg
atggcagagcagccaagaatcaactcagcattagtttctgttatccgtatggctaaggtttcaaagaatgccaactcagctgtctctgcagctgcgtatcattacatacgaaatgatgatagacctgacaaggcttttacaactgaaagggctaagagggctggaaaagctaatgcttcaagtggccagatctttgttactatcccacccgaccattttggccccattcttgcagagaatgaccccaagagaagcattggtgttctagttggggatacatgggaagacagacttgagtgcaggcaatggggtgcccattttcctcacgtggctggtattgctggccaatccacacatggtgctcagtcggtagccctctcgggtgggtatgtcgatgatgaggaccatggggaatggtttctatatactggaagtggtggaagagatctaagtgggaacaagcgtacaaacaaggagcagtcctcagaccagaaatttgagaagctgaatgctgctcttcgtattagttgcctcaagggttaccctgtcagggttgtgcggtcccacaaagagaagcgttcttcatatgctcctgaagctggtgtgaggtatgatggagtttacaggattgaaaaatgttggaggaagattagtgttcagggtaaattcaaggtttgcagtgatatttatggtgaccgtccgaggccactccccaaagttgatgagctgaaaggtgcaacagacatatcagagaggaaaggaactccttcatgggactttgatgagaaagaaggctggaagtgggtgaagcctccaccaatcagcagaaagcctaacctatcaggggatcctgcaactgacaaggaaatccggagggttgcaaggcgtgcccagatgtctgtgactgaaaggctgctgaaagagtttggatgttccatttgcaagcaagtgatgaaggaaccactcactactccatgtgctcataacttctgcaagttgtgtttggttgggacatatggtagtcaatcgtctatgagggagagaagccggggtgggcggactctaagggcacagaagattgtgaagaagtgcccttcatgtccaactgatatttgtgacttcctagagaatccacagatcaatcgagagatgatggatttgattgagtccttgcaaagaaaggctgttgaagaaggagataccaagacaagctcagatgttagcaatggtgctgagtcatctggagatgatggaaacaacgaagctttagagaagggagaggatgatagcagcttgaaggatgatggcagcttgaaggatgatggcaaagtggtcaaggctgtggttgtaatcaaggaagaggacctgcagcctaagaagagcaaaggagaagatgagaaagaacaaggtgacaagaagatggacagtgctgatgtggtggacattgcagttgaaaagaaacaggcgacgaagcgggcttctgagaaggctgagaagaagcaggcaaggaagcgcaagggggatgctgttgccacaaatgatggtaaaaggatgaaaacaggtggtgatgctatggagacagcagcggaagaggatgctcccctgagcggcggaactcctgtgaagcgcaacagcaggaagagtagtgaggttgatgccaaaggcggtggcggtagtcctgttgtgagcagccctcgcagggtgacgaggagcaatgccaaggctagcggtgaagctgatggtagccctgcgacaaggaccaggagggctacccgcgctgaagcctga

SEQ ID NO: 13516 - DNA, 615 bp, Oryza sativa
  Clone ID: TFbOSC14789j.C1.o6.fg
atggtgtcgatcgtgacgccggtgacggacagggacagcgggcggacggtggcgggcgtgccgccggtgctcgtcggggcgtccgtctcgtcggcgccggagctgcgggggcgggcgtacctggtgcaccacgtcttctacgaggacggcagcgccagcgccgacggtggcggcggcgtggccccggcgtccagggcatcgatcgcggcgctgagggaggtcgaggaggaggatgacgacggcgaggaggcgtccgactgcgcgatctgcctcgacgacggggaggagtccagggagacgtgcgggagcgggaggaggaaggagatgccgtgcgggcaccggttccacggcgagtgcgtggagcggtggctggggatccacggcagctgcccgctgtgccggcacgagatgccgccggcgacggcggcggagccggagaagaagaaggtggtggtggcgatggtgcatggggagagggtggtgatgaggggaaggcgcgtggtgctgagcgtgctggtcatgggccgggcccacgatgacggcgagggcccggagcaacgcggcacggatccgattcctcctcttccgcgtgtgctcatagatgatgtggattaa

SEQ ID NO: 13517 - DNA, 629 bp, Oryza sativa
  Clone ID: TFbOSC14789j.C1.o7.gp
aaagaaagaagcacctcgacattccttctatttactttatacttaaacaaagggaaagcattgcatacttacatttgcatgcgagtatatacatagatagcacggcaaaatcctagttaatccagatcaccctttcttaaatttgagaggagttattaattaatccacatcatctatgagcacacgcggaagaggaggaatcggatccgtgccgcgttgctccgggccctcgccgtcatcgtgggcccggcccatgaccagcacgctcagcaccacgcgccttcccctcatcaccaccctctccccatgcaccatcgccaccaccaccttcttcttctccggctccgccgccgtcgccggcggcatctcgtgccggcacagcgggcagctgccgtggatccccagccaccgctccacgcactcgccgtggaaccggtgcccgcacggcatctccttcctcctcccgctcccgcacgtctccctggactcctccccgtcgtcgaggcagatcgcgcagtcggacgcctcctcgccgtcgtcatcctcctcctcgacctccctcagcgccgcgatcgatgccctggacgccggggccacgccgccgccaccgtcggcgctggcgctgccgt

SEQ ID NO: 13518 - DNA, 615 bp, Oryza sativa
  Clone ID: TFbOSC400332j.C1.o12.fg
atggtgtcgatcgtgacgccggtgacggacagggacagcgggcggacggtggcgggcgtgccgccggtgctcgtcggggcgtccgtctcgtcggcgccggagctgcgggggcgggcgtacctggtgcaccacgtcttctacgaggacggcagcgccagcgccgacggtggcggcggcgtggccccggcgtccagggcatcgatcgcggcgctgagggaggtcgaggaggaggatgacgacggcgaggaggcgtccgactgcgcgatctgcctcgacgacggggaggagtccagggagacgtgcgggagcgggaggaggaaggagatgccgtgcgggcaccggttccacggcgagtgcgtggagcggtggctggggatccacggcagctgcccgctgtgccggcacgagatgccgccggcgacggcggcggaggcggaggaggaggaggtggtggtggcgatggtgcatggggagagggtggtgatgagggggaggcgcgtggtgctgagcgtgctggtcatgggccgggcccacgatgacggcgagggcccggagcaacgcggcacggatccgattcctcctcttccgcgtgtgctcatagatgatgtggattaa

SEQ ID NO: 13519 - DNA, 629 bp, Oryza sativa
  Clone ID: TFbOSC400332j.C1.o15.gp
aaagaaagaagcacctcgacattccttctatttactttatacttaaacaaagggaaagcattgcatacttacatttgcatgcgagtatatacatagatagcacggcaaaatcctagttaatccagatcaccctttcttaaatttgagaggagttattaattaatccacatcatctatgagcacacgcggaagaggaggaatcggatccgtgccgcgttgctccgggccctcgccgtcatcgtgggcccggcccatgaccagcacgctcagcaccacgcgcctccccctcatcaccaccctctccccatgcaccatcgccaccaccacctcctcctcctccgcctccgccgccgtcgccggcggcatctcgtgccggcacagcgggcagctgccgtggatccccagccaccgctccacgcactcgccgtggaaccggtgcccgcacggcatctccttcctcctcccgctcccgcacgtctccctggactcctccccgtcgtcgaggcagatcgcgcagtcggacgcctcctcgccgtcgtcatcctcctcctcgacctccctcagcgccgcgatcgatgccctggacgccggggccacgccgccgccaccgtcggcgctggcgctgccgt

SEQ ID NO: 13520 - DNA, 332 bp, Oryza sativa
  Clone ID: TFbOSC900163j.C1.o11.gp
cctctcccatgcaccatttgccaccaccacttcttcttcttccgcttccgccgcggtcgccggcggcatctcgtgccggcacagcgggcagctgccgtggatccccagccaccgctccacgcactcgccgtggaaccggtgcccgcacggcatctccttcctcctcccgctcccgcacgtctccctggactcctccccgtcgtcgaggcagatcgcgcagtcggacgcctcctcgccgtcgtcatcctcctcctcgacctccctcagcgccgcgatcgatgccctggacgccggggccacgccgccgccaccgtcggcgctggcgctgccgt

SEQ ID NO: 13521 - DNA, 729 bp, Oryza sativa
  Clone ID: TFbOSC900163j.C1.o7.fg
atgtcgctcaccaatgctccctcgtcgatggtgtcgatcgtgacgccggtgacggacagggacagcgggcggacggtggcgggcgtgccgccggtgctcgtcggggcgtccgtctcgtcggcgccggagctgcgggggcgggcgtacctggtgcaccacgtcttctacgaggacggcagcgccagcgccgacggtggcggcggcgtggccccggcgtccagggcatcgatcgcggcgctgagggaggtcgaggaggaggatgacgacggcgaggaggcgtccgactgcgcgatctgcctcgacgacggggaggagtccagggagacgtgcgggagcgggaggaggaaggagatgccgtgcgggcaccggttccacggcgagtgcgtggagcggtggctggggatccacggcagctgcccgctgtgccggcacgagatgccgccggcgaccgcggcggaagcggaagaagaagaagtggtggtggcaaatgtagtgttacacggagatgagaggagaggagaggagaggagggaggaggcggaggctgtggggcactggggacgaggaggaggcagcgatggcagtgagggccgggaggagaagacagcggtggcggtggaaggagaagaggcggaggtggcgaagcgacgcgtgcgaggagtcgcagcgatacacaggagagggagggggaaaatgaaaatacacaggcataggaggactagaagctga

SEQ ID NO: 13522 - DNA, 1128 bp, Oryza sativa
  Clone ID: TFbOSC900418j.C1.o14.fg
atggcggggctcgccggcgacgactcctcattcttcggggacgacggcgacggcgatgagttctgctacgggccgttcgacgtcgaggatctctgctacggcgcctccgatgtcgacgacgattgggaggagttctgcgacggccccttcggcggcggcggcgtggaggagttctgcgtctccggtttctccgtccgcgacctctccgacgcgtcatcctccggcgcccgcgagacgggcgacccccacgacgacgatcccctcccccaaaccctagcccgctccctcgactccgacggcgacctctccgccaccctccaccagatcgtgtccgcgatgcgcctctccgaggacgaagaggaggaggaggaggaggagctactggtcctcggccacggccacggcgtcggcatcggcggcggcggcgacgtagatgggttcatggtgagcgccttcgatctcgacacagcgatggccattgggggcatcctcgaggacatccacgaggtgatgggcgccgatgaggtacgggaagaggtggtggtggaggaggaggaggccggcaatggcggggggatcatgccgaatggattcgagttcgggccgccgccgcgggccatcagtggcaccgccgcgggattccggatgatggtggacgccgatgacactgactccgatgacttccagtttgtcgaggtactcggaggaggacaggtcagggaggccggtgccggcatgagcatgcggccctcgcgtgcgtcccaattggtggtggagagcttgccggaggcgacgctcagtgaagaggaggcctctcgtggctgcgccgtgtgcaaggactcttttgcgtcggggcagatcgtcgccttgctcccgtgcaagcattacttccatggggactgtatctggccatggttaactatcaggaccacttgccctgtctgccggcaccaagttcgcactgaagatgacgattatgaacaacgtatggctcggcgcgtgattgttctagcagcagtggagcatcagggtgcaccggcacagggctgtggagacagcgcaaccatgggtgctgaaggcgcaagtgaatgtgtggtagaaaatggacctgagaaaacttcattttga

SEQ ID NO: 13523 - DNA, 1017 bp, Oryza sativa
  Clone ID: TFbOSC401561j.C1.o21.fg
atgaacaaaagatttaacccacagtaccgggcatggcgcccacccacagggccacagggccacagggccgggccagaaagcggaatcgtcccaccaacaagagactacgtggtcgaggaggaggacgaggagcgccacccccacccccaccaccgcctcctcctcgacgacgacgcggcggggttcgaccacgacgaaaccctagccgcccccgcgcccgccccgggctccccgttctccttcgcctccgaccccgaccccgaccccgacatcgacctcgagctccgcctctcctcccgctcccctcccttctgggactgcctcgaggacgacctcgccgacgaggagatggtcgggggcggattcgagtgggaggagatcgccgacgccgctgtccctgcccccggagccgtcgctgctggtggtggtggtggtggtggaggaggagatgggggccttgttggggacggcgacgtgttcgggttcctcgacgagagggagatcctcggcgcgatggaggggctcgacagcggcgacgacgaatcggggttctccgacgagccgttcgacttcggcgacgagggggacgacataggggacatcttccggagcgtggggtgggaggtgctcccggtgccgctggacgaggacgacttcgaggtgctgccggggcacgtcgcggacgccgcggcgggaggggcgccccccgcggcgcgcgcggcggtggagcggctccaggtggtgccggtcggcggcggcggggaggaggcggcggcggcgtcgcggggttgcgctgtgtgcaaggacgggatcgcgcagggggagctcgccacgcagctgccgtgcgcgcacttgtaccacggggcgtgcatcgaaccgtggctcgccatccggaactcgtgtccggtgtgccgttacgagctgcccaccgatgaccccgagtacgagaagcggcgggtgaagcggcgttcttctggtgactccgtggcgcaattgggtactcctatgcaaatttga

SEQ ID NO: 13524 - DNA, 1938 bp, Oryza sativa
  Clone ID: TFbOSC34790j.C1.o5.fg
atggagccgtcgcggcggctgctgctgtccgactacgacggcgcgatcgtgtcgccgctgccgtcgccgccgccgtcgtcggccacgccgttcaggccgggcgtcgcggtggtcgtgggcatcctgacgagcgtgttctccatcacgttcctgctgctgctgtacgcgaagcactgcaagcggaacgccgcggagtcgtcgggcccgtacgggagcggcggcgcgttcgggtcgtccggtgggggcggggcgggcgagcggcggaactccggcgtcgaccgcgccgtggtggagtcgctgccggtgttccggttcggcgcgctccgtgggcagaaggctgggctcgagtgcgcggtgtgcctcggccggttcgagccgacggaggcgctccggctgctgccgaaatgccgccatgggttccacgtcgagtgcgtggatacgtggctggacgcgcactcgacgtgcccgctgtgccgctcccgcgtcgaccccgaggacgtcctgctcctcccggagccgccaaagccgtccaccacggggccccctgatccgccggagacgaaggtggcggcggcggcggcggctgctacggccaaggacaaggaggcgagcttagctcctgctgctcctgctccgtctccagcgtttagaggcttcttctccggccggcactcgacggggtcggtacgggcgccagggagggttggccctgcctcacgccggtcggccgatctcgtcggaggcgacggcggtgcggtggtgggatgcttcgaggccgccaaggttcgcaaggacagggtgctgttgatggagccggcggccgcggtggcggagcctgacccggaagcctacgaccggcggttcgggcaccgcatcctggtgagcaccgccggtggctgcgaggacgagacggcaccggcggcgaagcagcggtggagcgaggtgcgaccatccgatctgatgttcgtccggtcggagatgctggtgacggaggccggccgagttcagctagagaccatcacatcacgtgcactgttcctttcaacgatcggctgctactactacccgatggtgaacatgcacgtctcccgtcgtcaatctggcgatgtgatagttgtaagggtttctctgatagagacttggaggaccaccgacgacgatgttctcagccgatcaagcttgctaggaggaccggatgagcatgatgtcagggagcacctgctggacgtggacggcgtcggggaagaaggggcggcggcggcggcggggccgaagatacgggtgcgggggctgacgcggcggtcggaggcgagaggcgaggagatcctgcggggcgtcgacctggacgtgccgcgcggggtggtcgtcggcgtcatcggccccagcggcagcggcaagtccacgctgctccgcgcgctcaaccgcctctgggagcccgcgccgggcgccgtgctcctcgacggcgtcgacatctgcggcatcgacgtcctcgcgctccgccggaaggtcggcatgctcttccagctccccgccatgttcgacgataaaaactattttgaaaagtatttttattgtgggagaaactacaactacccgaagctccctaaggttgtgtttgaaggaaccgtggctgacaacgtgcgatacgggccacagctgcagggcaagaagctgacggacgccgaggtgcttctgctggatgagccgacgagcgcgttggatcccatctcgacgcagaacatcgaggaggcgatcgtgcggctgaagaagacgagggggctcaccacggtgatggtgtcgcacagcgtgaagcagatccagcggatcgccgacctggtctgcctcctcgtcgccggcgaggtcgtcgaggtgctcccgccgtcggagctgtccgaggccaagcaccccatggcacggcgcttcctcgagctcagctga

SEQ ID NO: 13525 - DNA, 1092 bp, Oryza sativa
  Clone ID: TFbOSC400903j.C1.o30.fg
atgatggtcgccggagtaatcaggagcaaccaggatggcggcggcggcggcgggacggtgtccggtgcggcgaggattagcccggcggtggtgttcgtcctggtgatattggctgtggtgctgttcgtgtccgggttgctgcatcttcttgtcagattcttgctcaggcgcggccgtgggcgagatggcggcggcggcggcgacgcggaggcggcggagggtgtggaggagtcggcgttgcaacggcagctgcagcagctgttccacctgcacgacgccgggctggaccaggacgtcatcgacgcgctcccggtgttcatgtaccgggaggtggtggtcggcgtcggcggcggcggcggcgcgggcggcggagccaaggagccgttcgactgcgcggtctgcctgtgcgagttcgccggcgacgaccggctccggctgctgccggtgtgcggccacgcgttccacatcgactgcatcgacacgtggctgctctccaactccacgtgcccgctctgccgcgccgcgctcggcgccgacgccgccgctctgttcgacgccgcgttcgacgagatggccgacgaggaggaccggaagcagcaggaggacgccgtgttccccgtccgcctcggcaagttcaagaacctctccagggcggtcggccccgtccacgaccgcgacgacgccgccgccgccgccgccggcgtcggcgtcggcggtggcattatcacgcgagaggaaggcgagtcgagcagcagcagcttggacgccaggcggtgcttctccatgggctcctaccagtacgtcctcgccgaggcgagcttgcaggtgtccgtacaccggaggcacggcgacggcaatggcagggcgaggctgagagggctcgccggcgccaacccggccggcaacgacgccgccgccgccgccgacgggaagaagatcggcgccggcagcaagggcgacagcttctcggtgtccaagatttggcagtggccgcggcaaggcaaggggaagctgccggtgctcgcctccgacgactcgccggcggtggacggccggctgccgtggccgaggagaagccccggggcttcctga

SEQ ID NO: 13526 - DNA, 1095 bp, Oryza sativa
  Clone ID: TFbOSC21352j.C1.o8.fg
atgtcgaccaagaggttgaataaggggagtgctggagtggcttgtgtttacttcgcttttctgcatattttggttctccgcactttacaggtttgcacgttctaccagaaaggttcatgctcgtatggtagccgttgccgatatgaccatgtcaaagtttctcgtaaccccacagtggctccaccaccaagctcaagtactacaacacgtgcatctagttctcttcagcctttgagtttcgggcgccctcaccatgtggggtaccaagcagattcaagcaacccaaggcaacagatatctatggatgtgctggcacattctggaagtaagcctgtatggagaaatgattttcaacatgaaagtgtacttgaggatgggattgactggtcaataagtccaactgtgcaaaaccagacaaccttgagtcctgctgatctgccaatctgttcttttgctgctggtggtaattgtccttatggggaagagtgccctcagatgcatggagatctgtgcacaacctgtgggaaaatgtgcttacatccttatcgtcctgatgagagggaggaacataccaagctatgtgagaaaaaccacaagcgtcttgagtctttgaaacgtagccaagagatagaatgcagtgtctgcctggaccgtgtgctctcaaagcctactgctgctgaaaggaagtttggactcttatctgagtgtgatcatcccttctgtatttcatgtattagaaattggcgtaacaattctcctacgtctggaatggatgtgaactcagcactgagggcttgtccaatatgtcgcaaactttcatactatgtcattccaagtgttctttggtacttttcgaaggaggaaaagctggagattattgacaactataaagccaaactcaagtctattgactgcaagtacttcgattttggaactggtacttgtccctttgggtcaagctgtttctacaagcatgcctacagagacggacgcttggaagaggtcatactgcgacatcttgatgctgacgatggaagtacagtgattgccaaaaatattaggttgtcggacttcctcagtcggttacatctttag

SEQ ID NO: 13527 - DNA, 897 bp, Oryza sativa
  Clone ID: TFbOSC7089j.C1.o1.fg
atgaaggagaagacgttagcgatggtttcgggcttgcctagcgcgaggatgatgcggcaaagtagggcttcgtgggtttaccagctgtcaccaatgacttgtgctgttgccggcactagcacgttggtgagcatggaggtgatgcatgataccactgggaagaaggaagtggttgtctgttatatgaacgcccctctaccgtacatgattgaagagaattacgggggatgcttctttgaagacgacgttgatcttgcacaggttctccaggaccaggaaatagtctatcaattaatacaaggaaattatggtactggttcatccaaaactcattcaaatcctagttctagttatagccatggatgtgaattgggtgaacggaaaccatcaggagttgcaagttatgaagcgcaactagttgttgatgaagctttagctcgagagctgcaacagatggaggaccaactagcaagtgcatcaattgatgaccataacataatagaacatggaagaaagccaatagcttcttcaacatctagcggtggtaatgcttctgcaagcagacctcctcaggtagtgatggaggatggcattgatccagataacatgacttacgaggaactgcaacaattaggggaagctataggtactgaaagcaaagggttgccggaagatgtgatagcgctcttgcctacttcaacatacaaaattaggatattctcaagaaaggaaaagcatgacgaatgtgtgatatgctgtatgacttacaagaaccgagataggctgactaaattgccctgtgagcatcagtaccatcaaacttgtgtcaccaaatggttgaagatcaacaaggtatgccctgtttgcaacaaggaggtttatgggtcgggcaagtga

SEQ ID NO: 13528 - DNA, 2247 bp, Oryza sativa
  Clone ID: TFbOSC900071j.C1.o19.gm
atggcctcctccctcctctcctccccaaaaccctcctccttctcctccgcaaaccccacctccactccacgcccacgcgcccaaactctctcccccttccgcgccgccgccccacgcttctcccatggcctcgccaccgccgccgccgccgcaaaccctagcgcctcccgccgctgctaccaccgcgccttcgcccgccccgtccgggcgtccatggcgcagccgcggcgcccggagtacgtccccaaccgcatcgacgaccccaactacgtccgcatcttcgacaccaccctccgcgacggggagcagtcccccggggccaccatgaccagcgccgagaagctcgtcgtcgcgcgccagctcgcccgcctcggcgtcgacatcatcgaggccgggttcccggcctcctcccccgacgacctcgacgccgtgcgctccatcgccatcgaggtcgggaacacgcccgtcggggaggacggccacgtgccggtcatctgtggcctctcgagatgcaataagcgagacattgatgctgcctgggaggccgtgcggcacgcgcggcggccgcgcatccacaccttcattgccaccagcgagatccatatgcagcacaagctaaggaagacgcccgagcaggtggtggccattgccaaggaaatggtggcctacgcccgcagcctaggctgccctgatgtcgagttcagccctgaagacgctggcagagagtttctatatcatatactagaggaagtcataaaagctggagcaacaacactcaatatcccagacactgttggatacactcttccttatgaatttgggaaactaattgctgatataaaagcaaacactccaggaattgaaaatgccattatttctactcattgccagaatgaccttggtctagcaaccgcaaatacattagcgggcgctcatgcaggagcacggcaattagaggtgactatcaatggtattggtgaaagggctggaaatgcttctttggaagaggatgggatgcttaagtacaaaggaacttatgaaataatttctcctgatgatattggtctaacacgtgcaaatgagtttggtattgttcttgggaagctcagtggaaggcatgctgtgagatctaaactagtggagcttggatatgaaatcactgacaaggaatttgaggatttctttaaacgctacaaagaggttgcagagaagaaaaagcgtgtaactgatgaagacattgaggcgctgttgtctgatgagatatttcagcccaaggttttttggtcccttgctgatgtacaggcaacttgtggaacacttggtctgtctacagcaactgtcaaactgataggtccggatggagatgagaagattgcatgtgcagttggaacaggtccagttgatgcagcttacaaggctgttgatgatataatacagatcccaactgttcttcgagaatatagcatgacatcggtcacagaaggcattgatgcaattgcaactactagagtggttgtcactggagatgtcagcgactctaaacatgctttgactggtcactccttcaaccgggcattcagaaagacggaggacgccgctatgattggcaacggaattgctccacggatggccggtgatcagtccatcgtgatgtccgagcaacagcgagctgagttttgcctgacgttgatggccgtaatgtacggccacacccggcagccagccgacgccgagctgctgcgaaggccgcaacgccgccgtgctgctgctgctgctgatccgccgccgcacatccgcaacgcaagtgtggtcgaaaacaccgagcctgatgtcctgttcgcgtatactccacacgatggtttgtcaccggagttcgacgatgacagcggcggcgttgctgattattttgcagccgatgatgacgaagcttacagcaacggtggcttcggcgcggtgccggcgttgtccgaggccatcgttagcatgccggagttgtccgtcggcgaggcgagggagaagcagtgtggggtgtgtctagaggggttcgaggagggtgacaagctcaggaagatgccatgcgagcactacttccatgagagctgcgttttcaaatggcttcaggtcagccgtctttgtccctactgtctcttcgccatgcctgcggctgaggaggaggaacataacaatgatgatgaagaagaagaagacgaagcaatgatgtgcatccgtttcttgttcccagagtag

SEQ ID NO: 13529 - DNA, 1689 bp, Oryza sativa
  Clone ID: TFbOSC422112j.C1.o3.fg
atggccgcggacgatgccgcgcggagcagcagaaggatggatctgaacctctacctcggcctcccccgcgccccgcgcctgcgccgccccgatctcggctccgacctcgcgctcggcaccccgatgctctcctcctcgccttcctcctcggcggcctcggccgacgcgccgccgctggagacggagccgctccacccgccgtactcaccgccccccgccgagcttgtgcgccccccgacacctctgcccgagccgtacgacccgtcggctcccgaggcgcacccgccctacgtgccgcctcccgtgccgcccccggaggcgatacctgagctcgctgacgaccttgagttcggcttctcccacccgccgcttctgctgcggcccagcgagctgcttgggtgggtagaccggccatcgtcgtcgacggcctcctcttccttccgcccggagcgtgtcgaccgctaccgtccccccgtgatctgcctgaatagccgccagagtcgctgcctccgtccaagacggttcaggtcggaccttccgcctctcggctcggaggcccctgccctggagaacgacgctgcagcacaaccgccaccgcaagagcctatgcaagatacggttgaagagaacaaggtggtcgccgatggcgctatcgtgggtgcctcagaggaggagccagccgaacgtggcaagagcgttgcgatgtttgagtgcaacatctgcttcgagatggcttccgagcctgtggtaacttcgtgtggacatctcttctgctggccttgtttgtaccaatggctgcatgtccactcaactcacaaggagtgccctgtctgcaaaggcgaggtcactgaagggaacatcactccaatttacgggagagggaattcgacttcggacgcggaaaagaaggttgcggaggagggaaatgtatcaggccctacaatcccaccaaggccacatggcaatcggctcgagagcttccggcagaaattccaccatttgcgcccgatttctagaaggcttggcgaggcacatgggatattgtcttcttggaggcgcatacttgatcagcagattatgaatagtgtgagtaggtttgaggggcctcctgaatcaactgtccaggaaatgattgatcatgctcatcatgctagccgtttaggtcgaattactactagaatgagggcaaggaggttgcagagggaagccgaaaactctacatttgttgcttcttctgctgcggagagtgggctgccagcaaacagcacatcggatctgcctaggcgtagctcaagtccattttcctcggaaagaattgatttattgcaacactttgttgaccttgcaagcacggaaagattggcaagcgctgtgagtgaccttagaagaatggttaggccgagcccttatggagcatcaacttcatcaaatccaccaaatccaccaaataccgagctgctgccagttgatgggaatcatgttgccgttgcactagctgcagatcaagcttccaattcaagcaccatggctgtaattcaggaggatgctgcttttactgaaagcacaggggaaccaagtaatgcagggtcttcgagatccctgaggaggagaggaagaaatgatgccttaggttctttggatgtggatggtgtgggactacaccggaacaagagaaggcggctgaactga

SEQ ID NO: 13530 - DNA, 972 bp, Oryza sativa
  Clone ID: TFbOSC402805j.C1.o20.fg
atggcagaagctgcaatcacaaggtactggtgccatgaatgcgagcaggccattgaggaggccatggtggatgagatcaagtgcccatcctgtggtggcgggttcgttgaagagatgaccgatgaggagattgagagactgaccaacaggcagccagagccgggtttctcgcaatggaaccctattgagcatccaggagaaacgatggacagcgacgatgaagataatgatttaggtcgtgagtttgagggttttatcaggaggcatcgacgggcatcaactctacgacgcgtgcttgacagcatccatgatgaccttgcagatgaccaagaaagggacagttccattctgatcaacgccttcaaccaagccctcgctctgcaaggctcagtgcttgatcctgatgagggccaaggtgaccaaggcggttcaacaaatgatgatggcttactggaggagtatgtcctcggagcaggtctgagcctgctgcttcaacatttggctgagagcgacccaagtcggaatggtacccctcctgcaaagaaagaggcggttgaagcgctgcccactgtgaaaatcgaagaggttgtcagctgttcagtctgccttgatgatcttgaggtggggtcccaggctaaacaaatgccatgtgaacataagtttcattcttcttgtatcctgccatggcttgaattacatagttcctgcccggtttgccggtttgagctgccttctgaggagacaaaagacttgaacgagcctagcaacattggtagagtggaggacagccatgaggaagtcagagctgatggccctggaaacgtcagcgagagcagtaacagaccctgggctattgttccttggttgaatgagctattctcaactcgtgaggcacagaatgctggaggtgtttctacggatcaacaatcaccgcacacttctggaaccaacccaaatgcagggcacagttga

SEQ ID NO: 13531 - DNA, 858 bp, Oryza sativa
  Clone ID: TFbOSC400283j.C1.o26.fg
atggaactaactggttggcatcttccagaaccaccgtcttccaccgtccgatctgtgatcgacggcggcggtgctcaccacccacgtttgataagcagccaggtaggccagccagcgaggcctacctcgccatcaccattgccaccgcgccatcgccaccgccacattccaaaagcagaagcagtccaaggcgagagacagagtccgcgacatggttcgatggagttgtcggcttctgctctgggtttcggtctttgtcttgaccctcacccagttgggggccttcgtcgtcgtcttcggcgagggggaggacgccatacctcgcgttctgattgccgccgccgtcttggctacgtaccacgtcctgctcactttccggtgagcggagtcggcggcggcttgcgcgggttcctccaccgcgcgccgccgggttctgcccggaacgacaagggctgcgcgaggcgccacaagacggcgtcgagttcggcgacgagcgcggaacccatggacgagggcgaggccgacctcctccagtttctcttcgtcacctccggtgtctcctggggaggcatcgtgggggtcgtcgtcgccgtgaacgcctccgtaccggctgcgcgggtgtggatgctccccggcgtcaccacgctggaccgggagctgggcggcgacgactgctcgatgtgccagtacgacaaggatgccggagccgtcgtccgcacgctctcctgcgaccacgtcttccacaaggcgtgcatcgacgtgtggctccgcgagcacggcatggcctgccgactttgccgccgtaccgctagctgcgtgctgccctggaaaaccggagggcgccgccgacacggctga

SEQ ID NO: 13532 - DNA, 1371 bp, Oryza sativa
  Clone ID: TFbOSC401376j.C1.o7.fg
atggggccctccgcagccgcgctgagggccgccgccgtggtggggctggttgtggcggtcgggctcgcgctcccgccgctggccgcggcgctgcggccgctcagggagcgcgtcgcgtccgcaggggccgcctcctcctccggatcgtggggcgatgagcatgcattcttcaagagggatgagaatgagataagtccgtactcatggaatatcacagggacatataaaggaagttggaactttgctggttccacaaatggttcttctaggtttcttgagtttacaaaattgaagggcgatgcggttttggaactattaagtacaccgacaaagataagcggggtgcactatgttcagggatctgttacattccatgatgttctagacaatgctcatgatcgtggagttgctcagataagtggtgcagatggcgagccacttcaagaagaggattacttcttatcaaatccatatcatttgaatatgtcagtacaatttggacctcttgcttttcataacctcaaagattccagttttgaggtagtttatatcattttgcagggagctgccaaggtttcaattctaatgatagggcaacaagctatcatggatgcatatctttgtctactgcatctgactgctgggatattggttgagtctctctttaacgcattcgcaacggctgctttcttcaagtttgtcgtattttctatatttgagatgcgatatctccttgccatatggaaagccagtagaccattgaacagtggagaaggctgggaagtaatgaggagagaattgtctgttctttacagccgcttttatggcattcttttgggagggatccttctcatgtatgagttgcacaattttctgcgcccacttcttttcctgatgtactccttttgggttcctcaaattgtcacaaatgtcatccgggatacaagaaaacccctgcaccctcagtatattttaggcatgacgatcactcgccttgctattccactgtatatatttggttgccctagcaatttcatgcgcattgagcctgacaagacatggtgcatagctgtgacaatattcatgggtatccaagcggcagtgctcctgctccagcactattttggttcacgctgctttattcctcaccagattctccctgagaaatactgctaccacaggaaggtagaggataacacaaatcagcccattgattgtgttatttgcatgactacaatcgaccttacccaaagaacaagtgaatacatggtggcaccttgtgagcatatattccactcaggctgtttgcaacgttggatggatatcaagatggagtgcccaacttgcaggcgctccttgccgccagcttag

SEQ ID NO: 13533 - DNA, 621 bp, Oryza sativa
  Clone ID: TFbOSC416737j.C1.o20.gm
atggcgcgttcctgcagcagcagcggcagcgatcatagtagctacgacctcgcgttaacgttgcggcggaagctcctgctcctcgacatcctcgccgtcctccgcttcctcgcggcggccctcctcgagcgtctcggcgtcgtgtcctgccaggaggacaatgagctccccggctgccactcctggtgcgacagcgacgtcgtagacaccggcgcgatggagcgcctcatgcaggcgaagctcagtacgtcgtggtacaggctacggcggcgtgcttcgcggggcggatcagacaacatggcctcgccgcacggcgacacgagcgcggacatctgcacgatttgcttggcggaactggaggctggaggtggaggaggaggatgccagcgccaggtcgcggagctgagcagctgctcgcacgcgttccacgccgcgtgcatcgacggttgggtggtggaggcgggaacctgccctctgtgccgcacgccggagtacatttttatagcttcaacaatcatgcctgttggcaacttcccgtgttctagctgcaacctggacgatcttcagaatttgtatagcggcaacgatagctggtcggtgcaccagctaggcatccactag

SEQ ID NO: 13534 - DNA, 1407 bp, Oryza sativa
  Clone ID: TFbOSC900230j.C1.o4.fg
atggtaatcgaccgaaacaaaaatggaaatggtaaaaaatatggaaatgaaaacggaaatggttttgctgttataccgatcgtttccgtatttactgtattcttgcggaaattaccgtttcttataatatggtgcttttctgggaggtgtaaccaactaaattcctatgctaccttctggttgatggccgtccctcctgttgaatcagaaacaagaagtgaagaaacagataatttccctttacttgcagaccacatggaaaatactggacatcatgcacatgcagttgatatcccatgggattcttcaccatcgacatctcgccgagataatcataatggatttgatcaattacctcgtatcttagaaggttctcctgggacatctactccatctaactctcagaatggtcctctagcaagaagagatgataatcgtggtcgtcgtcagcctagtcccttgaattctggttgctggatctcagttgagctagttgtaaatgttagccagatcatagcagctatttgtgttctgtcagtatcaaggaatgagcatccacactctccgttatttgagtgggtcattggttatacagtaggttgtactgccacgctgcctcatctttactggcgctatctccatcgcaacctcccaaccactgggcaagagccaacagttcagaatatccctccaaacaacacccctgaagctaattcatatggagtaaccggcacaaatggagtctcaagaaacaatgaggcaacagtaaatccaaggttccaagcttttgctgatcacttcaaaatggctctggactgtttctttgctgtgtggttcgttgtgggaaatgtatgggtatttggtggacattcttctgctcacgacgcgcccaacttgtacaggttgtgtattgccttcctcacattcagctgcatcggctatgctatgcctttcatcctctgcgcattgatatgttgctgcctaccctgcataatctctatcttgggatttcgggaagatctaaaccaaaacagaggagctagtgcggaaacaatcaatgccttgggaacatgcaagttcaagtcaaagaaaactcgtgatggagatggaaacgaagttggtgtcggtgttgtggctgctggaacaaacaaggagcgagtcatttctgcagaagatgctgtctgctgcatctgcttggccagatatgtcgataacgatgatctccgagagctcccttgtgcgcacttcttccacaaggattgtgtggacaaatggctcaagataaacgcgctgtgccccctttgcaaggctgagatagatggtgtctccacaagtgctccagccattggctttgggcgtcgccacagcgacaacagggtaggaaacgacattgaatcacaactataa

SEQ ID NO: 13535 - DNA, 786 bp, Oryza sativa
  Clone ID: TFbOSC400545j.C1.o54.fg
atggcgatggaaacgataatacgcttacggagcagcagcaagcagctggagggccaccacgggacggcgccgctggaggagggcccctcgtacgtgcgcttcgtctgcgacgtcaaggtgcggtgctggtcgcggcggctcggcggcggaggcgagcccgtgcgccacgacggcatcaagttcacgctggagacggagcgcaagcacgtgctggacggcgccggcggcgacgtcttcctcgactacgaggagacgcggcggatggcgtgggccgtgttcaccgggatgcgggagctccgctgcgtcgacctctcccgcagcaactgggcgacgcccatgcccgacgacgacgccgccgcgtggatccaccgcgcggtgaggcggaaccacgacgacggcctcgccggcggccactaccgcttcgccgcgcgcgtgaaggtggcggtggagctggtgttcagcgagcccgtgtcgctcgtccgcgggctggtctggctggagacgcgcgccggcgacacctgcgggatctgcctggacggcctgacggccagcgagaggtgcaagacgccgccggcgaacctgccgtgcgggcacgcgttccacccgccgtgcatcaccaggtggctgttcaaggggaccacctgcccgatctgccgcgacgacctcaccggcctcgccgccgcgccatgggagagcggcgtgatgtcgtgccctgggtgcatcatgccatccacgccgtgcgtcgaagattgcccgagcctgaaggctctctctctcaacagctag

SEQ ID NO: 13536 - DNA, 1197 bp, Oryza sativa
  Clone ID: TFbOSC900378j.C1.o8.fg
atggaacaaactacaggtgttagtggccatgagcacataattgatattccaagggacagtggtccatctacttcgacttcccatagtgttgctagagaaaaccatggagaaccaaatcctgttgatagatctgcaaccagagcgctagtacctgctttgcaggcaccatcagcagttggtgcacctagtgcaggacatacttcaggtgctagaagaagtgataactatgttcgccggcacagaagccctttgaattctggactctggatttcaatagaagttcttgtcaatgtgagccaaattgtagctgctattgttgtgctttctctttcaagaaaggaacatccgcaagctccattatttgagtgggtcataggttatacagttggttgttttgctacactaccccatctttattggcgctatatacaccgcaatattgtcaatggtgaaaatgagccagcacatacacttcaaggctcctctcagaacaattcaactgagccttctgctagtgcatcagagcgtcgaaggaatgctgcacgaaatgcagtgctcgctaatccaaggattaatgctctttttgaccacttcaagatggccttggattgtttctttgctgtgtggtttgtcgtaggaaatgtgtggatatttggcgggcgttcttctgctgccgatgctccaaacttgtacaggttatgtattgtgttccttacctttagttgtattgggtatgccatgcctttcatcctctgtgcaatgatatgctgctgcctgccctgcatcatatctgttatgggatttagagaagatacaaacaatacaagaggggctacctcagaatccatcaattctcttccaacatacaaattcaaaaccaagaaacgccgtcatagttcaggaaatgaagctgaaggccaagatggtgggatagtagctgcagggactgacaaggagcggtcactatctgctgaggatgctgtttgttgcatctgtcttgcaaagtatgcacacaatgatgagcttcgtgaacttccctgcacacattgtttccacaaggaatgtgttgataaatggctgaagattaatgcactttgcccattgtgcaaatctgagatagcgagctcatctggaacatctgatactcgtcgctctgaccacacagatattcctgtgcaggagattgaaatgcattag

SEQ ID NO: 13537 - DNA, 915 bp, Oryza sativa
  Clone ID: TFbOSC400225j.C1.o16.fg
atggacgtacaacttgagtctactgctgttcaacatggacaagctaagataaatgtggaggaacatgctctagtttctctgttgtctgatgagaagtacgcaactgaaaagaccgaagatgtggaccctgatgattatgagaaacttgaggaagggataatgcagtatgggtgtgcacattatcgaagaaggtgccgcattcgagctccatgttgcaacgagatttttgattgtcggcattgccacaatgaaacaaagaattcaattaaaattgatgctgtgaagaggcatgaactcccacgccatgaagtgcagcaggttatatgctcgttgtgtggcacggaacaagaggtacggcaagtatgtatcagttgtggtgtatgcatggggaagtacttctgtgaagtgtgcaagctctttgatgatgatataggaaagcataatgacacttctttctacaatgtcaggtttcaaaacagcaatatcattgcaatggttgtggaatatgcaggatgctgttattctatagtattgaagaacagtcatgcatgtgttgaaggagcgatgcatcatgactgtccaatctgctttgagtacctttttgaatcaaccaatgatgtttccgtcttgccctgtggtcataccattcatgtcaagtgcttgcgagaaatggaggagcactgccacttaaaattgatgctcagatttgcttgcccgctttgctctaaatctgtctgcgacatgtcgaaggcatgggagagattggacgaggaactagcaacgatatctgacacctgtgacaataaaatggtgcgcatattgtgcaacgattgtggggcaacatcagaggtgcagttccatttgattgcgcacaagtgccagaagtgcaagtcctacaacacccgccagatctga

SEQ ID NO: 13538 - DNA, 429 bp, Oryza sativa
  Clone ID: TFbOSC33582j.C1.o2.gm
atggcgctgagaagaaccttgcagcttgagagcttgtacatcgagaaaaacccagcaagtttgcaaggacaagatttggctgcattaggatccttatcgggctcaaacgtcgtcgatgttccgctctccacgtccgcgggaggatccttcgacatagagccgtccggggtcgtaaccacgacgttctcgcttccggtcattgatggaccagccgagatcggcaccgtgaaccttgagcaccaagtccccgtacctagcgcgcaactgtcgacggtggatacccgcagaccggatatagagggtattggggatcaaactaactggcacgccctgaacctgattaatagggcctgcactagagataagtggatctcccaggccttcgtgtgtcgtgatgaatttcatgttaacacctctatgtggcgctga

SEQ ID NO: 13539 - DNA, 741 bp, Oryza sativa
  Clone ID: TFbOSC400800j.C1.o38.gm
atggggcgtcactacgcattcgtcgcccacgtcatcctcctcctctccattgcccacgctgctccgaggccaccactgccgcgcatcgttgccgtgggggcggtgctgtgcacgccagcgcggccgttcgcgtcgtcggtggggaacatcggaggaggcacgtggggctcgacgtacgcgacagcgagggcggtgaaggccgggcatggggcgctcgagtgcgcggtctgcctcgccgagtttgtggacgacggcgagaagctctgcctcctccccgggtgctgccatgtgttccacaccgcctgcatcgacgtgtggctcgccgcgcatgtcacctgccccgtctgtcgtgctgacctcgcggaccgggccgttgctgcagccggccatgtccttgccgctgaccaagctgctccgcaggtcggtgagcatggtcaccacgcccgcgaccgcatcaagcgggcggtgggcttcggcggcatcgcggacaatgtcggtggcgcgtccgagccggagaaggagaacaacatgccaacgccgaggcaggcagagcaggagacgctagagcggtgcgcacgcacaccccgtgcgtcgactccatcttcgctgtgggagctcaccgacgatgccttcagcggcaacgaaagaaagaggaagaagaggatgggagaaagaacaagagatatccacgagaagattcacgttctttggatgtctcacagcaaatgccacaaattttga

SEQ ID NO: 13540 - DNA, 615 bp, Oryza sativa
  Clone ID: TFbOSC401325j.C1.o13.fg
atggagatcggtggcgtgctcgtgtcgctgctcttcgccgccttctccctcccctgcctcctcctcctcctcgtcctcgccgaggccggcctccgcctcgcctccctcgcgctccgcggcggccgctacgcctggcccacccgctccgacttcctcggctaccgcatcgcccgccgccgccgcgccgccgtctccggcggcgccggcggggcggacggcgaggaggaggcgcagccgacggcggagtgctgcgaccgccttgccgtggcgatgtaccggcgcgggcgcgacgcggctcccgtggactgcgtgttctgcctgtcgcgggtggacgacggcgaggaggtccgcgagctccggtgccgccacgtcttccaccgcgcctgcctcgacgcctggctcgtcctcccgcgcgccacctgcccgctctgccgcgactgcctcctcccgccgccgtgcgagccgccgcgcagcttcccgctcgactactacgacgacgacgacgacgtccacttcggcttcaacgacttctccatcacctcctccaccaccaccaccacctccgccgccgccgccgtcgcctacccacacggcgtcgcgctctggcccatgtaa

SEQ ID NO: 13541 - DNA, 579 bp, Oryza sativa
  Clone ID: TFbOSC13655j.C1.o5.fg
atggcgccgcctccgccctcgtccgagctgccgcctccgccgccgacgaacgccgccacctcttcgtcggctatggctgtcccgtacttctgccgcaagcacgtcgctctggccacctcgcgttcctccaccgtatggaccgtcgcaaagcagaccgggctgaggagcgtcaccgtcggctccgacaccgcggtggcctgcgccgtctgcaccgacgacctcccgccggcggcgaccgcgtgccggctaccctgcgggcacctgtaccacgccgactgcttcgtgcagtggctatcgcggcgcaactcctgcccggtctgccgccgccgcgtcccgttgttccccgatcatggcgccgcctacaccgacgaagacgaagacgaagacgaagaagagatcgcgccatcgccgccgccgcctcatggtccggagacgacggcgaccgacgaccaccggccgcggtctctgccgggagcgagctggatcggaagaatctgccgcaggttgcttggctacacggaaacgagccacccgcgtcaactgaaccgatgcagcggcgacacgacgcagcaatggtga

SEQ ID NO: 13542 - DNA, 1731 bp, Oryza sativa
  Clone ID: TFbOSC13655j.C1.o5.gm
gggatcgccggccggtacgtgcggttcgacaagggcagcgacgcgtacgacctccccgacggcgtccgcgtgccgcgctccacgcgcaccctggtgcgcaagctatgcgagctggggtggctgttccgcaaggtgcgggggttcatctccgacaacatcagtcgctctccctccgatgctgccaccgaggtcggcaccgttgctcaggccttctgctccgctctacaggaggagctctctgattactataagctcctcgccgttctcgagtcttactcgctgaatccgattcctacgcctggatctgattcaggggtgtctggtaattacctctctctgcggcgtcttgcagtttggctagctgagcctgcggtgaggatgcgcctaatggcggttttggttgatggatgccggggtttgagaggtggcgcaatggctggtgcgatccatgggcacgcacagcatggggatcccaccttccaggattttatgggccgcttgctgcggcgggtgtgctcaccgctgtttgaaatggtccgaagctgggtgttagaaggggagttggaggatgtgtttgcagaattcttcattgttgggcagccagtcaaggctgagtctctgtggcaggagggctatcttcttcagtctgatatgcttccagctttcatttctccagtactggcgcaaaggattcttagaaccgggaagtcaatcaactttcttaaagtttgctgtgatgataatggttgggcagatgctgctactgaggctgctgtctgtgttggcaccacaactagtcgaggtgggcttggttatgggcagattgatgctttggaggcactagtggttgaagcagccaagaggattgatcggcatttgatggatgtgatccataagcggtatcgattcaaagatcattgtcttgcgattaagaggtatttgcttcttgggcagggtgacttcgtccagtatctgatggatgttgttggccctgagttgtcagagccagcaaataggattagctccttccatttggctgggttgcttgagactgcgatccgagcatctaacgctcaatatgatgaccgtgacatcttggatcgcataaaggtaaagatgatggatcatggagatggtgatcgtggctgggatgtgttttccttggagtatgatgctagggttcctctggatacggtattcacagcttctgtcatgaagaggtacctcaagatttttaacttcctgtggaagcttaagcgtgtagaccattcattgactggaatctggaagacaatgaagcctaactgcattgtttcatctccattttacaaggagggaacaaacatcaggtctcagtttgtttcagttcttcgcaaatgccaagttctatttaatgaaatgaaccactttgtgaccaacttccagtactacattatgtttgaggtcctggaagtttcctgggctcgtttctcagaagaaatggattcagcaaaggatttagatgatcttctgttggcacatgataagtatctcacatcgattgtggagaagtctctccttggtgagagatcacatggaattctgaggaatctttttgcactttttgacatcattttgcaattccggagccatgctgatcggtggtttgagcggatatatgagttgcaactgaggggaaaggtcgtgtttcgtctaacaaatgaagatgtgttcctgatgtggaaaaagtag

SEQ ID NO: 13543 - DNA, 1680 bp, Oryza sativa
  Clone ID: TFbOSC401539j.C1.o2.np
atgagtgctggacttcccgcttggaagatcaaccgaacatttccattaagggtctgttcgctcagaagcactacacttctgaaaagggggaataatagcaaggctgagtacaaccaccgtactcaacaagccacaccaacgatgcagacgtgcaaggggaacacaaggacgaggaaagctacactacaagcccagccgttgcccacgctggcttgtggggcgggccccacacgtcagcggcaaagcccaccgtggaccgagtccacggcggcagccggccacgtgggcgcgcacccgacgctccggatcggccggggccgatcggacggccgggggcggccgagcggcacgaccgggcaggcacgcccacaggcggcggcgaccgccgagcctagaccaccggcgacgacgccggcggcgggcggcgacggcgcgagaggcggcgagagagtggagagggaggctgttctcaccgagcgaatggggcggcgagacgaagacgaggagggcgacggcagaggtgcgactggaggcacaaaagtggctgtggctcgggttcaccgtggagcgggcggctcgggggtggaatggaggagcggcgtggtggccgggcttgccggcggagcagcgaagctagtggtggtggcggcgcggcttgaggtggacgggaacggcggcaagaggctgccgaaggcggcgaaacggcggcggtgctcggaccgaggcgtccaccaccaccaccaccactcgagttcccccacgatccccaacccttcctcctccgattcgccgccggtagctgccagcgtctgctccccggctcgccgcgcgccggccggcgagtgcaccgcgcgcgggcgcttggtcgacgctatctccggagtactccgcggtgacttgtgctgtgctcgatcgcggtcgtcgcttgctgttgatcgaccggtccagatccgcgtcgtttacacggtgcgtggctgttcctcaatctacggatcggacctcggactcatggagaaccgcgtcggtgagtcgtcggcgaccgccgtcgatggcggcggcggcgccaaggactcgggcagcttcgagtgcaacatctgcctggagctagcccaggaccccgtcgtcaccctctgcggccacctcttctgctggccgtgcctctacgagtggctccacgtccacgcgcactcccgcgagtgccccgtctgcaaggccggcctcgaggaggagaagctcgtccccctctacggccgcggcaaggcctccaccgatccccgctccaggtcggtggccggcgtccagatccccagccggccggccgggcagcggccggcgacggcttcccagcctgatcatcaccacgaccatttgccgcaccacgacccgtggttcatgggcggcgccggcgcccctgtggccggcggtcgctgggggaactacactttctcggcggccattggggggcttttcccattgctgagcttccaggttcatgggttcccgcaggcggcggcgtatggacctgccgctgggtttccttacgggtatggacattcgttccatggctggcatggccatggtttcccgcaccaggcaccgcagggccagcatgttgatgtgttcttgaaggtattgcttgttctggttggtgttcttgtgattgccagcttgattgtgttt

SEQ ID NO: 13544 - DNA, 1065 bp, Oryza sativa
  Clone ID: TFbOSC401785j.C1.o9.fg
atggtggctgtgccggtggtggccgacgatggaggcggagggcatggggcgaagggggaggagagtgtgagcgggagcgtcgcgggcatttcgccgagcatcctcatcatcgccgtcatcgtcgtggtgatgctcctcgcctccgtctccatccactacttcatccgccacctgtgccgccgctcgtcggcgtcggcggccgcgtcgtcctccgcgccggtgctccccgtcgtggtgcgccccgcgtcgtcggcggccgtgggggagcaggtggtggggaaggcgtcggcggagcgcgcggcggagatggagcggctcatctcgcggctgccgctgttcacgctggcgtcgtcgctggcggcgctccccaagtcgtcgcgcgactgcgccgtgtgccagagcgcgttccgcgacgacgacgagctccgcctcctcccggcgtgccgccacgcgttccactcccgctgcgtcgacccgtggctccgcgccaacccctcctgcccgctctgccgcgcctccatcgcgctcccgcacccgcccctcccggacctcctccgcgtcgagctcggcagcgtcagcagccgccgctccaaccccaactccgccgccgccgtcgccagcgcgccgcccgagggcgccgccgtccgcgcctacccgctccccaccctccccaactccgagtacctcgtcgaggaggagctcgaggtcgtcatcaagcaacccgccgccgccgctgcgccaagaaccggcgagccaagccagcatccgctgccggcggcgcaggcggagcgtgggcagccgtcgtcggtgaccccgacggcgtcgttcagctcggcgaggtcgcaggagcggtggagcaacaggtggagcagcagatggagcagccggtggagcagcgggcggtggagcagccggtacgacgccggcacggtgacggcggccgccacggcggagtggtggtgggacatggacggcggcgcggcgcccgccgcgcggcggcgcgaggtggaggagcagggcaacgcgttccacggcttcatgcgctggctcacaggggcatactag

SEQ ID NO: 13545 - DNA, 5709 bp, Oryza sativa
  Clone ID: TFbOSC21831j.C1.o4.fg
atggggaagcacaagggccgagctgccagcagcggcttggcggcgtcgctgctgccgcatgcgcagggtgccgtccccatcgttggtttcgggggttaccatggcgcctcccgtgttgagcccgccgcgccttcgtcctcgaccgaccccgatgcctcgattctcctccctcccgatgtggacagtgaggtgctgcagcacctaaggagattaggaaggaaggatccaacaacaaagctcaaggcattatctacgctctctatgctctttgcacaaaaacctggtcaggaagttgtgcaaattgttccacaatgggcattcgagtacaagaggctgctgcttgactataacagagaagttcgtcgtgctactcacgataccatgtctagcctcgtcaaaactgtcaagaagggtcttgctccgcatcttaaggctttgatgggtccttggtggttttctcagtttgaccctgctcttgaggttgcacaggctgctcggcattcgtttgaggctgccttcccacaatcagataaaaggttggatgctttaatgttatgtgtgaaggaaacatttcttcacttgaacgagaatttgaagttaacaacacaagcattgtctgacaaggctacaccaatggatgaactagaagatatgcaccagaggggaggcattgaggcaggtcaggttactggcacagtatgtcacaagtcactgcaacaaccaagtgacgagcacaaacagttattcgttggatgggtaatatcatcatcattgttagcaatggcaactctgattgacattttgctaggtgtaaaattacaaaattgtgtccgtgacaattccagttctgaaaatacgagtctttcaaaagttctatctggcacattgtcttctgctgaatctgcattttctatgaataaatattttcttgatttcctcaagtcaaaaagtgcgattatacggtctgccacatactcactgcttgcaagttatatcaaacatgtttctcatgttttcaatgaagaagccatgaaggtactatctcctgctttacttggtgccttcaatgaaaaggacccatcatgtcactcctctatgtgggatgcatttcttgctttctctagaaggtttccagaggcttggtcatattgcaacattcacaaggttgttttcagccggttttggcactttctacaaaatggatgctatggatccaagcaagcctcataccctctcctggttcagtttttggagtctataccatctaaagctgtaactacagagcaatttgtttttgacttcttacataatctctgggctggaagaaaccagaggcaattatcagctgctgacagtttggcattctttactacctttaaacagagtttcttgtggcttctaaaagttctaccgagacattctggaggaggttcttcggatgatattcctatcaagctcataacttactttcttgcaaaagttgtttggcatgattaccttcgaataccatcttccaaaaaccaggatattagtttgagtggattgtctgatgaagcaatcagtggtgattgtcagttatctcataaggagtcactgttggcatcaagcacacgctacccaacttattatcttcaggatttggggaaatgcatcattgaaatattggatgagatttcagctatggaaaatcatttgttaaatattgcttgtgagactctattgaaggactgtttggatataatccatcaaagggagagtttgccaaattttcagtatcatgtggaacaagttgtgtccttttttatttcgttggatcagctcattgtacagaaaggtaaaacatggccattggaaagcttagcaagaccactgattgaacaatctgtgccagctatcaagtctatgatccagaaggacactccaattgttgttaaacttctatcagttttggttgaaatattcaggcctgtccctttgttcttgaagaattcacagaaagagagtgaggaatctgtccaagatgagtgcttctttgaccagtggtgtacgattattaaatatactagtgctaagcaaaagcaccctgttgataataagaactcacacgttgatgaccaatttgaattgctgacacttatacttcaaaaggtaagagaaagaattgctgggggcaagttgagaaatttgcagaaaaatggctctctaccagaacattggcggcatgacctattagattctgctgcagaatctgtcttctgtgatttgcctgctacagattcccatgtccattatgtatgtgctgcacttggtggctcagatcaagatgaccaaatttgttttctttctgctgatactgtccacaaaatgctcgggtccattttgaagtgtttgacatcagtactcatgacatcaacttttgagtgggcaaggtttgcatatgtggtgttattgcctactgaaccaaaggactcgaaggttataggagcacaatccttttcatcaaacattaagatggctcattttgctttcaaagttcttgagggtagcttatttgccctgagaagactagaggaagattctttatttccttctgttctggcagctctgtttatcattgaatgggaatatagcatggccttaacactcgatgaagaacatgacttgaaaggttataaagaagatattgatgttgggtcttctgcatgcaacagttcagatgatcatttggatgagggaatacatttgaaagctaaccttgcagagagtatacataccttttgccaaagcttaagtccatccttttggagtgatcttcatccattcaccttgaataatttgttaaatattttagctcaatctgtcaggtgtgctttatttcagacactagagttgccaactgagagcacatcagtcttatgctcagagtggatggtgaacatgttgaagctcatctctcttgatcacacaaaattgcagagttttttttatcttcttttatctgagggagaatattggccactctgggtgaaaccatctttacaaaatgagaatgcaccagtgaagatcaaatttgagccagttattacaaatgaaacgggactgaaacaccatcaatttgttgcttttgttgacaagcttgttcttaaccttggctttggtgaagtgatcttaggtgttccaggaaatacatgttacaacacatcacaatcaattgatactacttcaactgttccttcattgtctagagcatgggttgctgctgagattctttgcacttggaaatggaaaggggggagtgtattcagcacattcttgccttctatgattcagcacttgaaaatggaatcatgtgcagaggtcagcatattgtccatattgcttgacacattgttggaaggagcttttcatgagtgtaaccagtgggtactgttcaatgcttggcacatttctgacaatgagattgagaaaattcaagatcattttctacgtgctcttgtggctttgctatttagtatcaatagcatcaatgagtgtatttggagagaatccgaggcacttgtattttttgagaaactactgagcaatctttttattggttccacagtaaatagaaaatgtgtaaagactcttccctttgtcatgagtacaatcatcaaaccgttgtcaggcaaactgaaattaaatgaagcttcttgttacactgatttggtggggcaaaacatactgagttggcttgatgtagccatctcttgcctatcatccagcccgagggaagtacttcaacaagacattgttgattggatgcaagtggtgttgtcttgcttcccgttgaatataacatgtggaacccagaaactagaagttaagattgaacgagagatcagtgatacagaaagatcattattgctgactctttttcagaagtacaagattttctgtgccattgaagctccgtcgctgtccaccagtggaactaccctgtcaacaatggttgaactattgggggtgaaactgatagcagttatggttggctattgctggacagaacttcaggaaaatgatttgcattttgtgtttcatacagtacagaagtggattgaatcagctgttttgcttgtggaagaaatgacagatgccatcaatgatgctgtaataaaccagaaatcaaatgaagatactttggagaagcttaaattagtggttagctctatagatgagttaactttaagcttcggtgaattcgctttggttacactgtgtcacctcaaccatctcgtggatatccaagaaacggagaacttccagagtttgcaaattattaaatcaggggattttgctgatagaaataacaatatgatggaaagtatgcttcgtttgttcttggcttctggtgtttcagaggcaattgcaaagtcttcttgtgaagaggcttcatccatcatagcttccagtcgcgttgcttatatgcatttctgggaacttgtggcatcatttgtcatttatgcttcaccacagactagaagatgtgcactggagtcgatggaactgtgggggctcgcgaagggctcagtcagtgggctatattcaattttgttctcttcacagccaatctctcatctgcagtttgctgcttattctctacttctttctgaacccctctgtcaattttcactaataaaggagtgttctctgggatcaaatagaccactgactcaggaatcttgcatgggacaaagtattgagttgatgccagattcagagaagacactagatctgagagaagaactctcatcgttaattgagatgcctacttctgaacttctccagacagatctgttagcccatgatagggttgatgccttcattgcctggtcattgttgttgtcccacctgcaattactaccaccagcttccattactagggaaaggcatattcctttaaggactggtgcaccttgtggaaagaaaaaagatgctgaactcatgcctgaagcagaagttgctgcgcaagcttctaagaatgccataattacatgttcactgctcccatgcattgaatccctttggccagttgggacatggcaaatggcctcacttgcagggggactgtatgggatgatgattaggctgttgccttcctatgtgcgtacatggtttactagtttaagagatcgttcattgtcatcctcaatcgagtccttcactagagcatggtgcagtcctcctcttctacttgatgaattttctcaggtcaaggactctctgtatgctgatgataatttctcagttagtgttaaccgctcggcgtacgaaattgttgctacatacaagaaggaggagacaggaattgatcttgtcatacgcctcccgagctgttaccctctgcgccatgtggatgttgaatgtaccagaagtttgggcatcagtgaagtgaagtgcagaaaatggttgctttctctcacggcattcgtacgcaaccagaacggcgcaatagcagaggcgatccacacttggaaaagcaattttgacaaggagtttgagggggtggaggaatgcccaatctgttacagcattctgcacacgagcaaccacagccttccccggctggcttgcaagacgtgcaggcataagtttcatggtgcttgcctctacaagtggttctcaacatccaacaaatcaacgtgtcccttgtgccaaactcctttctag

SEQ ID NO: 13546 - DNA, 771 bp, Oryza sativa
  Clone ID: TFbOSC400601j.C1.o18.fg
atgacgatgcgccgcaccggcggcgtcgggtgcaggaacgccaagggagccgacgccgacgccacagcggccggcgaggagtgtggcgaagttgggggcgaggcccatgaggacggagcccgcgaggaagatgcagctgttagctttggaattggaagtttgggacctgtcgccatgtcagatcggggaacgagctcgagcgtctccggtgacacggacgcggactccgtgcccaccgccgacgccgccgccccgctctgggcgccgcacggccgcgcgctcacgggctgcctcgtcgtcgtcaacgtcgcgctcgtcctcctcgtctacctctacttctggagggtgttctcgcgcaagcgcgccgccgctgcagcctccgcgcgcagcgacgacgacgacgacgacgacgaggcgtcgtcctccgcctcggctccgcccccggccgcggcggccgtctctgtgaggacccgggacgacgtgctggcgtcgctgcccgtgttcgtcgtgcgctcgtccggcggggagaaggcggaggcggaggcggagtgcgcggtgtgcatcgcggagctgagggacggcgacgagtgccgcgcgctgccgcggtgcgggcaccggttccacgcgtcgtgcgtcgacgggtggctgcggctgcacaccacctgcccgctctgccgtgccagcgtcgtcgccctcgccgccgccccggagcgcaaaggtggcgtggcggacacgacggcggccgcggaggatgtggatgcgcgtgtctag

SEQ ID NO: 13547 - DNA, 801 bp, Oryza sativa
  Clone ID: TFbOSC408540j.C1.o1.fg
atgagggggaggcggcggcggggggtggggaggaggtcacgacgagaaggagcggtggtcgcgtcgctgacggtgttcaccatggcgtcggcgctggcggcgctgcccaagagctcccccgactgcgccgtctgcctctcgccgttcgcgcccgaggccgagctgcggctgctcccggcgtgccgccacgcgttccacgcctcctgcgtcgacgcctggctccgcaccaccccgtcctgcccgctctgccgcgccaccgtctcgctcccgcacccgccactcctcaccgccgccgccgccgccgtctccaacgcggtgcaacaggatcccctctactcgcggagcagcaacaactcgaggagcttccgcgtcgagatcagcagcatcagcaaccgccgctcctccgccgcggccgacgaccggcgcacctactcgctcgggtccttcgactaccgcgtggacgaggaggtggaggccgtcgtgtcccgcatcgcgcgccccgcggcggccaagtcaacgaccggttccgtgacgccggcccccggcgaggcgctggcggaggcggcggggtcgcggggatggctgcgcgagtacgtggaccgcctcgcctcctccgcctcgtccctctccggccggtggagcgggcggtggagcgcgcggtggagccagagccaccacagcaaccggcaggaggactcgtggcggtgggacccggaggcggcggtgatgtcggcgccgcgcggggtggacgacgacgagccgggcttcgtcacgctgtaccgttggatcgtaggcgtatag

SEQ ID NO: 13548 - DNA, 1122 bp, Oryza sativa
  Clone ID: TFbOSC408596j.C1.o11.fg
atggcctccctgccgccgcccgcgccgccggccatcggcggcgacccgctcgccgccaccattccgccctcattgccgtcgccggcgccgtcgtcgtcttcgctcaacctctccccgtcgcttctcatcatcaccgcgctcctcgccttcgtcttcttcgcctccgtgtcgatccacttcctcctccgctgcctcgcgcggccgtcgcacccggctccgagcccgctgcccagggcgtcggcggcggcccaacgcgcgacgacggcgtccgccgtcgaggctggggaggctaccgccgcgtcggcggtggggaggagccatgagggggaggcggcggcggggggtggggaggaggtcgacgacgagaaggagcggctgatcgcgtcgctgccgctgttcaccatggcgtcggcgctggcggcgctgcccaagagctcccccgactgcgccgtctgcctctcgccgttcgcgcccgaggccgagctgcggctgctcccggcgtgccgccacgcgttccacgcctcctgcgtcgacgcctggctccgcaccaccccgtcctgcccgctctgccgcgccaccgtctcgctcccgcacccgccactccccaccgccgccgccgccgccgcctccaacgcggcgcaacaggatcccctcgactcgcggagcagcaacaactcgaggagcttccgcgtcgagatcggcagcatcagcaaccgccgctcctccgccgcggccgacgaccggcgcacctactcgctcggctccttcgactaccgcgtggacgaggaggtggaggccgtcgtgtcccgcatcgcgcgccccgcggcggccaagtcaacgaccggttccgtgacgccggcccccggcgaggcgctggcggaggcggcggggtcgcggggatggctgcgcgagtacgtggaccgcctcgcctcctccgcctcgtccctctccggccggtggagcgggcggtggagcgcgcggtggagccagagccaccacagcaaccggcaggaggactcgtggcggtgggacccggaggcggcggtgatgtcggcgccgcgcggggtggacgacgacgagccgggcttcgtcacgctgtaccgttggatcgtaggcgtatag

SEQ ID NO: 13549 - DNA, 336 bp, Oryza sativa
  Clone ID: TFbOSC402928j.C1.o3.gm
atggcgaccacaggacgattgctgctgccccacgacatcaacggtcgcttcggctccgtcccggcgtgcagcgaggccatcgccgccttggaggagacgtcggccggcgaggcgaaggagaaggactgctccgtgtgcctggaggccttcgaggaggagagcgacaagctgatgaggaagatgccgtgctgccatgccttccatgagagctgcatcttcgagtggctgcaggtcagccgcctctgcccgctctgccgcttcgcgctgcccacccaggcggaggcggaggcgggactgtggccattgctcacgcctggttctggttcggggacatga

SEQ ID NO: 13550 - DNA, 2154 bp, Oryza sativa
  Clone ID: TFbOSC34790j.C1.o7.fg
atggcgtttgggagagagaaggggatacaaggcaacacgatgagagaaagccgggcaatagaagggcctcatgttctcagacagaccttgtcaaatggttgcaactgttccacaaaacttttcatggcagtgaaggaagctgggggtccaaatgctaaagctggttgttccattgttgtccttgagaagcaatcatggcgaaaggaagaaaaagaaatggaaacccgcggcgtgagaaagcggcagctgcgccgaaccttccacggcggcggggggcgtttaacacgtggcgccgacgtggacgagtcccacgccgcgcacgaatctcgacgcggcgccaacggccggatctgccttcgtgggggtggacacgtgcgggggatcagcgcgccacgtgtgaagacggggctccgttacgtggaagattctggtagatcaatatcaacaactggttttcttagaagaggctctagtgtctccttaaaagatcaaggcaatgaggagaggccaaacaagacaaaactcaacccaatgaatgccaggtgggctgacagtaaggagaagccaagatatttacgtgagccatttcgttcatcaggcactaaggctgcatgtccaagctcttcaaaagctcccgtcagaaaatatttcgaggaaaaacaaggacggacatttttaggagaggcagataatgcagaaagtagtagcagaagaactgaggccaaccgtctgcagtgtagcaagaaagctgttgttgaggaggatgtgcatccatatggtcagcaggatgagccagaagatttgttgtccacatcaactactgaagatcagcctgcagaacttgatcctgaactattagattcttctgtttcttcaggggtgtctgcacatgcaattggttctgtagtcagaaatgctgctttgagatctaaatcacgtcagcagaagggtaaagaagaattgtgtcagattagacctcaaactgcttctgcttttgttaatcggtccactatacctcgaaattctaccaatggtgtgaaatcatcaaatgctgctggccctggggtacagagacgtactctaaaaaaccttggctgcacatcaatatctgatgttttgccttctggctgttcttcagctaattctattcataataagagggctgaggttatgagaaacagggcatttgacggagagagttcttctagaccaaggggcttaaatggacactctagtttaggccattcacctgccatgtattctggtatcactggtcctagagtcagaactgctgaacaatcagcttctcagcaaacacggactagtagcagaagtattcaggagtctgcagattcttcaaggattaggcgaccttctactcagcatgccagagtaagggtgccaaatgaaagggaggatagcgtgtttgctcttcgtgaaactcttgcaagggatcgccaaccagaatgggctcatttctccttgggtgaagctgccccacggagatcgatgaggcctttttctatggaattaccacatgagatatactcatctagtcgtcaaggctcaagtaatcagacagcaaggagcagatcaagttaccgccctgacgaaagccctccacaaatgtttcatggtttgctggtggagagagagaactacaggcgtataaacatggaaggcatcgctgaggtgttgctagcattggacaggattgaacaagatgatgaattgacttatgagcaattgctggtgctagaaactaacttgtttcttagcggccttggcctgcatgaccagcacagagatatgagaatggatattgacaacatgtcttatgaggaactattagcactagaggagcgaatcggttctgtcagcactgccctatctgatgagcagcttgtgaagtgtctcaagcgaaatgtgtataagttaccaaattcagatcttgaagcgaacagagctgtactagatgacgccaagtgcagcatatgtcaggaggaatacattgagggcgaagaagttggtaggatgcagtgtgagcatcaataccatgtgtcctgcattcatgaatggcttagacagaagaactggtgtccaatatgcaaaacttcagcaataccttcagagatggacaaggggggcacatga

SEQ ID NO: 13551 - DNA, 603 bp, Oryza sativa
  Clone ID: TFbOSC900007j.C1.o17.fg
atgtcgacgccgacggtgcagatggtggcgccggcggcggcggtggtggaggacccgagcaagcactggacgcggcacgggccggtgctgacggcgtgcctcgtcgggatcaacctgctcatggtcctcctcgtgttcttctacttctggcggttcttctccgggaagcgtggcccgccgacgtcgtcaacgtcaacgatggccagcggcggcgacgacgacgaggaggagggggcgtcgtcgtcgtcgtcgtcggccgacacgtcgccagggcgccaccaccaggatcgggaggacatcgcgtcgtccctgcccgtgttcgtgtactcctcctccgccgccgcccccgacgtcggcgacgccggggggaacgggaaggcggcggcggcggcggagtgcgcggtgtgcatcgtggagttccgcgacggcgaccgggcgcgcctcctcccccggtgcggccaccggttccacgccgactgcatcggcgcgtggctccagctccactccacctgcccgctctgccgcgccgccgtgctgctccaccccgccgccgccgagccggccaagaacgatcagcccaaggatgacgactgcccggtgtga

SEQ ID NO: 13552 - DNA, 868 bp, Oryza sativa
  Clone ID: TFbOSC900007j.C1.o23.gp
agcaatacactacgaagtgtatctcgaaattaattaaccacaagattaacaggatcatccgtagtaagctagttagcttgaaaaatcaaaacgggctgcagttacaaactgggtaataaggtgatcttgcggtagtgctcttcactcctttcttacatgcattcaactacgagtaattaacctttattacaaagtacatactaattctatccgatatgcatgcatgcagcagatcgatcgatttctatacacaaaactcttatactatatagcagcacacagctccaatcatatacacacacagatgaggacacacaatataatcacacacaatataagcagctagggtaggtaacaacaaattaaagaacaagctggagagaagaagaaaacaaaaacggccgtacgagtggaagcaaaacctcgcgtcttctcaactcataagtcatcaccgacaccaacctttcttgatttcctccatcttggacagcgatgcacgccgaaagatgcttgtcgcgttctcgatcaccccggccggcgtacgatcgattgcgcgctcgaccctccgtctatagctgtgttctcgtctctcccggcgacggcgacggcgaggcgtcacaccgggcagtcgtcatccttgggctgatcgttcttggccggctcggcggcggcggggtggagcagcacggcggcgcggcagagcgggcaggtggagtggagctggagccacgcgccgatgcagtcggcgtggaaccggtggccgcaccgggggaggaggcgcgcccggtcgccgtcgcggaactccacgatgcacaccgcgcactccgccgccgccgccgccttcccgttccccccggcgtcgccgacg

SEQ ID NO: 13553 - DNA, 657 bp, Oryza sativa
  Clone ID: TFbOSC422132j.C1.o3.fg
atggatccgccggctcgcagattgatggattctcgggcggcgcagttggcggcgccacttcctgatccatactcggcagaaacatttgaagacctactccgagaattgggagtcgaccctagtatccacaccatagtccgtagcgccgggagatggatggatccggcagcggcagcagcacgagttccagtgagattccaccgcacgctccaacgcctaggaatcgaccccaatagcgatgcccggagcatccgcgacatgctacaagagttctatcgagtggtgtaccatggagaggtgtactgggctggccgagtcatcaggcctcgtccttcgtccatgccaacgcccgtgataggacgacgtcgccgcgccgccgacggggatgccccgatgcagccgccgagcaagtacgctcgagtacacgccgtgtcgcgcgatgtcctcctgggcctcgcgctgacgaaggcgtgcgacgcgaggcaggaggagtgcgccgtgtgcctcagcgacttcgaggagaaagacaggctgaggacgatgccgtgtaaccactccttccacgagaactgcctcttccgttggctcagggatagctgcctctgccctctctgccgctacgcgctgcccaagcagcagcaggttcaaagctgctga

SEQ ID NO: 13554 - DNA, 450 bp, Oryza sativa
  Clone ID: TFbOSC900071j.C1.o17.gm
atggcgaccaccggacgattgctgctgccccacgacatgtacaggaggctgcaggctcccacggcagcggccgcggcctcgctctttattttggcgccccacctgcacttccagaggcctaacgctgccgctgccgcaccggaagggtacagcaacggtcgcttcggctccgtcccggcgtgcagcgaggccatcgccgccttggaggagacgtcggccggcgaggcgaaggagaaggactgctccgtgtgcctggaggccttcgaggaggagagcgacaagccgatgaggaagatgccgtgctgccatgccttccatgagaactgcatcttcgagtggctgcaggtcagccgcctctgcccgctctgccgcttcgcgctgcccacccaggcggaggcggaggcgggactgtggccattgcccacgcctggttctggttcggggacatga

SEQ ID NO: 13555 - DNA, 1506 bp, Oryza sativa
  Clone ID: TFbOSC400410j.C1.o4.fg
atgagccactacacaatgcatgcgcacatcaactacaccgccctgccgccgacgtcgccgctgcagctcccgcttccgtacctcccgccgcctcctccgccgccgcagccgccattgctgcagctccagccgccgccgccgccgtcgtcgccggtgtcatttgacacggcgttccagagcaggatcagccctagcatcctgctgataatcttgatcttggctgttattttcttcgtctccgggctcctgcatctgctcgtccggttcatcctccgcccggcgccgcgtgacgccggcgacgccgacagcggcgacgcgaacgtgaccgccttccaggggcagctccagcagctgttccacctccacgacgccggcgtggaccagtccttcatcgacacgctgccggtgttcctctacggcgccgtcgtcggcgccggcaggaaggacccgttcgactgcgcggtctgcctctgcgagttcgccgacgacgaccgcctccggctcctccccaagtgcagccacgccttccacgtcgactgcatcgacacgtggctgctgtcgcactccacctgcccgctctgccgccgcagcctcctcgccgacttctccccctacggcggtggctgcagcccgctgctgttcgtgctcgagtccggctcggagggctccatctccgatcgcctcgacgcggcgtcgtcggctcatctcagcctcgtcatggagcaggaggaagaagcagagccggaacagaagcatgcagaggcggcggagaaggcggacgaggtggtcgtctccgtcaagcttggcaagtttcggagtcaggccaccgaagtcgccgccggcggcggctgcggcggcagcagcagcgccaaccccgagcaggacgtgcggcgttgctactccatggggacgtacgagtacgtcatggacgagaggtctctgctccgcgtcgccgtgaagccgccggccaagaagcgccccacgacgcagatgccgggccaccgggtcgccatgtcggagtgcgactgccactccaagcgggagagcttccgcggcctcgacgcgctgcccggcggcaagctcgcgcaggcgcagccgccgaagccgccggccaaggtggggaagaaggagagcttctccttctccaagatatggatgcgcggcgcgccgcggatcaggaaggacggcgcgtcctcccggcgcgcgtcgtcgttccggctctcctccgtgctgcagcgcgcggcgagcgacgtcggggcaacggcggcgccgaagccgctgcgcccggacgtcgtgagccccgtcacggagtcggagtacaacgtgtcggcgtgggacaagagcgagaagagcgcgagcggcagcgtcgcggactgggacctcgagtccgccgccgccacggcggccgtccccggcgcaggcgccggcaacgggctcagctcgagggccgacgaggcgccgtcgttcgcgcggcggacgctgctgtggatccgaggacacctgtga

SEQ ID NO: 13556 - DNA, 1511 bp, Oryza sativa
  Clone ID: TFbOSC401273j.C1.o23.fg
gaatcttagctgattggtgctttggactgcagttaggagctgcaaatgtagtgctgatggggacaaatctgactttgtcgtttgatgatgttgaggcaagttttgctccaggagtgaaaggttcaggttttgaaggcgttgtttatactgctgaacctttggacgcctgcagtccgttaacaagtaaagcagaaaagggtccaccatctccatttgcactgatcataagaggcgggtgcacatttgatgaaaaagtaaaaaatgcacaggatgctggattcaaagctgcaatagtatacgacaatgaaaatagcggggttctgatttcaattcatttagcattgtttagactttgggggcatatggttctgcattatctaactttgaagtttacagtggctggaagctcaggtggtattcacatttatgcggtgttcatctcgaaggcctcaggggaggtgttgaagaaattttcaggccatactgatgtagaggtgtggatactacctgcgtttgagaactcagcctggtcaatcatggcaatttcattcatatctctgcttgccatgtctgcggttctagctacttgtttctttgtgagaagacatcatataaggcgggaccggcctagaattccagaagcccgagaattccatggaatgagcagtcaattagtcaaggcaatgccaagccttatcttcacgaaggtgcaagaggacaactgcacatcatcaatgtgtgccatttgcttggaagactacaatgtcggagaaaaattaagagtgttgccttgccgtcacaagttccatgcagcttgtgtggacctttggctcacaacttggagaactttttgccctgtatgcaaacgtgatgcaagtactggaataccagatcctccagcctcagagactacaccattgctttcttctgcagttcgtttgccttctcagtcatcttcgttccggtcaagcgtggcagcatcgcctccaagaccaataagtcgacgaccttcatcacagtccatatctcggatttatgctgcttctggtacccccaactctcctaaccccataaggtctttcacaaactcaactgccatgagcataagtagaagcaatgtggacttatcaaacatgtcttcccgccctcgcgcctcacacctcgcctccgcacattctttggttggcagtcacttgtctccaccaatcaatataaggtacgcatcgccgcatatgtcccactctggctatgcatcacctagtccacatgttagctcatcctatgtctccaactctgggtatggatcttcaagctactatctcggttcatccagccagcatcggtcatacctaaggcgctgtggggaatcagggcctagcttgtctaccatggcccctcagtcgccgcaacagtcccagttaggtcatagtggggcatacggtcttagtctaagcaggagcatcctcaggccagttgtccggcgatccagcctgagactctgtgctgattaa

SEQ ID NO: 13557 - DNA, 3705 bp, Oryza sativa
  Clone ID: TFbOSC400549j.C1.o7.hg
atggaccaccacccgccgccgccgtcgccgccgcgggactccggcggcagcctcgaggtgcgcctcttctacgtccgcctctcgccgcgggggcccaccccaccgccccgcctcgcgctcgcgctgcgcagcagccgcggcggcgacgaggaggaggccccgacgcccctttccctcccgctccgcctcgatcgccgggacccggcctccggcgaggccacctacgtgtccaccgcgtccgcccgcctccccccaccctccgcggccttcgaggtcgccgaccaccgcggcgccgcgctgctccgcggctctcttcggcggtgccctgatgccaagcccgattcctcccccgcctgggcaatcgactgcatccccgccgcgggggcggaggcggagacctccgcgttcgaggtctacgtcgccggatgctgcgccggcgagcccgccgtcctcacgtgcgctcttcggctagccacccccgaagaacagaaagctgccggcgggttggtccgccgccgatcgccgacttcgaacgctgctggtgatgaagatgtcaatggaagtatacagcatccagaaggttggtactccgacgatgatgacgggcaactcacatggttcaatgctggtgttagagttggtgttgggattggcctgggagtttgtgtgggtgttggcgcgagcggcttcttttcccctcctctcccaaatccaaccacaagaagaggaggaggaggccaccgttcgcatccgccggatgccaccgccgccgacgacgacgacgccgccatgaccggcgccgccgcatggccggtctgcaccatctgctacgaggacctccgcccgctctccgaccagcacctccactgcctccccgcctgcggccacgtcttccacgccctctgtttggagcaatggctggagtactgcccgggcgggaagaagaagctcacctgccccatctgcaagcagccatgcggcgccgcccacccaccgacccgcctcttcttccaatccaccggcgcgtgccccacgcagaccgcctcctcctccccctcgcggcacgagcccaccgatggcggcgccgaccgggatgagctcgccgccgaggtcgcgcggctggagcaaaaggccgcctccctcggcagggtgctcgacgagcagcgcgacgggatccagaagctcaacgccgaggcgagcgctgctgctggccccccgaatttgggtggatcttgtgttgctatgtggagggagaaggcggccgaggcggaggtgatgaaggaatcggtcaggagggagaaagaatgtgttcagcatctgctcaatgcgaaaacagaggaattgtcaaggaagtcatcagaatgtggcaggttgcaggagaagggcctctcattggcgaaggaacttgcagcattgaagctgtcgacagatatgaaccttcaggaggaagagatccttaagttggcatcacttggtaaccatggaaatgctgcgaatgcggttgatgttttgacgagatctcttgctcttcggaacaagagctacaaagaattgatgatccaatgcaatgttctgggaagatcagaatctcgttcccagcagaggtttgagaaggcaaaagaactcattaagaagttaaaggcaagagtacaagaccttgagaaggaacaagaagaaaaagaaaatggtgtgattagggacctgaggtctgcaaagaaatttaaagctgaccagacaaattcaggaaataccacagttaataatggtttctcgggtcttgctgctggatgtggagattatccgatgaagctcgatgaagtggtgcaggatccatgcgacaagcctgggccatcacctgaagctaaaaatgacctgaatataaaagacaaaatggacgacaagcatgcggatgtgattgacttagatgctgatgattctgtcttccaacatgaacacaagaaaggactttctgccaaaccatttgggaacgatgctactagaatggctcctggcactggaccccagcaggttcacaatttcaattctctttcagatgacttccaaataccaattagaaatcttggtggagagggaacaggaaaaagcgtcggcaaatggtgcaagggcgtagctacccctggatctctcaacacaaatgcaaataaaaggaatctgatcgccgtagggccagacggacgtgggggaaaggatagcaagactcaagcactatggcctaaggcacagaaggttggaagcagagcgattgttccctcccttggagaggtggccgtagctctccggcggaaggcggcggagatggcttccacggccgcggcggcgtcgtcgcaggggtgcatctcgtgggcgctgcggcagcgtgggcttggtggtggtggtgcgcgggctgtcccggtgcttccccgccggagattctgcgtctccgcggcggcgggtgcggggttcgacaacgagaatcgcgagtatgtgatcgtgggtggaggcaacgcggccggttacgcggcgaggacgttcgtcgagcacggcatggctgatggccgcctttgcatcgtctccaaggaggcgtatccgccatatgagcgaccagcactgacaaagggctatcttttccctccagacaagaagcctgctcgtctacctggctttcatacctgtgttggatcaggtgggcagaggcagactgctgaatggtacaaggagaacggcatagaggtattgtatgaggatccagttgtagcgtttgatggcaaaacacataccttaaaaacttcatcagggaaaattctgaagtatgggtcacttattatttctactggctgtgaagcttcaaggttacctgctaagattggaggaaatttgcctggagttcactatatacgtgatgttgctgatgcggattctctagtatcttcattgggaaaagcaaagaaaattgttgttattggtgggggctatattggcatggaggtagcagcagcagcttgtggctggaatctcgacacaactattatattcccagaggaccacattatgccaagactctttacaccttcccttgctaagaagtatgaggaactgtatcagcaaaatggtgtcaaattcattaagggagctcttattgataaacttgaagctggctctgatggtagggtgtcatctgcagtacttgaagatggatctgtagttgaagctgatacagttattgttggtataggagcaagaccagttattggcccatttgaagctgttggggtcaacactaaagttggtggaatagaggttgattccttgtttagaactagtatacctggtatctttgctattggagatgtagcagcttttcccctcaagatgtatgatagaatgactcgagttgagcatgtggatcatgctcggaagtctgcacaccactgtgttgaagcactcctaacatcacacacaaagccgtatgactaccttccatatttctattcaagagtttttgagtacgaaggaagttcaaggaaaatttggtggcaattttacggtgataatgttggcgaaacaattgaagtgggaagctttgaaccaaagattgctaccttctggattgactctgatagtcgactgaagggtgttttccttgagagtggtagctcagagacaaagctaagctcaaaagtgcaacctctgtcgaggatgccttag

SEQ ID NO: 13558 - DNA, 920 bp, Oryza sativa
  Clone ID: TFbOSC401172j.C1.o1.gm
atgaacggctttgctccgaccggctaccagcagccgccgccgccgcctgcggccagcgcttcgccgggcggatggatcgcgtcgacggccatcttcatgtccatcttcttctccaccttcctcctcgccatggcggtctccgtctactgctgcctcctgtgcagagaccgcgtccgctcggacgacgacgacaccggcgccgccgccgagcgcgcgcgtggcggcggtaccattgccccgttccccgtcgaggccctccccccggcctacgcttatgtagttggaagctccgaggatggtggcgcgacggcggcgagcgggggcggcgggcgggagtgcgcggtgtgcctgggagcggtgcgggagggggagatggtgcggcggctgccggcgtgcgagcacgtgtaccacgccgactgcatcgaccggtggctcgccgctcaccggacgtgcccgctgtgccggcgtgagcttgacccgggcaagaatccgcctgatcagttgccgcgtgcccatcctccatcgccggcgacaaggagggcagaggtcgacgaggaggtgggtcgccgccatcgagcccggccaccgaaagtcctcgtcactgagccgcccctcctccttgtcactgagccgcgccgctgccgctcgtcttcctcggcaacgagccatccaccggccccacaagacccaccgtctcgcgagtccgccctccgcgtgcctagccggcggatccgccgtctgcaggccttgccgttgtcggttccgccgtcagcacgcctcgttgccaccggatccgccgcctcgcgagtcaccgaagctccgcccgtcgaccaagccaccgcgcgccacgagcttcatcgtcgtagctcccgaggcccggcaggcggccggatggagagatggagaaaggaaggagaatg

SEQ ID NO: 13559 - DNA, 573 bp, Oryza sativa
  Clone ID: TFbOSC406124j.C1.o3.fg
atgaccggcgccggcgtcgagacatgctgcggcggcggcgggcaggcggcggcggcgtcggcgtccggcccgccgccgcgcgggttgatcgttgtgtcggccgtgttcctgtccatcttcctcgccacgttcctcaccctcatgtcgctcgccttctgctgctgccggagatggagggagcgcgacgcggtctccggctacgtcgacggcgagggcgcggtcgtcgtcgtcgctgctggcgaaagcggcggcggcgagccgttccctgtggaggccctccccccggcctacgcttatgtagttggaagctccgacgacggtggcgcgacggcggcgagcggcgtcgggcgggagtgcgcggtgtgcctgggcgcggtgcgggagggggagatggtgcggcggctgccggcgtgcgagcacgtgtaccacgccgactgcatcgaccggtggctcgccgctcaccggacgtgcccgctgtgccggcgagagcttgacccgggcaagctggcggccggagcaccgccggcgcctgcacagcaacaagttgatccaactgatcagttgccggtttaa

SEQ ID NO: 13560 - DNA, 468 bp, Oryza sativa
  Clone ID: TFbOSC900108j.C1.o16.fg
atggacggcgagatggattggatcgcggcgcgcttcgtcctgtcggcgataatgggggtgcacccgctggtggccgtcgacgacgccggggccgatgacgagcacttcccggtggacgacgccgcagccgtccacggccacgcgtcgccgcctcctgtcgcgctgccggcggcggtgctggcgccggaggaggtggccggcgcggtggtgtgcgcggtgtgcacggaggaggttgcggcgcggcaggccgtggtgcggctgccctgcgcgcactggtaccacgccggttgcatcgggccgtggctgcggatcaggaccaactgcccgacctgccgcgccgagctgccgcgggagcccgccgccgccgactggcgtgtcccgcggcgcccggcggtggcggagacagccggcagccgcctgcggcgggaggcgtcgtatacgatgctcgcaggcacgttgcccagctaa

SEQ ID NO: 13561 - DNA, 720 bp, Oryza sativa
  Clone ID: TFbOSC900112j.C1.o15.fg
atgtgctgtcattcccatcccgatctgaccgggctcctcctcctcgtctcctgctctcttcaccgccgcagaccaggtcagcagttgagcaccatggcaagaaagttgagaggtcaggcggccagcagcggcacccaaaattccaatggactctcaaattccagtctcgagctcccctctgaacaccatttcttggcagcgcgcacaggcatgaacggctttgctccgaccggctaccagcagccgccgccgccgcctgcggccagcgcttcgccgggcggatggatcgcgtcgacggccatcttcatgtccatcttcttctccaccttcctcctcgccatggcggtctccgtctactgctgcctcctgtgcagagaccgagtccgctcggaccgcgacgacaccggcgccgtcgccgagcgcgcacgtggcggcggtatcgtcgccccgctccccgtcgaggccctccccccggcctacccttatgtagttggaagctccgaggatggtggcgcgacggcggcgagcggcggcgggcgggagtgcgcggtgtgcctgggcgcggtgcgggagggggagatggtgcggcggctgccggcgtgcgagcacgtgtaccacgccgactgcatcgaccggtggctcgccgcgcaccggacgtgcccgctgtgccggcgagagcttgatccgggcaagaatccgcctgatcagttgccggtttaa

SEQ ID NO: 13562 - DNA, 2103 bp, Oryza sativa
  Clone ID: TFbOSC400934j.C1.o47.np
atggcagagcacttagcttcaatatttggtacagagaaagataaggtcaactgcccattttacttcaagattggggcttgccgtcatggggatcggtgctcttgtcttcataacaggcccaccatatcaccaactgttgtgtttgcgaacatgtatcagcgccctgatatgatcacgcccggggttgatgctcaaggccagccgatagatccccgccagatgcaggagcattttgaggatttctatgaggacatctttgaggaactaagcaagtttggtgagattgagaacctcaacgtctgcgataaccttgcggatcacatgataggcaatgtttatgtccagttcagggaggaagatcaggcagctgcagctcatactgctctccagggccgcttctactctgggcgcccgataattgttgacttttctcctgtgaccgacttccgtgaagcgacctgcaggcagtatgaggagaatagctgcaaccgtgaaagccacaacgaggcaggagccgcagcccaagcccaagcccacgccataggagggagcgacatgatcgtgatgactatcgaggacgtgacgattactctggtggtggtggaaggaggggtggaagcagcagacatgaaaggcatgatgatggaggaaggcgtaggcacggtggtagccctccaaggcgtgcgaggagtccagtcagggagagcagcgaggagcgcagggccaagatcgaacagtggaatcgtgaaagggacgaaaagcaggggtgaccggctttgtccctcgctcgcgcgcgcgtgcgatcgaacggccatgcgacgactgacgaagcgtcttttgccatcattccgtggcgctggtcgagcatgccaccggcggatggcgcgctaccgtcaagccgggacggggacccccgggggggggggggggttccttttaatctgcagcaccggggatgcactttttgatgagaccgaatttacttttggaaaagtcgaaatattcaatactatgcatagttgctttaaatttagtaatgatctgggaaaccaattaaaaacaatatttttcaagaaagaaaataaaggtgggatgcaaggaaaatccaaaagtatgtacaacccctgcatgtcgacaacatctatgaaccaatatgtttctcacactcagagcttcggattgccatcaaaccaagttgttctaggaagcatggatgaagaatcagcacagcatggtaattatgcatttccaactagtcacatcagccagtgctttcaacctactagcaatacatggatttcccagtctgcaaatggtattgctgatggaataccacagtgggaatatgtcaatggaatgaataatgctccaggtatgacagaaacagtgaatggaagcttccgtgaatatcagaatggcccttcaaccttatgtcgagggcctttaccctattttcatcagcatgctggcatgcatgctcataatctgcttgatcatacacaagtgcaagctccttaccaacaatgccacaataatcctgtcttacatggtgtaaatcattctggcaaccggttccatttgggtccaaggattccagttcttttctctaattctgaacgtacttttgggcctccacatcatccactcttggcaaatccagtgaaccacagaaatatacgaatcctgccacctgagcatgctacaataatggatttttcaagattgtatgaagtgtcaaatgttgtagatgagcatagagatatgcggctagatatagacagcatgacatatgaggagcttttagcattagaagagcagattggagatgtaaatactggtctggcaaaaagctacattgtagagaaattgaagactagcttatttgtgccaggatcatcctgcatgtctaataagtcttctgaatcttccatggagaatgatgcttgcataatatgccaggaagagtatcaggttaaagaatgcattggaacccttgactgtggccacaggtaccacgaagattgcataaaacaatggttgatggtaaagaatttatgccccatctgcaagacgacagctttgtcaaccggaagaagaagtgga

SEQ ID NO: 13563 - DNA, 564 bp, Oryza sativa
  Clone ID: TFbOSC415400j.C1.o1.fg
atggtctgtaagaatggtagttacctttgcaacgtgatatcaacaaccactggtcaccctgtgttctacttagcaagtccatgtggaagactggtgctaatgaagcttttgttggttgacttatccttttcttcccagttggcatcatactttgtcataatatgtgttatagtagctgtgttttattgcttcctgaagcaactggcagaattttctgatacagaccatcaaacagttcgggatcaagatgcaaggaacaatgaaacagaaccaattctaccaagaaaaagggtggttttcagctatggagcgacggaagagcagcctgagtcgagcatgtgctcttcagaagatatgtgcagtgagaatgtctgcaagatctgctatgatgctccacggagttgcttcttcataccctgtggccatggttttgcatgttttacatgtgcaaggaggatcgcggaagacaaaaatcaggcatgcccaatttgccgaaggctgatccacagagtaaggaggctggtggagcccttaggttcgtcttgtggtaaagactttcagtag

SEQ ID NO: 13564 - DNA, 780 bp, Oryza sativa
  Clone ID: TFbOSC407922j.C1.o16.np
tactacgcgcacggcgtcatgcaggcggcggcggacaccaaggacctcctcctcgccatccccaagctggagtccgccgaatcatcagccacctccctttcagagttcatttgatgaaccaccggaggtaattccagtggtcagtagcctgaactttcaataccagcatccaatgaatgtcgttcctggcattccacagatgtcacaccggttcactggtccaggggcctcatcatcaagaagccatcagcacccacgcctaaggtccggttttctgttagaacgacaaggtgatggtgtttggggtgttccgttgtcaactaggagcagggaaggaagaagattaattgagagatccggaacgcgcttgaaatgattcacagaggggaaaatgtaagatttgaggtatatctgttcttgctacagtccattttctatggtggagtcgacattcatgacagacacagggatatgcgccttgacatagacaacatgtcttatgaggagctattggcactggaagaaagaataggcaatgttagcactggcctcagtgaggaagaagtgacaaagctcctaaagcaaaggaaattctcatcatggaggttggaagcatctgtggaagaagagccatgctgtatctgccaggaagagtatgttgatggggatgatctcgggacactggactgtggacatgacttccatgttggatgcgtcaggcaatggctggttgtgaagaacacctgtcccatatgcaaaaatactgctctgaagtcttag

SEQ ID NO: 13565 - DNA, 387 bp, Oryza sativa
  Clone ID: TFbOSC900212j.C1.o6.fg
atgctgccggtgtccgccgtctcctccggcgccggcgccggcggcggcaaggcggcgctcggggagctggacatctcggcgctgccggtgttcgtgcacgtcgccggctgcgaggcggcggcggcggtggagtgcgcggtgtgcctgggggaggtgagggacggggagaggggccgcctcctgccacggtgcggccaccggttccacgtcgagtgcatcgaccggtggttccgggcgaactcgacgtgcccgttctgccgcgccgccgtcgtcgccggcgagccgggcggcgcggcggcggcggcgggggacaagggcgacgcggtggcggtggcggtggtgggtgtcccggatgttgtggtgcatgtgcaagtggaagaaggctga

SEQ ID NO: 13566 - DNA, 2544 bp, Oryza sativa
  Clone ID: TFbOSC400256j.C1.o9.fg
atggcggcgggcaccgcatcgccaccgccggacgcggagcctcccgagtgcccggtgtgcctctcccccttcgacgccgcctccgccgcgccgcgggtcctcccgtgcggccactccctctgcggcccctgcatcgcctccctcccgccggcctccgcctccgcctccgcctccgccgcctcgctccgctgccctctctgctcccagtgcgtccctttctcccgcgctctcgggccctcctccctccccaaaaacctcgccctcatctccctcctcccctcgcccccaaacccctctcgttctcgcaccgccgccgcggcgccgccgcctcctcatgtcccgctccacgcggaccactcgcgtctcctctcccgcttccgccacgccgtcctcccggagtccgcttcgccgctccactcgcccgctcccgccgcgggcctcgccatcgggtccttcgcttccgacctcggcgccccgtggttctgcccgcgtggccaccccgtaagcctcctcccgatcgaaacccccgccgccgccgccaagcaggagtccccgttgtactaccggcccagccacgcggcgcgggtggccgccgcgatcgatgcgctgagcgccgcggcgagggatgaagtgatcgatttggtggccgtctcgtcgcggttggcgcggcgggtttgcagggtttacggcttctggatgggccccgaggcggctccgctgtggctgctctccgagcggcattcccgcggagtctcctgcttgttggaggagaggagccgacgagaggagacggtggctctgatcagaaatgtcggaatggaggtctgtgaagcgttcatgggattgcacggagaggggctggtactggggtgcatagggctaggatgcttctgcctcgatcgctttggacactgcctgctcgacctgaatcaggttttggccttgtgccacggggttcgggtaggggtttgctcatccaagtctaaggccttcatggctcctgaggtggcagaggtggtgcatgacaagttgcagataaaggatcatgatttcagtggcttgttagggcctagttcagatgcttggttgcttggttgtttattggtggcacttgtaactggggatgagcagcttgcagcaggatggagtactgaggggtcatacgatgattggaagaatgaagtgcttacgaaggttgatgcttcattggttggcacacatatggaaccatggtctgcaaccatagtgtcatgtttgaactatgatccagaaggccgtccagaaattgctgatgtctggaaatgtattaacggctcattgatgaattccgacattgaagctttgattcctaatgttgatcttgcagctcgaaagagttttatgtgtttgctccttggggagttgtcctcaatgtgctctaaccttggtgctgttgagtcagatgatacaatgcatctttctcaggatttggatgacaaacattcaactccagatgatgcaagcagtggtggtattataaacaacgaagaagttggtgcagctggaatggatgggccaaaatgtggactgtacaattcttcaactctgcttgctcaccgtgactgtattacgggattagccattggagtggatatttttaatgttatgcacttaacaagaactgccactcaaggacttcccaataatagatcttcattgactgcaggaggctttttgtttagctcttcttacgacaagacaatcaatgtatggtcactgcaggacttctctcataaacaaagtttgaagggccatgaacacaaaatcacagcaattgttgttgttgacaatgataatcagtcactttgtataagtggagacagtggtagtggaatatttgtctggtgtgttgatccttcactcagtaatgaaccattgaataagtggtatgaaagtaatgattggatttatcgaggtgttcactgtttggctgtttctggaactggttatctttacactggtagtagagacaaatctattaaggcttggtctctagaggattattcactacgctgcacaatgacaggtcacaaatcaactgtttcttgccttgcggttgcctgtggtattctttacagtggaagttgggatggttctattagatcatggtggctcactgatcacagcccgctgtctgtactggaagatggtacaccaggaagcattactcctgtgctgtcaatttcaacagaactcgattttgttgttgcatcatatgaaaatggctgtttgaagatctggaaggatgatgtcctagtaaagtcagagaaacttcaaaacggtgctatatatgctgctaaattgaatgacaagtggctctatgctggtggatgggataaagttgtaaatattcaggagttattggaagatgattcagaggtggaaatcagagatgttgctacctttacttgtgattcaattataacttcaatactgtactgggatggaaggctgatagttggactttctaacagggagattaaggttttctacaaggcatcttaa

SEQ ID NO: 13567 - DNA, 816 bp, Oryza sativa
  Clone ID: TFbOSC400608j.C1.o11.fg
atggcgtcctcgtctctcctcgtccggctcgcctccgacgagatgccccaaaccctagatgcgtcgtcgtcgtcttcgtgctacgacgccttcgtgccggtgttccacccggatccgtcgtcggggttctcggcggcgtcggtggtggcggccgccgaccgcctccgcagccagttcctctccgtggagcccgacctcttccacgacgcgctcgtcgcgccaagccccgaccacctcggcttccccgatgaggaggaggaggaggagatccggtgggattgcctccaattggatgacgacgacgaggaggaggagggggtggcggatctgcggcttgaggcctccaacgcggcggaggaattcgattgggaggaggtggcatcgccctccggcggcgccgggatggatcagccggagcccgagtgggaggtcctcgccgacgtgccgccgccgccgccgccgcccgccgacgagggcttcgtgtacacctccgaccgtgacgtgtacgaggtgctcgtcggggagggtttgttcctgaagagcaagccgcccgcggcgaggtcggccgtcgaggcgctaccgtccgccgtcgtcgccgccggcgaggacggcgaaggggaggagtgcgcggtgtgcagggacggcgtcgccgccggggagcgcgtgaagaggctgccctgctcgcacggttaccacgaggagtgcatcatgccgtggctcgacgtgcgcaactcgtgcccgctctgccgcttcgagctgcccaccgacgacccccagtacgagagctggaaggcctcgcgagctgcggctgcctga

SEQ ID NO: 13568 - DNA, 495 bp, Oryza sativa
  Clone ID: TFbOSC5328j.C1.o2.fg
atggaccccgacgcggcgcttcgcgtggagctcgtcggggtggtggccgtgggggcggtcgtcgtcgtgctcgccgccggcgcgttccccggcggccggtggaggaagagggcagcggcgcgggtggacgacgtggagcgcgcgctcggggccgccacgctcatgacgtacgagcaggcggcggcggcggcggccaagaaggcgtcgtcgtcgtcgcgggcggcggcggcggctgaggagcaaggggaggacaggtgcgcgtactgccagtcggagtacgccggcgccgacgaggtgcgggtggtgcagtgcggccacttcttccacgcgggatgcatcgaccgctggctccgcaagcaccggcggtgcccgctgtgccgcggcgggctgtcgccgttgccgccgcttcccaagcctggctgccgcccaatgccgccgcggacgagccgccccgccgcttcctccgccaccgccaccgcctccgccgccggttaa

SEQ ID NO: 13569 - DNA, 408 bp, Oryza sativa
  Clone ID: TFbOSC8949j.C1.o12.gm
ctgtcatccgacgacgaggaggagatcaaccaccaccccacgcacgccacatctccacccaccaacgcggctgcctcctcctccgcctacaggcgcgctggattggacaatattccccgcctcgactcctcgagccatccagggcctgatttcgtggcggtggacaagctcaggatgatgccctgctgccacaccttccaccagcgctgcatcttcgactggctccggctggcggctgcgatgcatctgctctctctgccgccgccccctctgcccacacagcacaacaggaggatgataagattgggtgcccggagccaggggcggagccagggtcggaatttcttcagccttcagaagtggcttccactgcaacaacagacaaatcacgcgcaggggaattgctaa

SEQ ID NO: 13570 - DNA, 726 bp, Oryza sativa
  Clone ID: TFbOSC419098j.C1.o9.fg
atgggttcagctctttcgggcagcggcagcgggagcttgttggtcctctccgtctccgtcgtcggcatccttttcacctccatcctcctccttgcctactacctcttcctcgcctgctcatggcgccgccgttcccaccaaactgcacgacccacgccgcctcttccttctttcttcttagccgccgatcaaccccgccgcggcctcggcctggaggaggcggccatccgccgcataccaacgctccgctaccagcagcagcagcagcacaacaagcagcagcagtgcggcgtgtgcctgggcgagttccgcgagggggagaggctcaggcggctgcccccctgcctccactccttccacatcgactgcatcgacgcctggctcgccaccgccctcacctgcccgctctgcagggcccatgtcaccgtcgacaccaaccacattgctgctgctaccaccagcacgcggcacgacgacgaccagttgctctccggcgtgcaccagccgatgaggaggtcgttctccctcgactcctgccacctctacctcgccatcattttgcacccgcaccaactctccgactccgacacccgcagccgcagccgcagggaaccaaagcccgccgtcttagagtcagagaggcctagtaggacgctgcgcagatccttcttctccttcagccacactaccacctccccagtcccaactccaatcctccctatctga

SEQ ID NO: 13571 - DNA, 609 bp, Oryza sativa
  Clone ID: TFbOSC401894j.C1.o13.fg
atgctggggtcgggcctgaatctcgtcagcgcggcgctcggcttcggcatgaccgccgcctttgtcgcgttcgtctgcgcgcggttcgtctgctgccgcgcccgccgcgcggacgctagcgcgtcacggccacacccctcgccggtggacttcgacgcggacttcccctcggatttcgatcgcccgatagagcattcccgcagtgggttggaaccattggctgttgctgcaattcctacaatgaagtataactgtgaagctttccattcggaagatgacacccagtgctccatatgtttaagtgaatacaaggagaaggacattctaagaattgtacctatttgtcatcataactttcacctttactgcttagatgcatggttgctgaagcagactacttgcccaatatgccggatctcattgaaagaactgcctgatggaaaatcgaccgtatcctctgctcctaccatgtctcaaccccccaccctccctgagagttctgttaatccaacatctcatttcctcccagttcatcaagaacacagaagccaccaggatggcccagatatgccagaatctgtagaggtggttattgaaatccgacagtga

SEQ ID NO: 13572 - DNA, 348 bp, Oryza sativa
  Clone ID: TFbOSC402429j.C1.o6.fg
atgagctacctcctctcctacatctccaagatgctgtgcatcaagattccgtcggaggcgaggcaagccagcgaggacggcggcagcggtggcctgacggagtgctccgtctgtctctccaggatccgtgtcggcgaggcgacgaggcgtctgccctgccggcatgcgttccaccgggactgcgtcgaccggtggctcctctcatgcaggcggacgtgcccgctttgccgggtttacgtcgtcgtcgacggtaacaagccaggggtggcagcgaagcacaccggcgagccgccgctcgctgaagacatggtgatctggttctctgccatgctcgtccctggattctga

SEQ ID NO: 13573 - DNA, 537 bp, Oryza sativa
  Clone ID: TFbOSC421349j.C1.o1.fg
atgtctgcttcttctcctgttgcctacgacgccaatgtcctcctggccgcggtcaccgcgctctcggcggccatcgcgttcgtcgccgcgctccacctctacgcccggtgtctcctgcggcggcgcgtcgccggcgccggcgccggcgccgccggcaaccctcacgcgctgcgccgcccggtgaccccgggcggcaactacgagctcgaggtgatcagcgtcgcggcgtgcgcgctggagggcggcggcctggacgccaagcagctgggcgcgctgccggtgttcacgtgggggtcttcttctccggcgacggcggcggcggacgccgccgtgcagtgcgcggtgtgcctcggggagatggaggacggcgagctggggaggctgctcccggcgtgccgccacgtgttccacgccgagtgcatcgacacgtggctcgccgtgagctcgacgtgcccggtgtgcagggcggcggtgggggcggcggaggatgatgagccagcggcggctccggtcgctggcgtgtcgccggcgagctag

SEQ ID NO: 13574 - DNA, 1425 bp, Oryza sativa
  Clone ID: TFbOSC401970j.C1.o9.gm
atggacatgttgaaggagataaatatcatggttgaagataacaaaaatgaagatggtgtaagaagctacaagattgaggacccctttgaatggcggaaccggatgagagaaatagactcaaaagaaaaattccaacaggttagagctcttgctaagttcctccaagatctatatgcaatgagccattccataggaatttcatgtggccatgagacttcgagtactcaagaaggcttccctgaggctttgggccgggacttggagactccgggcctatgcaagccaggcttccaagaggctctggaaataacatccatgcacccgagaagggactcgtcggcgtacaccacccgacccccgccgccgccgccgacggcagatggcggtggtaatggagggaggattagccccgcggtgttgttcatcatagtgattcttgcggtcatcttcttcatctccggccttctccacctcctggtgaggctgctgatgaagaagcagcaccgccgtggtggagccgagaatgccgccccgtcgccgcacagccggcatgtcgggcgggacgccgcgatggaccggcagctccagcagctgttccacttgcacgattctgggctcgaccaggcgttcatcgacgcgctgccggtgtttgcctaccgcgacattgttggtggtgacaaggagccgtttgattgtgcagtgtgcttgtgtgagttcgacggtgaggacaggctcaggttgttgccggtgtgtggtcatgccttccatctgcattgtatagatacatggctgctgtccaattcgacgtgcccgctttgccgtggtacgctctatgtccccggattgaccatagagagcctgatgtttgattttgatgagaggttggaggagggccggctgtcggaagaatgcgaggatggattccaatcttccagacagaagaagcccatggatgaggaacaaacagtaactgagaagagagtttttcctgtaaggcttgggaagttcaagaatgtcgggaacactggtgtgggtggtgttgacaatggcaatgcagctggtatagtgagtagggaaccaggggagagtagcagtagcagcttggatacgaggaggtgcttctccatgggcacttaccaatatgttcttggggcttctgaacttcgagtggctctccagccaggtcgtaacaaaaatggcgtgggcagcaggttgaagggaagagctactggcataagctctgtcaatgctgaaattatggagggcaagaggatttgtgcaaagagtaaaggtgagagcttctccatgtcgaagatttggcagtggtctaatgtgaagggcaagctgccagctgtgctggttgttgaatttcttaactatagctattcttttggtctaatttcacatgtgtatgtttttcactag

SEQ ID NO: 13575 - DNA, 633 bp, Oryza sativa
  Clone ID: TFbOSC24818j.C1.o1.gp
tgaacttgtaaccctgaaagtgaaactactcgtatgatcgttattgctctcgccaataaacaaactcgaatcatcctactaagctacgtttgtccacagctagcaaaattgagctaaacacctactaagtaccctattacagctgatgagtactcgtagcaaaatcaaatcgcaggaagcacgcgggactcgccggcgacggacaggaagccaatgtcgccgccgccgccgccgtgcctctcgacgctctcgccgtcgccgcagtaatcctccttggcgtcgtcgtccgggccctcgacgcgcgcgacgacgggtgcgcggcagacggggcaggtgggcgcgcgcgtgagcagccaccggtcgacgcactccctgtggaacccatgcccgcacgccggcagcacgcgcacctcgtccccggcggcgtactccgccaggcacaccgcgcagtcgccgctgccgccctcctcgtcggcgccgccgccgccgccgtcgcggggcggcatctggaccacgtgcaccgggatcccgtcgagcgcgcgcttggtctcctcggacggctcggggcgcaccgacgacgacccgccgtcttctcgccgtcgccgcccgccgccgtcgcagaagcaggcgtag

SEQ ID NO: 13576 - DNA, 567 bp, Oryza sativa
  Clone ID: TFbOSC900356j.C1.o14.fg
atggaccgcgcgcagcgggcgcacatggtgcgggcgctgggggtgaccaccacggtgctcttcgtcgccagcgtctcctacatcgcgctcaccgcgctctacgcctgcttctgcgacggcggcgggcggcgacggcgagaagacggcgggtcgtcgtcggtgcgccccgagccgtccgaggagaccaagcgcgcgctcgacgggatcccggtgcacgtggtccagatgccgccccgcgacggcggcggcggcggcgccgacgaggagggcggcagcggcgactgcgcggtgtgcctggcggagtacgccgccggggacgaggtgcgcgtgctgccggcgtgcgggcatgggttccacagggagtgcgtcgaccggtggctgctcacgcgcgcgcccacctgccccgtctgccgcgcacccgtcgtcgcgcgcgtcgagggcccggacgacgacgccaaggaggattactgcggcgacggcgagagcgtcgagaggcacggcggcggcggcggcgacattggcttcctgtccgtcgccggcgagtcccgcgtgcttcctgcgatttga

SEQ ID NO: 13577 - DNA, 984 bp, Oryza sativa
  Clone ID: TFbOSC401948j.C1.o36.fg
atggccggcgaccgccgcggcggcggcggcgtcgtctcggccgacggggagcgacggcgggggatccggcgcctgctgctgccccgcggcgaggggtcgtcgtcgtcctcgccgccgcagccgccgccgctgcaggcggaggaggggaggcggaaggggttcgcgtcggcggcgctgcgcgggctgggttgcacgtcggccgcggcctcgcaggcgtacgcgcccggggccggggcggccgcggcggcggccgtgcggtcgtcggcggactggcacgggcggaggcggaggagggggaaggagaagaggaaggagaggggaggaggaggagggggcggtggaggcggccacctcgtgggtggagggatcggcgccgacgtgtggtgcgcgcctgggataccgttcgccgcggaggcgtcgtccgtggactgcgtggtggcgcggcaccagatggtggggagaggccgtggcggcgacgcggagaggccgcacagagagagaccgtgcctgtccaggagggtgaccgtgcaggagcagatatcgtcgtcgttcatggactcgccgccgccgccgcacctcgacgtcgcgcccttcttcggcgccgacctcctcccctccggccgcctccgccggatgcgcgggtaccgccactcccccgtcggcctcgaggaagagatcatgatgtttcagacaagagttctgttgggaggaatgagcatgtatgatcggtaccaggattggcgccttgatgttgataacatgacatacgaggagttgcttgagcttggagataaaataggttatgtcaacactggattgcgtgaggatgagatagttcgcaaccttaggaaggaagagtttgaagccaatgaagagatggggaggctggattgcggccacagctaccatgtttactgcattaagcaatggctttctcagaagaacgtttgcccagtttgcaagactgccgttaccaagacttga

SEQ ID NO: 13578 - DNA, 594 bp, Oryza sativa
  Clone ID: TFbOSC412775j.C1.o23.fg
atgctcgcctccgccgccgagttcacggacaacccggcggcgacagccacggtggcggcgcgacacggcgtcgacggcggcggcagcagggtggtcgtgccgctgttcctggtcaccgtgtccctgttcttcgtcacgtaccagctcttcggcgtggccgcggcggccggcgccatggtgctcgacgtctgcgccgtcgccctcgccgcgctcaatgtcacggtcacccgcgcgcgccgcttccccttcctgcgcctgtcgctcggcggggaggaaggccatggtggtggtggtggcgccggcggtggtgacgtggcgccggcggcggccgggatggacgcggcggcgatcatggcgctcccggcggccttcgggtacaagcgggagcagacggcggcggcggcggggggatgggcgcagtgctcgatatgcctcggcctggcgcgcgtcggcgaggccgtgcggcggctgccgtcgtgcgggcacctgttccacgccggctgcgtcgacgagtggctgcgcgcgcacgcgacgtgcccgctgtgccgcgccgccgtgtgcgccgccgggccggagccggagctgcccgtgtga

SEQ ID NO: 13579 - DNA, 858 bp, Oryza sativa
  Clone ID: TFbOSC401064j.C1.o6.gm
atgtcctcctcatcctcttcgctgctctcctcgctcgccacgctcggcctcgggtactcgatcgccatcgcgctgggattcctcgtcctgctcgcgtcgctcctcctcgcgtcatacttctgcttccgccgcgggggcggcggcgggcacttctccggcgtgctcaccccgagctccagctccagccacctctccatcaccgtcccgcgcgtgctcttcgtcgcggaggggtccgagtcccccgacgcctactcctcgggcgtcgcggccgcgtcgtcccccgtggggctcgaccccgcggccatcgcgtcgtacccgaaggtccccttctacagcggcgccggcgcggacgccgacgccatgtgctcgatctgcctcagcgagtacgcggacggggagatgctgcgcgtgatgcccgactgcaggcacaggttccacgtctgctgcctcgacgcctggctgcgccggaacgcgtcgtgccccgtgtgcaggtcctcgcccatccccacgccggtggccacgccgctggcgacgccgctgtcggagctcgtcccgctctcgcagtacgccgccgatcggaggcgcagcagggggttgtgcttaggttatttagagaagttcgggaggtgcaaaaccactactcgggaccacgcattgggggagaaccgtagcctcgtgacgtgcttagggaaaaggagaggtcaaggagaacttgctgtggtgatcgtcgccgccaccgaggtcgcgttgccgctccatgtcgccgatgaggtcgtgtcgccgctccaagtcgccaccgctaagatccgccgctgccagtggcccctcgactgtcgcgagaagggggcgggagggtag

SEQ ID NO: 13580 - DNA, 1713 bp, Oryza sativa
  Clone ID: TFbOSC14624j.C1.o1.fg
atggccatgggtggcatccggtgtcccgtctgcttcgccgccatggccgccggccaagccatcttcaccgccgagtgctcccacaccttccacctccgctgcgtccccggcggcgccgccgcctgccccgtctgcgccacgccatggcgcgacgccccgtcgccgctcacgacctcctccatccccgccgcgtacgacgacgacgacccggtggagccggtggcgacggcggcgcgcaacagcagcggcggcggcggcggcgtgctggtgctcaagacgcactgcgagtacccggcgctctcgcgcggcgccgcgcgcgacggcttcgccgtgctggtgcacgccaaggcgcccgcggcggcggccgaggcggcggggcgcgcgccgctggacctggtcacggtgctcgacgtcagcacgagcatgaccggggacaagctggcgctggtgaagcgcgccatggggttcgtcatcgacagcctcggcgccgccgaccgcctcagcgtcgtcgccttcgccacgccgacgcgcgccgggtgctccgcggctccgcctgacgcgcatgtcggaggacgggaaggcacggccaagcgcgcggtggacgccctcgtcgcgaacgggaacaccaacatccgcgacggcctcgacgtggacgccaaggtgctcgacggccgccgccacaccgacgccgtcgccagcgtcatcctcctctccgacggccaagacaaccagaccatgggttaccgtggccgcttccacatgacggatttcaaggcagcggcgaccagctacgacgtcctcgtgccgccgtctttcacgcgcgccggcggcggcgagcggtgcgcgccggtgcacgcgttcgggttcggcaccgaccacgacgcggcggccatgcacagcatctcggagatcacgggtggcaccttctccttcatcgagaacctcgccgtcatccaggacacgttcgcgcggtgcatcggcgggctcctctccgtcgccgcgcagaatgcgcgcatctccgtcgagtgcctggaccccggcgtgcgcgtccgggcggtcaagtccggccgctacgagagccgcatcgacgcggagggccgcgccgccacggtggacgtcggcgagctctacgccgacgaggagcgccgcttcctgctcctccttgacgtgcctcgagccgacggcgacgccgccgtcgccacgcgcctcgccagcgtgcgctgcacgtaccgggacacggcgacggagcagtcggtggacgtggccggcgaggaagacgccgtggtcctccgccccgccgtcgcgacgggcgtggcgccgtccatggaggttgagcttgagcgcgagcgcgtccgcctcgaggcggcggacgacatcgcgctggcgcgcgcggcggccgagcggggcgcctacggcgaggcggcaaggatcctcgacgcgaggcgggaggcgctgagcaggtcggcgccggcggcgtccggcgacgccatgtgcgcggcgctggtggcggagctgcgggagctgagcgagcgcgtggcggacgagcgggagtacgcgcagacggggcgcgcgtgcgtgctcgccggcatgagctcgcacgggcagcagcgcgcctcgtcggtgcagctaggggagctccgtgtacgggtgttcgtccgtgttcgcgacaccggagatgcagaggatggagaagctctcggtgattttgcgtga

SEQ ID NO: 13581 - DNA, 1716 bp, Oryza sativa
  Clone ID: TFbOSC900244j.C1.o19.fg
atggccatgggtggcatccggtgtcccgtctgcttcgccgccatggccgccggccaagccatcttcaccgccgagtgctcccacaccttccacctccgctgcgtccccggcggcgccgccgcctgccccgtctgcgccacgccatggcgcgacgccccgtcgccgctcacgacctcctccatccccgccgcgtacgacgacgacgacccggtggagccggtggcgacggcggcgcgcaacagcagcggcggcggcggcggcgtgctggtgctcaagacgcactgcgagtacccggcgctctcgcgcggcgccgcgcgcgacggcttcgccgtgctggtgcacgccaaggcgcccgcggcggcggccgaggcggcggggcgcgcgccgctggacctggtcacggtgctcgacgtcagcacgagcatgaccggggacaagctggcgctggtgaagcgcgccatggggttcgtcatcgacagcctcggcgccgccgacccgcctcagcgtcgtcgccttcgccacgccgacgcgcgccgggtgctcccgcggctccgcctgacgcgcatgtcggaggacgggaaggcgacggccaagcgcgcggtggacgccctcgtcgcgaacgggaacaccaacatccgcgacggcctcgacgtggacgccaaggtgctcgacggccgccgccacaccgacgccgtcgccagcgtcatcctcctctccgacggccaagacaaccagaccatgggttaccgtggccgcttccacatgacggatttcaaggcagcggcgaccagctacgacgtcctcgtgccgccgtctttcacgcgcgccggcggcggcgagcggtgcgcgccggtgcacgcgttcgggttcggcaccgaccacgacgcggcggccatgcacagcatctcggagatcacgggtggcaccttctccttcatcgagaacctcgccgtcatccaggacacgttcgcgcggtgcatcggcgggctcctctccgtcgccgcgcagaatgcgcgcatctccgtcgagtgcctggaccccggcgtgcgcgtccgggcggtcaagtccggccgctacgagagccgcatcgacgcggagggccgcgccgccacggtggacgtcggcgagctctacgccgacgaggagcgccgcttcctgctcctccttgacgtgcctcgagccgacggcgacgccgccgtcgccacgcgcctcgccagcgtgcgctgcacgtaccgggacacggcgacggagcagtcggtggacgtggccggcgaggaagacgccgtggtcctccgccccgccgtcgcgacgggcgtggcgccgtccatggaggttgagcttgagcgcgagcgcgtccgcctcgaggcggcggacgacatcgcgctggcgcgcgcggcggccgagcggggcgcctacggcgaggcggcaaggatcctcgacgcgaggcgggaggcgctgagcaggtcggcgccggcggcgtccggcgacgccatgtgcgcggcgctggtggcggagctgcgggagctgagcgagcgcgtggcggacgagcgggagtacgcgcagacggggcgcgcgtgcgtgctcgccggcatgagctcgcacgggcagcagcgcgcctcgtcggtgcagctaggggagctccgtgtacgggtgttcgtccgtgttcgcgacaccggagatgcagaggatggagaagctctcggtgattttgcgtga

SEQ ID NO: 13582 - DNA, 1269 bp, Oryza sativa
  Clone ID: TFbOSC400993j.C1.o79.np
atggcaaaatgtcaattttctcccatcccgcgagcgattgcggcttcgtcgctcgtcctgccgcttccgccgcatcctggtgagcacatcctccgccaccgctgcctgctccgatccccattcatcgcgcgagcgagtacggcttcgtcgctcgtcctgccgcttccgccgcatcctggtgagcacatcctccgccaccgccgcctgctccgatccccatccatcgcgcgagcgagcgagggtcgccgtcgctcatcctgctgcttccgccgcatcgacaagatgccaaatagagccacgcattggtgttatgcctgccgacgtccaattcgtgttagtggacaagatattacatgccccaactgcaatgatggttttatacaagaaatcagtgagataggtggttcattgaacacttatggtatctttgacccgagctttgatgagcgtcgagatagaagttttggaatggtggaggctatgtctgaccttatgcgacaacggatggcagaaatgggcagaaatcgtgtgttggatttccatggtacgagaggggcaagttcccatcaaggaaggcagccaactgttagaccaatgctcatatttggcagcaatgcacctgatcgtgtaagcagcagtagtgaagaagcagatatactcctcaggcaaggccgcagaattggcgcggaccgtccaaatttcagtcgtttcctagtcggtcccagtcttgaagctctattcgaacagctgctcctgcataataaccgtcaaggaccaccaccagctccacagtctgcaattgactccatgcctgtggtaaagataaacctcaggcaccttagagatgatcctcactgtccagtttgcacagacaaatttgaggttggaacagaggcacgggagatgccatgcaagcatctgtaccatgctgaatgcatcattccctggctggttcagcacaattcttgtccagtttgccgccatccactgccgtcatcttcccaccgttcaggcagcacccgttcatcgtcaacccactctaacgaagctattagccatggggttgccagatctgatgctgatcctgttcctgttgcaagaagcgacgacagcagaaaccatgaaatgcacggttctttctcgtttctctggccatttgattcacctactcctgattccagttcctacacgcacgaaggaggtgttggtgagcctacagttcatgacgatgctggccagatgacctattctgagtggcattacgactac

SEQ ID NO: 13583 - DNA, 489 bp, Oryza sativa
  Clone ID: TFbOSC416737j.C1.o15.fg
atgagctttccgctggtgtgcttctgccgccagatcccgcggcccatcgtcgcgctgttcaagctgctccaggccgtggcgctggccttcgtgctgatactctgcttcctcggcctctacgagttcccctacaccgtcgaggaccacgcgccgctcatccacggccgccgccgcgatcccctcggcgacgacggcctgcagcccgaggcggtgaagcggggcctcccgctggtcgagtacatgcaactcgccgacctgtcggcggattgccacgacggcgagagcggctacccggccacgtgcagggtgtgcctggagaggttggaggcgacggacgaggtgaggcggctgggcaactgcacccacgccttccacatcggctgcatcgaccggtggatcgacctgggagaggtgacgtgcccgctctgtcggtcccacctgctgccacgtcaacgaaggggcctgcttggcagtaggcggttcggctag

SEQ ID NO: 13584 - DNA, 963 bp, Oryza sativa
  Clone ID: TFbOSC900362j.C1.o8.fg
atgtcggcccccgcggcggtggagcagcggctgcaggcgctgcggcagaagctggggaggaagcagcacttcgaggaggccgtcgccgacctcgccgccgcggtccgggaccaccacgccgccgcctcccccgccctccgcgatctgatgtattctacagtttgccgtgtggcaactgtccttcagactagatatacagcacctggattctggcgtgctggtctgaacctcttcttaggtacagagaagctggtaactaatccttcagaaaaggagcaactgaagactttcattctgagggcccgggagcatcttgatgagaaagagaacgaggaatccatgccaaacaacagggaaacagatacaagatttctttttgaagggcatcttacagtgggacctgaacctccacctcctgcctggcttgttgcccagaatttagcacgagaacttagcattttagctgaaccttctggagatcaaggtgcgaacaacaacggagagtccagggctgaggagatggcacctgctgctgctataatgaatttcttaaacaccatgacagtggatggagacctagaagccgctttggaagaatctctgcagaatgtgatggcgaatcctaaggtgcctccagcttcaaaggaagtcgttgcgaatctaccagttgtaaccgtgacagaagaaatcatagctagattgggcaaagagactcagtgtgctgtttgccgggagagcttgctggtggacgacaagatgcaggagctaccgtgcaagcatcttttccaccctccatgcctcaagccatggctggacgagaacaactcctgcccgatctgccggcacgagctgaggacggacgaccatgtgtacgagagccggaaggagcgggagcgagaagaggaggaagacaggaagggcgccgcgaatgctgtcaggggtggggagttcatgtatgtctga

SEQ ID NO: 13585 - DNA, 993 bp, Oryza sativa
  Clone ID: TFbOSC421892j.C1.o4.np
ggggcgccgtgcagtgcaggaagcggtggagcaacctcgccggggactacaagaagatcaaggagtgggagcgcgcggcggcggcggcggcgccgccgcgggagccgtcgttctgggccatgcggaacgacgcgcggcgggagcgccggctcccggggttcttcgaccgggaggtgtacgacatactcggtgactgctagaaagaatcagtctgtaaatgccaattatctgctgaatttccactatgatccaatttctcggccacagcctagaggccccagaacatatcctacaagaagacagaggaagatcagaccatacaacaaagatttgttcctacaagcaaattttaagtttgttgtgttggatactggaagctatgaaatagaattaatggatccagataagatgctccagtgggaagatattgtatgtgtaagatattatagcccttgtgaggtgcaatgccctatttgcttggagagcccattgtgcccacagattacatcatgtggtcatatatattgctttccatgcattttacgttatttacttatgggaaaagaagattacaaaggtgaaagctggaagaagtgcccactgtgtttcatgatgatctcaacaaaggagttgtatacaatctatattactcaagtccagcattttcatgttggtgacaatgtgacatttacacttttgagccgctcaaaaaattcactcactccttctattaagaacctcactgatgaatctactatagacgaagatccttgcagtgcattctccaagttcattttgacgtctgatgtggaactttctgttagagaggcaaaaacagatcttgttaattggttgcatatggcagatttaggccttgtggatgacttggagaaacttccatacgtttctaccgctttggagcagctagaagaacggatgaaatattggagtgagtataaacttttgacttataaactttgggtctctaaactt

SEQ ID NO: 13586 - DNA, 1566 bp, Oryza sativa
  Clone ID: TFbOSC420404j.C1.o5.fg
atgggatctggaagcagcaaggccggcgcctcgtcggcgtcatcttcgtcgtcggcgtcggcgtcggcgtcggcgtccggcggcgacgaggcgagtaaggggaatgggaaggggcagcggagggggagggggagggggagaggcctgctgcagcggctgccgagctcctcctcctcctgcttccgcggccacggcacgccgtcgcgcgacgacgcttcctcggcgtcttcgccaccgccaccgccacggccgccgcggcggccgttcgagtctagcaagggagaggagaatggaagcctgccttcaatcgctcaaatggacaaatcagaagaggatgctcccacaatccctaaatctcatccaggtgaaggggcaacattgccttcatcacatataaacagggatcaggatgttgatgtattgcagaatgccactgccgtcaacaacagggtggaggtcaaccagtcaccaaatcattctgacagttcacggccacgttttggtgtcaacttcgggttgagtagagctgtcagcttgggatcatcggtagcctgctccattctctcatcggacctctccacttcagctaatcctgatggaggccatggaaatgtggacaattcttctgatgcaaacatctcccagcaaggtggtgcatcaactgctgggattgattcgactctggatatgcttagagatagtgtaaccgcacaagctagagcagcccatcaggctaggagaaatttgctagaatccgacaatgctaacttgagatattccaacagaaggatgggacctcaggaaccttttgaaggcagtgttcgattcagccgaacgttgagtgttggacgtcttcgtgacagagttcttaggaggactccattctcagatgggttattcaccccttcacttctttacgatagggcaatatggccatcaggaaatgctagtgccaggcaaaattcagcaatcatgcaaaggactaattcagagagaaattctgaactgcaattggattcttcaaccgactctgcaactctaagagaggccaataatcgggatctactggagcgcagatcagcttttcttgagaggaggaggatacgatctcaggtccgagctctccaaagattgggcagcagaacgagcagtcgaccaggaaattctgatgaagaaacaaacacaagagctagcatatcaagaatcgttatgttagcagaagcactttttgaggttctggatgagatccaccaacagtctgctgccttatcctcaaggccatcgttttcttcaattgggtccgttcctgctccaaaggaggttgtcgagcgtcttcctgtaaaagtatacaggagatcattaaaacaccaaactgaggaggctgcacaatgctacatttgccttgttgaatatgccgagggagactgtgtccgtattcttccatgcaatcatgaatttcatctaacatgcgtagataaatggttgaaagagatacacagggtttgtccactttgtcgtggtgatgtctgcagatccaatgcatcaggcattggaaaaaccacatga

SEQ ID NO: 13587 - DNA, 1062 bp, Oryza sativa
  Clone ID: TFbOSC21192j.C1.o6.fg
atggctcaccgccggatcgcgctcgccgtcctcgtgacgctgctcttgtcggcgttccgcccttgcctggcgcaacagagcaacgacgacacgagcaaacaccaccggagcgccacggccggcgggttcacgccgaccaccgtcgtcgtgctcgtggctctcatcaccgccttcgtcctcctcaccgtgttctccgtcctcatcaaccgctgcgcccaggcgcgcgctcccccgcgccgggcgttccgcagcacggcgtcccatcagcccgtcggcggcgccgccgccgcgtcccgcgcctcgcgtggcctcgacaaggaggtcgtggaggcgttccccacggcggtctacggcgacgtgaaggcgcgcatggcggcgaagtcggggccgctcgagtgcgccgtgtgcctcgccgagttcgcggacagcgacgagctacgggtgctcccggcgtgctgtcacgtgttccacccggactgcatcgacccctggctcgccgccgccgtcacgtgcccgctctgccgcgccaacctcacggcgccaccggtgtcgctcgccgccgccgagagctccgacctgacggcgccggaggaggcggtgcaggaggaagagtcggaggagctcgacgaggcgtccctgatggccaccttcacgccggaatccgtcatcgacttcggcgcgacgcacgaccatgaattcgacagagcagggtaccctcactaccggaggacgcagtcggccatggacgccgcgccggaccggcacacgctgaggctaccggagcacgtcatgaaggagctcgccgccgaccgcaggcaccggcgcgccgcgagcctcgccgggtacccggacagcgtggagaggacgccgaggtggctgacgtcgctctggcgatcggtgtcgtggcagaggcagagccgggcggactgggacgccggagaggagcacggcggcagcaaaagggttcacccggtcgccggagctcaggacgagacacccagcgggtccggctccgatgggagcaaggagaactccgattctgacgcgttaaaccgagtttga

SEQ ID NO: 13588 - DNA, 1476 bp, Oryza sativa
  Clone ID: TFbOSC21192j.C1.o6.np
atgggtgacgggcgaggggatgaggaggagtgcagggtggcgctgctgaatggcggcggcgcggcgaaggagggctggcaggtggtgtccggcggcgacggcaagctgaggaggagggtgtgggaggagtcgaggaagctgtgggtcatcgtggcgccggccatcttcagccgcgtcgtcacctacagcatgaacgtcatcacgcaggcgttcgccggccacctcggcgacctcgagctcgccgccatctccatcgccaacaccgtcgtcgtcggcttcaacttcggcctcatgcttggcatggcgagcgcgctggagacgctgtgcgggcaggcgttcggcgcgaagaagtaccacatgatgggggtgtacatgcagcgttcgtggatcgtgctgctggcgtgcgcggtgctgctgctgcccatgtacatctacgccgaggacgtgctgctcctgacgggtcagccgccggagctgtcggcgatggccggccgcgtctccgtctggttcatcccgctgcacctctccttcgccttcctcttcccgctgcagcgattcctgcagtgccagatgaagaacttcgccagcgccgcggcgtccggcgtcgcgctgtgcgtccacgtcgccatcagctggctcctcgtctcccgcttccggttcggcctcgtcggcatcgcgctcaccctcaacttctcgtggtgggccaccgccgccatgctcttcgcctacgtcgcctgcggcggatgcccggagacgtggaacggcctctccctcgaggcgttcgcggggttcgtacgttttttgcagttgctgacagaatttgtgtgcttaatttgcagcttggagaactggtactacagaatcctcatcttgctgaccggtaacctcaagaacgcggctattgcggtcgacgcgctctccatctgcatgacgatcaatgcatgggagctgatgattcccctggcattcttcgctggaaccggggtgcgggtggcgaacgagctgggcgccggcaacgggaagggcgcgaggttcgcgacgatcgtgtcgtcggtgacgtcgctggtgatcgggctcttcttctgggtgctcatcgtgggcctccacgacaagttcgcgctcatcttcacctccagcgacgtcgtgctcgacgccgtcgacaacctctccgtcctcctcgccttcaccatcctcctcaacagcatccagcccgttctctcaggtgtggctgttgggtctgggtggcaatccatggtggcctacgtcaacattggcacctactacctcatcggcatccccatgggcattctcctcggatggctcttcaaacttggcgtcctgggaatttgggcgggtatgatcggcggaaccgcagtgcagacgctaattctggccatcataaccatccgctgtgactgggacaaggaggtgaacaaaacgatcaatccctccacacagcccaagaaaacgatcaaa

SEQ ID NO: 13589 - DNA, 1198 bp, Oryza sativa
  Clone ID: TFbOSC410031j.C1.o6.np
caccgccggatcgcgctcgccgtcctcgtgacgctgctcttgtcggcgttccgcccttgcctggcgcaacagagcaacgacgacacgagcaaacaccaccggagcgccacggccggcgggttcacgccgaccaccgtcgtcgtgctcgtggctctcatcaccgccttcgtcctcctcaccgtgttctccgtcctcatcaaccgctgcgcccaggcgcgcgctcccccgcgccgggcgttccgcagcacggcgtcccatcagcccgtcggcggcgccgccgccgttgtcccgcgcctcgcgtggcctcgacaaggaggtcgtggaggcgttccccacggcggtctacggcgacgtgaaggcgcgcatggcggcgaagtcggggccgctcgagtgcgccgtgtgcctcgccgagttcgcggacagcgacgagctacgggtgctcccggcgtgctgtcacgtgttccacccggactgcatcgacccctggctcgccgccgccgtcacgtgcccgctctgccgcgccaacctcacggcgccaccggtgtcgctcgccgccgccgagagctccgacctgacggcgccggaggaggcggtgcaggaggaagagtcggaggagctcgacgaggcgtccctgatggccaccttcacgccggaatccgtcatcgacttcggcgcgacgcacgaccatgaattcgacagagcagggtaccctcactaccggaggacgcagtcggccatggacgccgcgccggaccggcacacgctgaggctaccggagcacgtcatgaaggagctcgccgccgaccgcaggcaccggcgcgccgcgagcctcgccgggtacccggacagcgtggagaggacgccgaggacgtggacgcacagcgcgacgccggacgccgcggcgctggcgaagttcttcatctggcactgcaggaatcgctgcagcgggaagaggaaggcgaaggagaggtgcagcgggatgaaccagacggagacgcggccggccatcgccgacagctccggcggctgacccgtcaggagcagcacgtcctcggcgtagatgtacatgggcagcagcagcaccgcgcacgccagcagcacgatccacgaacgctgcatgtacacccccatcatgtggtacttcttcgcgccgaacgcctgcccgcacagcgtctccagcgcgctcgccatgccaagc

SEQ ID NO: 13590 - DNA, 783 bp, Oryza sativa
  Clone ID: TFbOSC412577j.C1.o7.fg
atggaggccgtagcagtgcacgccagcttctcgtcctactcccctccggtggtcgccggcggccgcgacgacgccggcagcagcagcagcagcaggagcatgtcccgcctgccggctcgcgtcgccggcgccgtagctcgcggcatcgtcaccttcgtcttcgccacagtgggcacgatcctgggggcgatcaccggcgggctgatcgggctggcgacggagagcggcatggtgcggggcaccgggatcggggccatctccggcgcggtggtcgccatggaggtcgtcgactcctccgtcgccatgtggtgctcccacgactccgggatctggagcgttctctacgtccttgacgtgatctggagcctcctgacggggcggctggtgcgggagaaggtggatccggcggtgcagaacgcggtggacagccagatgaacgccgccgacgcgcccttcagggagagcgcgccgacgctggcggagatgttcgacaccggcatccccggcgtcgccgccgccgccacgggcatgccggcggacgccatcgccgcgctcccggtcaccacgttcgccgccgccgccggcggcgacgaccgcgccggctgctccgtgtgcctccaggacttggaggacggcgagcgggcgcggaggctgccggagtgcggccacacgttccacctccgctgcatcgacagctggctgctcaggcacgcgtcgtgccccctgtgccggcgcacggtggtcgccgccgccgtcgccgtcgacgacgtcgtcgtcggctga

SEQ ID NO: 13591 - DNA, 1176 bp, Oryza sativa
  Clone ID: TFbOSC20834j.C1.o2.fg
atggcggcggcggcgagggaggcggcggagagcccgaaccctaggtcggcgccgcggcgtgcggcggcggcggcggccaaggacgccagcagcttcctcagcccgcgtttccggtcggcggccgcgcaggccgggtgggacgaggagtcgctcctccacgcggcgctcgtcgtcgaggacacccccgtccgcgagtcccgccgcaggaggcgggcctccaccacctcctcctccgccggcggcggcgggagcgccggatctaacactaggaagcggaggtcgtggaggcagccgccgggatcgatcccgccggtggtttttctgctcgacgacgacgagaagaagccggataccacggcagatggcaagaaggaggtgaaggaggaagaaaagaagaccgtcgtcgttggggagaaggaggcctgttccgagaaagcagcggcaaccagcgagctgccctgtatggatcgcctccgggaggagctgtcttgtgctatatgtttggagatctgcttcgagccgagcaccacgccttgcgggcacagcttctgcatgaaatgcttaaaacatgccgcagctaaatgtggaaaaaggtgtcctaagtgccggcaattaatcagcaattcaagatcttgcacagtcaacacagtgctctggaacaccatccagctgctatttcctagtgaaaccgaggcaaggaggacttcaatcgcttcatcctcggaaaccaacgacgacttggcgcaacaaatctctcaaagaagtaacagcatggcacaaggtggcataagaagcagcagttccaatggcatcggctacatcacgcagcgcagcacaagaagcagcgctaccaacaacaggagcttcacaacaacaggcagcagaagaagcaccttcgtcgcacaggagggcagcagcacagcaacagggagaggctttgtccgggcttcgcagctggtccctagtgccagggtcgtctcagtgagatcacaccagtctgatgacgcggcattggcgtacaggctgcagcaggaggagttcatgacggctttcgagagcgagggcgagaggcagccacctcggagcagcagcagcacggtgtccgctgctcgagcgaatctgagagctatggcctcccgggccattcgtctccgagctcgtggctggcctgtctag

SEQ ID NO: 13592 - DNA, 594 bp, Oryza sativa
  Clone ID: TFbOSC900034j.C1.o2.fg
atggaggtggatgcctccgcggtcgcaagagcactaccaagagatttccctcccatcgagaacttgagcttcgaaggcttcccccgttatactttcaagatcggcaaccggatccactgcaccaacttgatgtatcgcccaggtagtcggacgctattaacgcaggaagaagctcatgagatcattcgcgagggcttgaggtctgacattcgtcggggccgcatacaactgaacgccgacttcttgcagcagcttgttgatcaggttcgcgatcatattcttcagcgtcagcgccgtggcactgccactgccatggatggagtagtggaggtggaggatgcgtacaggaacggtgggttcggcgctatccccgcgtcgagcaaggccatggccgagctgcaggaggcgatggcaagcgacgccagggaacgcgggtgcgctgtgtgcctggaggatttcgaggcgggagagaagctgacgaggatgccctgctcgcattgcttccatgcgacctgcatcttggattggctccgcctcagccatcgttgcccgctctgcagattcccgatgccaacccaagaccaatcttactag

SEQ ID NO: 13593 - DNA, 600 bp, Oryza sativa
  Clone ID: TFbOSC900071j.C1.o5.fg
atggaggtggatgcctccgcggtcgcaagagcactaccaagagatttccctcccatcgagaacttgagcttcgaaggcatcccccgttatactttcaagattggcaaccggatccactgcaccaacttgatgtaccgcccaggtagtcggacgctattaacgcaggaagaagctcatgagatcattcgcgagcgcttgaggtctgacattcgtcggggccgcatagaactggacgccgacttcttgcagcagcttgttgatcaggttcgcgatcatattcttcagcgtcagcgccgtggcactgccactgccattgccatggatggagtagtggaggtggaggatgcgtacaggaacggtgggttcggcgctgtccccgcgtcgagcaaggccatggccgagctgcaggaggcgatggcaagcgacgccagggaacgcgggtgcgctgtgtgcctggaggatttcgaggcgggagagaagctgacgaggatgccctgctcgcattgcttccatgcgacctgcatcttggattggctccgcctcagccatcgctgcccgctctgcagattcccgatgccaacccaagaccaatcttactag

SEQ ID NO: 13594 - DNA, 489 bp, Oryza sativa
  Clone ID: TFbOSC401236j.C1.o2.gm
atgatgatgtcttcgtcgtcgtcggcggcggcgggatatgacggcgagctgggtccgtcggcggcggcgcaggccgccggggttcggcggaaggcgctgcgggcgatgccgacgatggtgtactcggcggcgggcgggccgagcccggcgtgcgccatctgcctcgccgacctggagcccggcgagcgcgtgcgcgtgctgcccaagtgcaaccacggcttccacgtccgctgcgtcgaccgctggctcctcgcgcgctccacctgcccgacgtgccggcagccgctgttcgccacgccgccggtccggccgttcctcgcgcctctccggccggaaggcttcgtcacgccaagcaatgtcggtggtggagccgtggtgctcggcacattggccatggtttccgcggtgctggaggaggaggaagatgacgatccctgcagcaccggaggaagacgcagcgccgggagccgggccgagctaaccgtttga

SEQ ID NO: 13595 - DNA, 477 bp, Oryza sativa
  Clone ID: TFbOSC900293j.C1.o4.fg
atggcgttgagtttgggggaggtggctatgctcgtggttgacgtggcgttcgtcctgtgccttatcgtggcgatcatgtgctgctgcgaggacgaccgccgacgacctcggtcatcatctcaacgggacgcccaagtcggaggacgggtggtgatgctgcgggtggtggaggcgcccccgggccagcagcgagtggcgccggcggcagcgaaggcggcgctgccctacttcccgtacgcgcaggcccagggcaggacgtcgtcgtcggagacgcagacgctggtgtgcgccgtctgcctggaggagctcaggcacggcgagctgtgcagcgaggtgccggcgtgccgccacattttccacagggggtgcgtcgggtcgtggatgaagaagagcgatagctgcccgctgtgcagggtgaagatctcgtcgtggattgcagggccgaccgaatcgccgacggctgctgacgcagtgtag

SEQ ID NO: 13596 - DNA, 747 bp, Oryza sativa
  Clone ID: TFbOSC401206j.C1.o18.fg
atggtcctgtgctccatgcgcaaatcgttcaaggactcgctcaaggtgctcgaggctgacatccagcatgccaacaccctggcctcggatttctcgagggattatgacggggcttgcctccagatgcggatgtcgtacagccccgccgcgcagttcttcctcttcctggtgcagtggacggattgtagccttgccggtgctcttggcctcctcaggattctcatttataaggtttatgtagatggaacgaccaccttgtcaactcatgaaaggaaagcgagcattagggaattctatgctgttatatttccctcactcatgcaactccacaagggtatcagcgatgtcgatgaccggaggcagaaggcaatctgtactgagagatacagaagaagagatgaggatgagagcaagaggcatgtttctgagattgatgtcgagagagaggaagagtgcgggatttgcatggagatgaataacaaggttgtcttgcccaactgcagccatgctatgtgcatgaagtgttaccgtcaatggcgctcaagatcccagtcctgccccttctgccgtgacagcctcaaaagagtaaattctggtgatctgtggatgctcacagatgaccgagatgtcattgacatggcaacgattactagagagaaccttaggcgcctgtttatgtacattgagaagctgcctcttgttgctccggacaacatcttctatgcctatgattctcatgtaaaataa

SEQ ID NO: 13597 - DNA, 768 bp, Oryza sativa
  Clone ID: TFbOSC900263j.C1.o18.fg
atggtcctgtgctccatgcgcaaatcgttcaaggactcgctcaaggtgctcgaggctgacatccagcatgccaacaccctggcctcggatttctcgagggattatgacggggcttgcctccagatgcggatgtcgtacagccccgccgcgcagttcttcctcttcctggtgcagtggacggattgtagccttgccggtgctcttggcctcctcaggattctcatttataaggtttatgtagatggaacgaccaccttgtcaactcatgaaaggaaagcgagcattagggaattctatgctgttatatttccctcactcatgcaactccacaagggtatcagcgatgtcgatgaccggaggcagaaggcaatctgtactgagagatacagaagaagagatgaggatgagagcaagaggcatgtttctgagattgatgtcgagagagaggaagagtgcgggatttgcatggagatgaataacaaggttgtcttgcccaactgcagccatgctatgtgcatgaagtgttaccgtcaatggcgctcaagatcccagtcctgccccttctgccgtgacagcctcaaaagagtaaattctggtgatctgtggatgctcacagatgaccgagatgtcattgacatggcaacgattactagagagaaccttaggcgcctgtttatgtacattgagaagctgcctcttgttgctccggacaacatcttctatgcctatgattctcataggatgttccttgtcgtaggatgtggctaa

SEQ ID NO: 13598 - DNA, 1593 bp, Oryza sativa
  Clone ID: TFbOSC410012j.C1.o1.np
atgaactgtacaaaaggagggggatttccccttttgttttgcgcagtcatttgtctcatggcccaacagggggcttgcaatgtggtgctaatagcgaataacactaccttgtcatttgatgatgtcgaggcaacttttactccagaagtgaaagattcaggtgtaaatggtgcaatttacgctgtggaacctctggatgcatgtagtccattgagaaagaaagcagccaatggtcctgtttcaccatttgcactggtcatacgaggtggttgccaatttgacgataaagttagaaatgcacagaatgccggatttaaggctgtgatagtatatgatgatgaagacagtggtgtcctggtttcaagtaattttacagtggctgggagctcgtccgggatctacatatatgcggtattcctctctaaggcttcaggagaggttttgaagaaatattcaggtcaaagtgatgtagaggtgtggatactaccagtatatgaaaactcagcttggtctatcatggcaatttctttcacatcactgcttgctatggctgctgttctagctacttgtttctttgtgaggagacaccagataaggcgggacaggggaaggattcctgtaacccgggaatttcatggaatgagcagtcaattggttaaagcaatgccaagtcttatttttacaaaagtgcaagaagacaatagtacatcatcatcttgtgccatttgcttggaagactacagttttggagaaaagctaagagtgttgccttgtcgtcacaagttccatgcgacttgtgtggacatgtggttgacctcgtggaagacattctgccctgtgtgcaagcgagatgcaagtgctggaacctcaaaaccccctgcatcggagtccacccctttgctttcttctgttattcatctgtctgctgaatcaacagctttgtcttcttttcggtcaacggtggcagtatctccccctaggccaataagacgtcatccttcatcacagtccacatcccgcgcttactccatttccagtgccccccgcaattataaccttcaaagatattacactaactcaccttatattagtacgagtagaagcaatgtagatcttgcaaatatgtcatcacaatggtctcacactccgcaccaagcatccatgcattctctaagaagtggccatttgtctctaccgatcaacatcaggtatacaataccacatgtttctcgttctgactatggatctgccagcctgggtttatcccatgattcctgttctcaccatggatctccgagttattatcatagctctttgggccagcaacgttcttacctgatgcaccgcaccgagtcagggccaagcctgtctactatggtgctccagtcgccacaatagagtcagtagcagtacaatggcgaatcaggagaagtctatcagctgcggtttaactcgatcattacgtcaggcctatgtacagcattgtcttgattctgatggaagcttgtctgctgtgacatcggatcagtcgctaccaagatgctgattgatcttacgaagttcactgtttcatgagcatttgtgcaagcccct

SEQ ID NO: 13599 - DNA, 687 bp, Oryza sativa
  Clone ID: TFbOSC400622j.C1.o98.fg
atggccacggcgccgcgcgcgaggcgcctggccgccgccgacgtgcagccggccacgccggcggtcggcccagcgtccggcgggcggccccagttcaacctctcgtcgggcgcggccaccgccgtggtattcgtctccatcgtcctctgcttcatcctgctctgcacctactgccgctgcgccaggcagcgcgccatcgccggcgcgcgcagccgcgtcatgcgcgagatccgggagcgcgtcccgggcgtcctcctcctccgccccgccgccgccgccgccgcgctgcccgtcctcccctactccgccgccgccgccgccgcgggcgccaagaaggggccgctcgtcgaggactgccccgtctgcctcgaggccttcgccggcgacgacggcgtcaaggtcgtccccgcgtgcggccacgtgttccacgccgcctgcatcgaccagtggctcgccgtgcggaactcctgccccgtctgccgctgcgccgtcgtctgctactacgccgaccgcgcgagggacacggcggtggtggtcgacgacgacgacgacgaccaggaggtcgtcctggagcgcgtggttgcgatgatcgaggcgatacgagaagaacagagggaagaggaggcggcggcgaggcgcgcgccggcgagcgatggcgggggaggcgaggggttgatgacgtcatga

SEQ ID NO: 13600 - DNA, 1410 bp, Oryza sativa
  Clone ID: TFbOSC16299j.C1.o4.fg
atggcgacggcgacggcggtgtactacgcgttcagcagcagggagcagttctacccggcgatggtgtacctctccacctccaagatctgcttcgtgctgctcctcaacacgggcctcgtcgccatgtgcgtcgcctggcagctcgtcaagcggctcttcctggggacgctccgggaggccgaggtggagcggctcaacgagcaggcgtggcgggaggtggtggagatcctcttcgcggtcaccatcttcaggcaggacttctccgtctccttcctcgccatggtcgccgcgctgctgctcgtcaaggcgctgcactggctcgcgcagaagagggtcgagtacatcgagaccacgccctccgtgcccatgctgtcgcacgccaggatcgtctccttcatgctgttcctgctcgtcgtcgactgcctcttcctgtccaactcgctcaggtcgctcatacacaagcgggaggcgtctgttgcaatcttcttttcgtttgatgacatgctaatggaaggtcaatgggagaaaaaggcagtgtatacattttacttggagctcatcagtgaccttgtacacttgtctttgtatatgctcttcttcatagctatcttcctgaactatggtgtcccactgcacttgatacgtgagctgtatgagacatttcgcaacttcagaatccgtatcgcggattatgtacgctacagaaagataacttccaacatgaatgaaagatttccagatgccacagcagatgagctcaatgcgagtgatgctacatgtattatttgccgtgaggagatgaccacagcaaaaaagctgctttgtgggcacctgttccatgtccattgtttgaggtcatggttagaacgccaacacacttgccctacatgtagagctccaattctgcccccagataatgggcgtactgcagcacgtccgcatggagttcatcctggagttcagcctggtaatggcacaccaggttcagaacgagcagcaggtgagaacataagcaggcgccaagcaaaacttgaagcagctgcttcggctgcttccctatatgggagatcctttgcttatcctccagcgaacaatttgaacaggtattcaactcctccacagtctacatcaaatggtccacaatcaggagaagcaagtacttccaatcaatcgccaaaaggccatgcaactgccgatccttcagcgcctactttttatgcacgtggtgctgttagttcagtgacaactaccagggaacttgaaagttcactgcagaaggcatatgaaaatgctataaagagccagatagagaggcttatgcaggctgcatgcaaatttctggatatgtctgttgtaaacacatctttaactgcactcaagttacatgcttggtatgagccattgggttag

SEQ ID NO: 13601 - DNA, 913 bp, Oryza sativa
  Clone ID: TFbOSC16389j.C1.o1.fg
tgacatgctaatggaaggtcaatgggagaaaaaggcagtgtatacattttacttggagctcatcagtgaccttgtacacttgtctttgtatatgctcttcttcatagctatcttcctgaactatggtgtcccactgcacttgatacgtgagctgtatgagacatttcgcaacttcagaatccgtatcgcggattatgtacgctacagaaagataacttccaacatgaatgaaagatttccagatgccacagcagatgagctcaatgcgagtgatgctacatgtattatttgccgtgaggagatgaccacagcaaaaaagctgctttgtgggcacctgttccatgtccattgtttgaggtcatggttagaacgccaacacacttgccctacatgtagagctccaattctgcccccagataatgggcgtactgcagcacgtccgcatggagttcatcctggagttcagcctggtaatggcacaccaggttcagaacgagcagcaggtgagaacataagcaggcgccaagcaaaacttgaagcagctgcttcggctgcttccctatatgggagatcctttgcttatcctccagcgaacaatttgaacaggtattcaactcctccacagtctacatcaaatggtccacaatcaggagaagcaagtacttccaatcaatcgccaaaaggccatgcaactgccgatccttcagcgcctactttttatgcacgtggtgctgttagttcagtgacaactaccagggaacttgaaagttcactgcagaaggcatatgaaaatgctataaagagccagatagagaggcttatgcaggctgcatgcaaatttctggatatgtctgttgtaaacacatctttaactgcactcaagttacatgcttggtatgagccattgggttag

SEQ ID NO: 13602 - DNA, 472 bp, Oryza sativa
  Clone ID: TFbOSC461j.C1.o4.gp
cgggacggcgatgttgaacgtgtatatacagtgaccaatttgggccaattgggcacccgtcaatacattcgccacaacaagctgatgagtcactagtcactagccgttcgccggaaaatatccggagagatcagatcgatcagcgagatattttttagaagggattggcgccaaagaggccaggcaggagcccagctagctacgaagactactggagtagtatatcttttgtctctcacatcatgctacgaccacggcgatggtgtcgctgtccggcggcggcgtgctcccgccgccgccgatcacctggcggcggcacgtcgggcaggagccgtgcgagaccagccaggcgtcgacgcaccggacgtggaacccgtgccggcaccgcggcagcacgcgcaccttctcgccgtccgcgaactcgccgaggcagatggcgcacacgtcggtctccgccgtctcctccccgccg

SEQ ID NO: 13603 - DNA, 1320 bp, Oryza sativa
  Clone ID: TFbOSC400542j.C1.o6.fg
atgggggccgcgcgtggcggggtgcggcgcgtccggcgggaggcgctcgtggcgtgcatgacgtgcccgctctgcaaggggctcctccgggaggccaccgccatcaccgagtgcctccacaccttttgcaaggagtgcattatggagaaaatagatgacgaagaagtcgatcactgcccagtatgcaacattgatcttggctgtgatcctgaagagaaactcaggcccgaccataatgttcaagatatcaggaataaggtttttccacttaaagtgaaaaaggttggtgctcctaaggctccaactgtgacattgccagtaaagagaaaacagaggtcactttcttccttggttgttgacactccgagggtggcagtacagactggtttgacaggacggagaaccaaaactgcgagaaggacagcagtctcccatgtaaactctcctggtaataatggaaccatcaagctagcaaataaatctgaaggtcgagatcataaaactcagaaaatctcagcagcacaatctgccaagatgacaaaaactggcaataaaaagaagaataatactgatgtagatgtcacaatccagtcatcttctgaagataggaaggatgatcatacaattgacaaggaagatctcaagaagcctttaaatagcttggttgacactgcaaacaggacgaaattttttagatcaggtcctaaaggccaggctgccaaggaagacaaaataaaaaactcaattaagttactggcagaagatgacacagaagacaaactggtagttactggcagaaaggttatgccatgctcaaataagttaaaagttaaagaggaaaataatcgcagtccttcacaatctgcatcatcgaaagataaaaccacctcagactatgagctgaggaaaggacaacatgctgattcacagcagggacagattggttctacaagaactggtgctttgcatgatggaataactagaccagtatggtttttgcttgtcccttcacctgaccagaaacaagatcccaggctgcctcagctaccaacatattacgtgagaattaaagatggaagtctgcagacttccttgatccagaggtacatcatgaataagcttgacctagcaagtgaagatgaggtggagatcacatgccatggcgaggcaatctccccctcgaccacattgcaaggcctgctcgagctgtggctgaagagctcgccggtggagcaggtccaggcgtcgctgggcgctcaagccaaggagttcgtcatggagctcggctaccgccggccacagcggcctccttcctcttag

SEQ ID NO: 13604 - DNA, 501 bp, Oryza sativa
  Clone ID: TFbOSC405090j.C1.o6.fg
atgtcgtcccacgaccccagcagcgccaccgcggcggacgccgtcgccggcgggagctaccgcgtgtgcgacacggtggtgctcgtctgcctcgccttcgcctcctccatcatcgtcttcaccgtggccgtctgcttccgccgcgccgtcaccctgcagggctacgcggcctcggcgtcggcgtcgccgtccggccgtggcggcggcgccgccgccgcacccgccgctgtcggcggcctgcgcgggctggcgccgtccgcgctcgccgcgatccccaagttcgcgtaccggaggggcgccgcgggcggcggcggcgggtgggcgcagtgcgcgatctgcctcggcgtggtgcgcgacggcgaggccgtgcggcggctgccggagtgcaagcacctgttccacgtggagtgcgtcgacatgtggctgtactcgcacgccacgtgcccgctctgccggcgagacgtcggcgccgccgccgccgcggccggcgacaaagtctag

SEQ ID NO: 13605 - DNA, 1629 bp, Oryza sativa
  Clone ID: TFbOSC421348j.C1.o9.fg
atggcggtacctggacccttgaagcagcagttcagaactgattgcactgagtattttctctggagatatccatttgatggaggtggaaggaaagagaggctagtcaatagccaaaagttatttatgcatcctaggagtgatccagctaacggagctggatcgtctggctatgtgggtaacacaatgagatcgaatgatcttccgtcttcaagttatgctggccaagcttatggtcagcagaatagagcccccatccatgcttcatattctggtcatgcacctgctggaagctctagtggtagctatgcaccatacaatactcaacatatgcctgcttcaagctatccacacggatccgaggataatttcattccaagttcccatgtggatggcagaagggttgcattgaagagaagaaatcccatcattcatcctacagatggattcggtgttggaaattattatgctggcagttcttccaatactcagttctctcggcccatgcctccaaatcctattccacctcctgaatcctgtgttcgaatgccctcacacttgggttcgaaccactggaatgatcaccgctatgttaatcatgaaggatctcagaggaatgtgaggggaagacatgatcatagtactatccatttggaacaaagtccagctgcagcttgcccgtcaagcagcatcaatgtgccaccataccatccaaatgcaaatggtccttttggaagtgcaccagtacaacgtgacagagctcctttatctgtgcatccaagaattcttcctccagggcctgatggtagtagcatagcattcagagagaggccatactatcctgctccacagagcaccaacataagtgcacctgtgccaacgcttcctatttcttgtgacagtgcaccatttgctcatggtgggtacgcccctagatcagctcatcgtaacaacttacgcacttatcctcctccagcttttgcatcttcttccaaccctggagcagtctcccatgagccagctattcctagctatccacctgctgcccctagctatccacctgcaacctctgcagcatcatcaagtgtccagccatttcatgctgaagctgctgcacatttgaggcatccaaggcatgtatctgtagggggcagtggtagtgcaaggagtagaaggatgagggattcctatcatggttttcatcatttgatgattgaagacaataacttgggaagatcagcagctgagcggtttatgatgctggatcagttagttatccatgaatcaagagaagcattcgatcctcactgggacatgagactggacattgatgacatgagctatgaggagctgctggctttggaagaacgcataggccatgtgaacactggcctcgctgatgagaaaatttctggctgtgtgatggaggtagcctgctgcagcagtagtcatttgcaggatgatcaggacaatgaaagatgtgtaatctgcctggaggaatacaagcatgaggacacacttgggaggctgaaatgcggccacgggtttcactgcaattgcatcaagaagtggctgcaggtgaagaacacctgcccagtttgcaaagctgctgccgcagatgaaggcagctga

SEQ ID NO: 13606 - DNA, 672 bp, Oryza sativa
  Clone ID: TFbOSC8255j.C1.o5.gm
atggaggtccgacggccggccggcgatgagggggcggcgacccagaagggaagggcggcgggcggcgggagcacggaggagcaacaccagcgtcttgtgccgcgtccacaacggcgtgccagcgccggcggccggcaagcaacaccagcgtcttgtgccgcgtccacggcggcagccgcgaccgcggcgtgccagcgccagcggccggcgagctaccgcagctcgcagaagggcaccggcgaggagctcgccggagcgccactgccgccgctttgcctcagggcccttatcaagggcttgatcgccgaccacggcgaggccgcgccggccgtgcacgcacacgcggccaagctcggcctcgaccaccgcctcgccgtccgcgatgggctcgtcgagctctacctcgcgcgcgtcgagctcgcctccacgtgggcgctcttcgacggattccccgccggctggccgggacgtcgtttcttgaggatgcccgtgaagaagaacgtcctcgtcccggccgccgccgccacgtcgcggccggccgtcggacctcctcgccccggcaacgacctccccaccgccgggcggcctgcccaatccagagagaagagtgggagagagagaagggaggaaaggagaggaagggagaggctggtcgctgacgtggcatcctga

SEQ ID NO: 13607 - DNA, 1017 bp, Oryza sativa
  Clone ID: TFbOSC900291j.C1.o18.fg
atgtcgtcgtctccggcgcatgctcagcgcttctactgccaccagtgcgaccgcaccgtccccatcccgccgcccacctcccccgacgccgacgtcctctgcccgttctgcggtggaggcttcgtcgaggagcttggggaggacatcaaccccaaccccaaccccaaccctagccccttcctgccacaccaccccttcttccccttcgcctccccatccttcgacctccgcaaccctagcgacctcgcggccttcttcgggcccccctccccctccccctccccctccccagccgccaggcacttcgacccctccaacttcctccatgatcacttcaccggcctcctctctggcggcgccaccatccagatcgtcctcgagggctcctccgcctccctccccctcgggggcgccgccgccgggcccggggggatcagcctcggcgactacttcgtcggctctggcctcgagcagctcatccagcagctcgccgagaacgaccccaaccgctacggcacccctcctgccgccaagtccgccgtcgccgcgctccctgacgtcgccgtctccgccgacatgatggccgccgatggaggggcccagtgcgccgtctgcatggacgacttccacctcggagctgccgccaagcagctcccctgcaaacacgtcttccacaaggattgcatcctcccctggctcgaccttcacagctcctgccccgtttgccgcttcgagcttcccaccgatgaccctcaccacgcccacccaacccttggatctcaccgccccgccgcacccgcctctgcctctgcctctccctctccagctccaccacctaggctggctgagagaaggttcaggatatcgctgccatggcctctccgtgctgcgtttggcggccaggcggagagcagcaatcctaccaatcaggatcctgttggtggttctactgatgcttccggttctggcaacaacaatgcaactggaggtcatcgtggctacgatgatcttgactga

SEQ ID NO: 13608 - DNA, 702 bp, Oryza sativa
  Clone ID: TFbOSC18908j.C1.o3.fg
atgtcgtcgtcaaatggcacgacgacatacttgccgggaggagaggcggccggcggcggcggcggcggcaactccggatgctgcagcaccacgacgttgttcggcgcgttggccgcgtcgttcgccctgagcttcttcctcatcaccatcttcatctgccttcgagcactccgcgttgctcgtcgccggcgtgatcgtcccctggtcatggagcaggagcagcggcggccgacgccgcctaggttcggcctagacgccgccgccatcgcgcgcctcccgtcgttcccgtacgtgcgagcccgtgacgacggcgaggtctcggactcggcgtcgtcgtcgtcggtggagtgcgcggtgtgcctcagcgccgtcgacgagggggagacggtgaggcagctcccggcgtgcgggcacgtgttccaccgggagtgcatcgacatgtggctctcgtcccgcgcctcgtgcccggtgtgccgcgggaaggccgcgccggccgacgagctcgccgacgccatagtcgcgcgcatagcggtgacgcccgacctcgtcgggccacgcgtgtctatgtccgtcgtcgtgccggttgagatgctgaagggtgaaatggtgggcgcgtcgtcaacgtcgcgtgccgcgtcggcgccgccagagcagctcgatgcgcgagcgcctggcccggaaacggacttggagagtaaatag

SEQ ID NO: 13609 - DNA, 639 bp, Oryza sativa
  Clone ID: TFbOSC16946j.C1.o2.fg
atggaagtcgtcgtcgctcgccggggcgtcgtcgtcctgcggctgcgccacggcgagccgccgcccagcgccgccgcgcggtctggcgggcgctgctcgaggctgctcctcctgtggacgttcgccgtcggcttcgccgccgggctgttcatgttcgccagccacgtcttggccgccgtcgccgccgccgtgctcttcgccgccatgtgcctgtacacgtgcctgtgcctgaacaacgcggcgccggaggaggaagaggagcagcagcagcagccgcctgttctgctgcttcccggtcaggcgctgcgcgtcgccgtgatgccgccatcggtggggcggctgcagcagcaggaggtcaacggcggcggcggcggcggaggcctcaggcaggaggacgtcgaggccgccatcccggcgttcgagtacagtaagggttcgggcggcgcggcggaggcggagcagtgcgccgtgtgcatcggagtcgtgcggcgggggaagacggtgcggcggctgccggcgtgcgggcacgcgttccacgcggcgtgcatcgacgggtggctccgcgcgcacgccacgtgccccgtgtgccgcgccgacgtcaaggtcgccgccggcggcggcggcggagcgccggtgtag

SEQ ID NO: 13610 - DNA, 534 bp, Oryza sativa
  Clone ID: TFbOSC405090j.C1.o5.fg
atgtcgctgtcgtcgagctccaactcgctgccgtactcgacggaccagggcgggtacagcacgcacgacacgctcgtcctcctcggcatcggcttcttcgccaccgccgtctccgtcctcatgatcgtgctctgcgagtgcctctgctgccgccgccgccgccgcggcggcggcaccgtcgtctacgtggcggccaggccgttcttcctcggcggcggcgggctcagcgcgtccgccgtcgccacgctgccgtcgttcgtgtaccgcagagaagagtgggccgaggcggcgccccgcggcgacggcagcggcagcgggcgcggcggcggcggtgggtgggcgcagtgcgcggtgtgcctgagcatcgtgcaggaaggggagacggtgcggcagctgccggcgtgcaagcacctgttccacgtcggatgcatcgacatgtggctccactcccactccacgtgtcctctctgcagggccagcgtggagcctcttggcaaggagactcctctcaaggatcaggcacctccagtgtag

SEQ ID NO: 13611 - DNA, 1257 bp, Oryza sativa
  Clone ID: TFbOSC900340j.C1.o12.fg
atgttgtacccggagcggccgagccgcgtcaacgggacggccaccgtcgactgctcggcctacccgctcgactgccacccggtctgcccaggcggcagctgctacgagatcgccgagcccccgccgccgtcgccggtggtcccgcgcgtcgacgtggccgtcgacgaccaccacctccccgtacgcctcctcctcaccgtctcactcctctccgccttcctgttcatctcgctctctgtctccacgatcctgctctaccgccgccgcgtcgtcctgcgccgccggcgccgggccgcgaccgcgccgctccccggcgacgacgggttcggcgacggggatgaggaggcggggggcggcggcggggatgtgcaccacgtgtggtacatccgcacggtggggctggacgaggccaccatcacgtccatagccaccgcggagtaccgcgccggagttgggtggggaggggactgcgcggtgtgcctcggcgagttccgcgacggggagttggtccgcctcctcccgcgctgctcgcatccgttccatgcgccttgcatcgacacctggctccgcgcacacgtcaactgcccgctctgcagatccccagtcgtcgttccctccgatctccccgccacggctaccgaaggtgaggcggagggtggtgggcaagcggaagagcaccaggtgtttgatgaaatctcgctatcggaatcacgtgccgatgtctccgaggattctgacacctcttcggacactcaaagtgaggacacagcagcttcaccagaggatggtgggagggtgatgcccaagccaatacggcgctcggcgtccatggactcaccgttattcctggtggttgtgcctgaagcgcaggacgatgccatgcggggtgatcgaaaatttccgaatggtcaagagatgaagttattcagcgtgaaagagaaggatgcaacagggacgtcttcttcctcttgtcaggcagggcggtttgggattggcagatcgatgtcgagcagtgggcaggggttcttcttctcacggaatgggcgctccagtagtgctgtgttaccactatttaggaaggattcaccagatcaaggtacctcatatcagctcttccactttcctcgcttctttataagtatcagttttggagcccaaagcaagatatgggatcactatatcaacattctgatgtgtcttctcttaaagctctattccaccttccaaattctgttgtccactgactactttggttga

SEQ ID NO: 13612 - DNA, 840 bp, Oryza sativa
  Clone ID: TFbOSC24709j.C1.o1.fg
atggcgtcttctccggtgtcgtactggtgctaccactgcagccgcttcgtgagggtgtcgccgtccacggtcgtctgcccggagtgcgacggcggcttcctggagcagttcccgcagccgccgccgcgcggcggcggcgggagcggccggcgcggggcgatgaacccggtgatcgtgctccggggagggtccctgtccgggttcgagctctactacgacgacggctccggcgacgggctgcggccgctgcccggcgacgtgtcgcacctcctcatggggtcgggcttccaccgcctgctcgaccagttctcccggctcgaggcggcggcgccgcggccgccggcgtcgaaggcggcggtggagtcgatgccgtcggtgacggttgccgggagcggggcgcactgcgcggtgtgccaggaggcgttcgagccgggcgcctccgcgcgggagatgccgtgcaagcacgtctaccaccaggactgcatcctgccctggctctccctccgcaactcatgccccgtctgccgccgcgagctaccggcggccgcggcccccgagtcggaggcagatgcgggactaaccatctggcgactcccacgcggtggattcgccgtcgggaggttcgccggtgggccaagggagcagcttccggttgtctacactgaactggatgggggcttcagtaacggcgtcgggccgaggcgggtaacgtggccggagggcgacggccatgtcgatggcggcgaaggtcggattcgccgtgtatttaggaatctgtttggttgttttggtcggagcagtcggccggagagttcatcatcgcagtcccgtagtggctga

SEQ ID NO: 13613 - DNA, 1026 bp, Oryza sativa
  Clone ID: TFbOSC900024j.C1.o21.gm
gcgcggatggcgtcttctccggtgtcgtactggtgctaccactgcagccgcttcgtgagggtgtcgccgtccacggtcgtctgcccggagtgcgacggcggcttcctggagcagttcccgcagccgccgccgcgcggcggcggcgggagcggccggcgcggggcgatgaacccggtgatcgtgctccggggagggtccctgtccgggttcgagctctactacgacgacggctccggcgacgggctgcggccgctgcccggcgacgtgtcgcacctcctcatggggtcgggcttccaccgcctgctcgaccagttctcccggctcgaggcggcggcgccgcggccgccggcgtcgaaggcggcggtggagtcgatgccgtcggtgacggttgccgggagcggggcgcactgcgcggtgtgccaggaggcgttcgagccgggcgcctccgcgcgggagatgccgtgcaagcacgtctaccaccaggactgcatcctgccctggctctccctccgcaactcatgccccgtctgccgccgcgagctaccggcggccgcggcccccgagtcggaggcagatgcgggactaaccatctggcgactcccacgcggtggattcgccgtcgggaggttcgccggtgggccaagggagcagcttccggttgtctacactgaactggatgggggcttcagtaacggcgtcgggccgaggcgggtaacgtggccggagggcgacggccatgtcgatggcggcgaagtcgacaacagggtagttttcctcctcgagttcgtgcccgatgagatcaaagatagcgctttcgtctctcctgacagtatccggagacaccgcaggggactagccgtgcctatctccgaagtcgatatccggcgtcttgtcttgacgtatgttgtggcttctgttgttccctgtatgttgactgtggtgggatccgacaaggccttatcggctctgggcatccccagccgaagtttccttaggttcctcggagtccttgtcaagacggcgtaa

SEQ ID NO: 13614 - DNA, 2091 bp, Oryza sativa
  Clone ID: TFbOSC900134j.C1.o9.fg
atggggaggaggacatggcagtggcacgccattgcggcgctcggcgtcgcgtgcgcggccgccgccgccgtggccgccgataggagagccttctcggtgacctcggccgccggcggcggcgccgcggcggcggcggcggtggtggcggcgacgccggaggaagtgggcatccttcggaaggtggccaatttcttgtggcagactgatggcaactcgtaccaccacgtttggccggaaatggaattaggatggcaaatagtgctgggatcactgatcggattcttcggcgcggcattcgggagtgtgggcggcgttggaggtggtgggatctttgtgccaatgctgactttgatcattgggtttgatccaaagtcatctactgcaatatcaaaatgtatgatcatgggtgcagctgtctcaactgtctactacaatctcaagcttaaacatcctacgttggacatgccagtgattgactatgacctagccctgctgatccagcctatgctaatgcttgggatcagcattggtgttattttcaatgttttattccctgactggctggtcacagttctccttattatccttttcctaggcacatcaactaaagcttttctgaagggtgttgagacatggaagaaagagacaataatcaaaagggaggctgcaaaacgattggagcaaaccagtgaagaaccagaatatgcaccacttcctactggaccaggcgctgtagctgatgcaaaaaggccatcagatgaagcggcatcacttatgaagaacatttactggaaggagtttggccttcttgcatttgtgtggatggcattccttgttcttcaggtcacaaagaactacacagctacttgctccagttggtactggatcttaaaccttctccagctcatgttcttattcatccctaaaaaatggaaaccactcaaaattacatattcaaaatctttcacattgtatggtattaagatcccagtatcagttggagtgactatgtatgaagcgctgggcctgatgagcgggaagagagttctatcgtcaaagggaaatgaacagactacactgaaatttcaccagctctgcatatactgcttcttcggtatcactgcgggggtcgttggtggtctgctaggtctcggaggtggctttatcatgggtccactgttcttggaacttggcatcccaccccaggtttcaagtgcaacagccacctttgcaatgatgttctcatcttcaatgtctgttgttgagtactacctgttgaaccggttcccagtgccctatgctttgtactttgtcattgtggcattcatcgctgccattattggccagcatgtggtcaggaggttgatcaattggttaggacgggcatcgctcatcatcttcattttggctttcatgatctttgtcagcgcaatttctctaggattatccttggagatcactggagcaaagggtgagaagagaaccttttgtgttttcctccagggagccatggaaccatcatctctgtcacttcggctcaaagcagccatatatgatctgttcaacagtaactcattgcaaacatatgtgccattcagaatccgccatatcaacggtggcggtaacccgaggccgagacaagaggaccccggactcaccgatgccgagttcaagaaggcgatggagcagctcaacaagcaggcatataggtccttagaccctcataagatggttgaatcaaacagaggaggcagaaaccatgcaaagagtgcaagatccaagccagctccaaacaacacggaagaggagaaagcatgtaccatatgtttggagacattcctggctggggagcaggtggtggccacaccctgcaaccacatatttcaccaagagtgtatcaccccctgggtgaaggggcatggcaactgcccggtgtgccggttcgcgctatgcgagaggaacaccgtctccgacaacagccagagtggcgttggagaggttgaggtagatctggacctgctggagatgatgagggccatggaggagatcttcagccgggtcacattctcaaacttcatgccatacaactag

SEQ ID NO: 13615 - DNA, 1152 bp, Oryza sativa
  Clone ID: TFbOSC400939j.C1.o7.fg
atggcatcctctgctcctgcttgggtcccctacgagccaacgagagattgctctcaagggctgtgcagcatgtactgcccccagtggtgctacttcatcttccctccgccgccgcccttcgacgtcgccggcaccagcgccgacgactcctccggccctgtcttctcccctctcgtcattgcaatcatcggcgttctggccagcgccttcctcctcgtcagctattacaccttcatctccaagtactgtggcaccgttagctccctcagggggagggtcttcggctcgagctccggtggcgctgcttatggcggcggtgccggtagcggcggccgccacggccacgggcagtcgaggagccacgagtcatggaacgtctcgccgccgagcgggctggacgagaccctgatcaacaagatcacggtgtgcaagtaccggcgcggtgatgggttcgtccacaccaccgactgctcggtctgcctcggcgagttcagtgacggggagagcctccggctgctacccaggtgcagccatgccttccaccagcaatgcatcgacacttggctcaagtcacactccaattgccccctctgccgcgccaacatcaccttcgtcaccgtcgggttggcgtcgccggagccggagggctgtgctccaggcgagactggaggtgacaatacacacgaggtggttgtggtgatggatggcttggaaaatctttgtgaagagcagcaggaggcagtgagcagggccagcactgccgatgatgatcacgatgcgaaggacgtcgcagaggggatggaggaggccaatggcgcagccgagatcagagaagaaggctcgccgccaaagaggggcgcgtcgtcgtttgatcttcaccgtgacaaccgcatgtgcatcgccgacgttctgcaggaatccatggaagacgagctgacggcagccagggagagtggcctcctcgcaggcggcgctggcacgtcaagacggtgccatggcgagaacagcaagggaaggggaggccgcagccgacgtgcattgcagctgcaggacgccatggaggctctgccggggaagagattgccctccggtgggagatcctgcttcagcagcaagagcggcaggggaaaagattcagatcatccaatgtga

SEQ ID NO: 13616 - DNA, 1095 bp, Oryza sativa
  Clone ID: TFbOSC900225j.C1.o18.fg
atggctcgccgcgacggcgtcggcggcgacggcggcgcgtcggcggcggagcagcagcggagagtagcgctgcgtgtgctgctgtcccgtgcggaggcttcctcgccgccgccggcgacggtggaggaggaggcgcagcgggggaggagcggtggtggtaacaaggggctcgcgtcggcggcgctgcgcgggctcgggtgcacgtcgacggcggcgctgcgtgcccacgcgccggcttcggcggtggaggtggcgagtagctcggagcggtggcacgggaggcggcggcggaggaaggtgcaggagaggcggagcgcgaggggcggcggcggaggaggaggaggaggcgtggcgccgcccggccccgcgccggcggcggccggggacgtgtggtgcacgtgcgctcccgggataccgttcgccgccgaggcgtcgtcggtggactgcgtcgtggtggcgcgccaccaccacgcccaccacacggcggcggcgatgggctccggccgccgcggggaggcggagcggcgccacagagagaggccggccgctcctcgagctcgaagggtgaccatgcgtgagcacatatcctcgtcgctcatggactcgccgccgttccccgacatgccgctcctcaacgccgacctgctaccaccaccaccctccggccgccaccgccatggataccgccacccccacgtcggcgccgccgaggaagagatcatgatgttaagaacacggctattatggggaagattcggtatgcatgatcagcaccaggattggcgactcgacgttgacaacatgacatatgaggagctgctggatcttgaagacagaattgggtatgtaagcacagggttgcatgacgatgaaatcgctcgcagccttaggatggtcaagtattcagcattcaaccccaagcattttgcaacagaagtagaaaggaattgcagtatttgtcaggaagaatttgaagcaaatgaggaaacagggaggctgatctgtggccacagctatcatgtgcaatgcataaagcagtggctttctaggaagaacacctgccctgtctgcaaaactgttgtatcgaagacatga

SEQ ID NO: 13617 - DNA, 2811 bp, Oryza sativa
  Clone ID: TFbOSC826j.C1.o13.fg
atgtctgaccatcgaacacacgcgagcgactgtcatccagttgccagccaaccagatgttcagtgcctagtttgcacaaggccgtttactttggatgctcaggtgaccgatacctttgaagctttagccatatgcagggactgcaagatgacagtactcaatgatgatgaaagagatgaaataaccagcacttatcggcagaacacacggaggaggcagatatccaggactgcaagcattgatttcctggaggacgcattcttgcaggagttttctcagctgatcgacttagcaagaagacaaggtcgtgaaacggatattgattcttcgtcggtcgcgccgcaacatgcatcgtttaattcaacaccaagccaatctcaaagatggcatgcttcagatgatgagagcgatggccttaattatgttgattctgtgtttggtgaaattgaatctgccatcagtcttggtgactatggtggagattcagatacctccatagaggaacatagcgtgatgacaaggaggaggatttccattcaacttgacaatgacagctacatgaacacagatactgatattgatcccatgaatgctagactggatcagtgggattcagatgaccaggaagatgtggaagagtctggttttgatgaaatagtcaacaccatgacccagcaccagcagcaatcacatgatattcagctaagtggattgagtgaggacgaatctgaagatggtgtatggaattggagtgtgagtgtacgtcaaagagcaaatgtgaccaacttgctagatgacatggaagagccagaaatgaggacaacttttgtcgggaatccagatgactatgttgatgcaaggcagtttgagatgctccttgagcaatttgctgaggacaacgattccagaagaggagctccaccagcagcgacatcctttattgaaaatctcccctccgtgattatctctgcaagccatcagacaaatggtgatgttatttgtccagtctgcaaagacccaattcctaccagagctagagcaaaacagctaccatgcatgcatctttatcattcatcgtgcatcttgccatggcttagttctagaaatacatgtcctgtctgccgatatgagcttcctacagatgatgcagagtatgaaaggtccaagcaagccacaaccaatgtaagagacattcaggttgtggaagaaatttctgatgaacaagaggtccaggtaactcgtcagatggctgctggtgtgatcgaagagactaatacaagtgaacacaatgttcgtgttgatgagcaaccaaacagtgcacgcaggcgcagtggatggctttttattgctgctgctccagtttgcttctgtcagaattctacccagtgtccagtggagagcttagctctgttctacttgtgcaacatcctatggctgagggctgtgaagataaggaagaagttgaggaggcaaggcataaggggtcccaagcctacttttctgtacggcaacacaaaggagatcaaaagaatccgacaagaactcaaattttcacagaagcaaggcaccaacaacttcatctccaccctcttcccacactttctcctctgtcgggaaacttatggcccagtgtttctatactcaactggagctctggagatactacaagtttctcacccagatatggtgaaggatataggccggtggacaccatcagagcttggtaagcctaattatctaaagaaatctcgcaaggccctctttggaggaggtttatttacagagaatggtgatgaatgggcctatcagaggaagataattgcaccagagttcttcatggataagattaagggtatgatccagctgattgaggatgcaactgttacagtgttagaagcatgggaggatatgattgacgatgtgggagggtgtagggaaatagttgtcgatgattacttgcggaacttgtcagcagatgtaattgccagggcttgctttgggagtagcttcacaaaaggagaagaaatattttgcaagcttaggcagctccaaaaagtaattgctcagcaagattcgtttgttggtctgtctgcactgtggaaatacctgccaaccaagagcaaccaagaaatacagatgctggatgaacaagtccgcttactgatcctggatgtcgcaaaggaacaacaccactaccaagactcacacaacagtcttgtcaacgccatcattgatggtgcgcaggatggtcgcagcgctgcagaggctgaggactttatcgtcggaaactgtaagaccatctacttcggaggtcacgagagcacggcggtcaccgccatctggtgcctgatgctactcgccacgcactctgaggcaatggaggtgacgatggtgatccaggagacgcttcggctgtacccgccggcgtcggtgatgatgcaggaggccctgacggacgtgaagcttggcaacatcgaggtgcctcgcggcaccatcgtgcaggtgcccaggctgatgctgcacctggacaaggaagcctggggcgccgacgccgacgagttccggccggaccggttcgcgaacggcgtgacggcggcgtgcagggcggcgcacatgtacgtgccgttcgggcacgggcccaggacgtgcatcgggcagaacctggcaatggcggagctgaaggtggtgttggccaggctgctgacaaagttcgccttctcgccgtcgccgaggtaccgtcactcgccggcgttcaggctgaccattgaacccgggttcggcttgccactcatggtgacaaagctgccatga

SEQ ID NO: 13618 - DNA, 2055 bp, Oryza sativa
  Clone ID: TFbOSC421431j.C1.o19.fg
atggatcagcagaatttactgcccagcaaccccaccgcagatgaacagaatttacttccaaatactctagaggatgatgattacccacattatttacttggtagtcatgaggtggaaatgccaaatggaagcgtgattggtcagcaaaatacaagcttgaacttatgggattcagctggatctagctcgatgggctgtgtagctgatcatgatagtctttttgaggccaaaagggaacattttgctcctgctttgtctatccgagctcccttaattattggagggagaagacatgaaggcagtagttcattgccttcacagagcttaaacttagaccttaatcttaatcaggctgatcagtttgattctgaggatgttgatatgattcagagtaatggacaaccagggataaacgcttttcctctcaacaggggcctttccattcctgagcatgttctgcgccatacaaattcttccagtgctacaggaaatccttcacaggttgcaagcttttctgatggaatgacaggccaagaagttaacctgtttggtgggcatcgttcatcttgcaagagaaagaatattgatgggagtcttgcagagtcttctgccaatggtagttcacgtaataatcagcgaaataatattatactggaaccttctccatccagtcatgaaagcacttctggtttaactgcacctgcccctacaaaccatgttttttcatactctcctgtggaacagctaaaccagaataccaatatgtctgcaaatgctatgttgtctgatcattattcactatatggtgatcatgagcgtgagagatttctgaggaatacccggatgagaacaagccctaatgagtatgatcaatcatcgtccaatctcttgcctgaaggaagtctcaggtgttctgtttatcagcctactcagcaacagtctttgtttattccagtacaacctagagcatcgagctcttcaacaagttctcttagtcggccttatgtgcctgctgtcactcaattctcacaaaatttgcaccgtgctccatcaagtggcaattttggttcgagaatagggatttttcctagttctgctgatacaacaaaccagttatcttcacaagatcccaacaggagctcggtgagaggcaattttcctgagccccttctgttaggttcttctctgtttccttctgactcggcagaattgctatctatgccgggaggcagaagcaaccaacaaaattccagctccacaattcgaactgctgtaaatataggagctcaacagattgctgggttaaatgcatcccagcctacttcaagctcaaggggttcggttgatattgttaggagatccttgcaggctgctagcgttcctcagtccagaggttcaagcattacatcacagcagcaacgtgggcattcatccacatcacatgagattcgaagccatcaacctggatccagctctcgtgccaatcagcagcattatgtcagggctgttcctcactctgtagataggcaaaactcgaattacttggacctgcagtcttttatgcaaagcattgctgcttcaagagacggaattaggacagtctcagagtctgccaatcaacttgtgcatcttcgcaatgttgttgaacaaattcgtcagggaagaggtggaaggtttgaggatcctaattttgaacgtgcactttttgcaaggcgtgccagtttaattgacagacatcgtgacatgcggcttgatgtggataatatgtcatatgaggaattgttggcacttggtgaacgcattgggtatgtaaacactggacttagtgaggataaaattaggactggtttgaagcaatggaaatatgtgagcataccgattgaagaacctctaactggtgttgaaccatgctgtatttgccaggaagaatatgccgaaggtgaggacatgggcagactagactgtgggcatgacttccacaccgcatgcatcaaacaatggctggttataaaaaatctgtgccctatctgtaaaaagacaggactgggcacttaa

SEQ ID NO: 13619 - DNA, 1497 bp, Oryza sativa
  Clone ID: TFbOSC414513j.C1.o15.fg
atggcggaagaagccgacgagacaaccgtcgccgcacgaggcatgcatgccaggagtcgtcgttgctccaaggacttgaccttggagaatggagacgcagagggcgcgcaggggtgtgatgatggtggcgtcaagtcatcggcgatggcgagcgaggagcgcgaggctgacaacattgtgccctccgattccgcgttcccggaggtggagctggccgaggacgacgccgtggtgtgctcccgggtcaccccggacggcggcggggaggtggccgcgtggtgcgagattaggcgcggcggcggcgatggcgacgcgtcgtcggcgacgattcggaatctgagaggcgagcccctggagacagggaagaggcagagtggtcatggctcggatgcaattattgtcgatggaagagtgatccagcaagaagcagttgacatcaaaccggggagtgaaattgtttcaggaccccagaaagatgggcatctgttgtacacctttgatataacaggcctgaatgaccaggacaaaactaatatcaagattgtgctggatattgagaatgcaaagtgcagcatatgcttaaatttgtggcatgatgttgttactgttgctccatgcctccacaacttctgcaacggttgcttctctgagtggttaagaaggtcttcagctaattcgcgtgataaaagtcagagtgctgcctgtccacaatgtaggacggcagtgcaatcagttggtaggaatcacttcctacataatattgaagaggctatactgcaagctttttcatcgctacagcggtctgatgaggagattgcattgttggagtcatatgcctcggtcaagacaaatattgcatggcatgcattcatcccttttccatggtcttatgctggtgcgatgattcttagatccaccatggggataaacatctgtcagagggaggttttggggaaacagaaaatccagtcaaggaagcgccgtttgccacgttcaaatgatgaagctaaccatactaaccatgctgattttctatgccctcaatgtggtttgggatgtgatagggcattttgtggagcttattggtgttcccaaggagtgaattcaagtcagcataatccaatctgtgatcaggaaactttcaagatgatctctcagcgccatatctctagtgttcctgacacagtacatggaggcaatcaatacgagaaagatgtaggaagttttaacatgatcttatactatcatattgctccttttataccccagatagtagtttcacatattacagaaagatgtatacagcaatcaggcaaagcattgcaagctataatctcagagtggatagtgaagtttgacaataaggagcttgatcgctcaaggctgcagctgaaccatgttgatgcaattacttctaggacatacgtctgcaaccaatgctacagcaagktcatcgatttcctgctctactggttccgtgtatcaatgccaagaaat

SEQ ID NO: 13620 - DNA, 225 bp, Oryza sativa
  Clone ID: TFbOSC419672j.C1.o5.fg
atgtcgcgagatgtcctcctgggcctcgcgctgacgaaggcgtgcgacgcgaggcaggaggagtgcgccgtgtgcctcagggacttcgaggagaaagacatgctgaggacgatgccgtgtaaccactccttccacgagatctgcctcttccgttggctcagcgaaagctgcctctgtcctctctgccgctacgcgctgcccaagcagcagcagatccgtttgtaa

SEQ ID NO: 13621 - DNA, 504 bp, Oryza sativa
  Clone ID: TFbOSC4300j.C1.o1.fg
atggggatggcttcttttactcgtcagcctttctactgtaaatccttggcttgtcatcatcaacaaaatccggcctctacaattgttgcaatagacaaaaatctggatacatccactcctgacacttaccgagcaccacctacacctttgccttatgatgttggtctagtgttgaaagataaccctgatttggagaagacaggcatcaagaggaaaattcatgaacataaggagtccttaatgatggatgataatgagtcattgcaaaaatgtgtctctgaagataagcctgatgaggaggatgtttgcccaatctgtcttgaagtttttcgttattcaccagaatatgatgaagaaaatccccgctctatgactaaatgtgagcatcattttcatctttgctgcatacttgagtggatggagcggagtgaaacttgcccagtttgtgaccaggggaagttggtagtcgatctgaagctaaagaatacaaattttgatgtttga

SEQ ID NO: 13622 - DNA, 1042 bp, Oryza sativa
  Clone ID: TFbOSC900381j.C1.o6.np
ccccttgaaggaggagcccttagaacttgggcacctcgatggccgacggcggcggcggcggggaggccgggtccggtggctcggcgccggtctgcagcttcgtgaggaagccgccgaagaacatccggaagcgcccgaccgcgcccgcgggctccgacgacgacgacgaagacgggtccggcgccatcgccgccgcgcgcgccaagaaggcgccgtcgtccaccagcaagctcttcttctcctccgcggacggctcgtcggagccccgccggttccagtacgagtcgtcgcggacgatccaggcctccaccgacagccgcgccaccgccacgctcgagacggagacggagttcgaccgcgacgcgcgcgccatccgcgagcggcagctcaagcaggccgaggagtccctgaagaagaacccctccgctcctgcctccagctccggctctggctccggggaggtgtacaaggggatccacggctacacggattacaaggccgggttccgccgggagcacacggtgtcgtcggagaaggccggcgggtcgcacgggccgctccgcgcgtcggcgcacatccggctctccgctcggttcgactaccagccggacatttgcaaggactacaaggagacagggtactgtggctatggcgattcctgcaagttcatgcatgacagaggggactacaagtctggatggcagatagagaaggagtgggaggaggcggagaaggcccgcaagcgccgcatcgctatgggtggggatggtagtgattacgaagcaggggaggaggatgacgatgatgatgaagaagcgttgccctttgcctgctacatttgcagggagccttttgttgatccagtggtcacgaaatgcaagcactatttctgcgagcactgtgcattaaagcatcactcgaagaataagaagtgctttgtctgcaacaaaccaacactcggcatcttcaacgcggcacaggagatccgcaagaagatggcacaagacaagaagcaatatgaaattttaaaaaagagagttta

SEQ ID NO: 13623 - DNA, 1029 bp, Oryza sativa
  Clone ID: TFbOSC409503j.C1.o3.fg
atgaggtgtcctttctccatcttaaattcggtccgtggtatgaacccaagattttcctccccctctatcctggtttctgcgacaactcagaattggattgttcgtcgtctaatacagcaaggcagccagttggtgtgggtgggtgccacaaataatgcagaatggcagccacaaccaggatgctccaaagtggctggtccctgtcttgttcgccatgaacatgaaatgcattggaggaaagctctgttgatagaaacagcacacaaacacataatggaggatcaaaagcgattgagagattttgatttgctgcaggcactcagtgtggtcttgtttgtggaaaaagatatgcgaataaggttagaggttgatcgctcggtagatggtactgatggccgggatgcttcccggagtggagtgcgcgcggcggcgacgtctccggcagggcggcggggaggcgccgtgcgggacgcggcggccgtcattgtgcctgacaatcatagatcagatattgaatttgaaatcgcggtatttggaattggaattatgttgcagcagcagaggagcgcgtgcgaggagcagcagcccgggtggtggacgctggacagcaacgtgcgggaggcgaaggagaggctggaccagaagctgcggagccagagggaatccgccgtcgtcgtcgtcaagaggcataacaaagcgcaggtggcaggaacgagcagtgacggcggcgagcagtcaacggcaactacggcggcgccgcagtgggaggtgtacacgaggaaagaagggcggcggcggatgtggttcaggaggttggggcggaggccgacgccggaggaggaggaggagtgcgcggtgtgtctagaggagctgcgtgccggggaggcggtggcgcacctcccctgcacgcaccgcttccactggggctgcgccgtgccatgggtccagaccgcctcccgctgccccgtctgtcgcgccgccgtctacctcacctcaccggcgccggcggccagcaacaactacaactag

SEQ ID NO: 13624 - DNA, 978 bp, Oryza sativa
  Clone ID: TFbOSC900024j.C1.o9.fg
atgagcttcgtgttccgggggagcagaggtgacatcgaggccggaggcttcccggggttcgccccggagcgccgcgccatgcggattcatgcgggtggtcggccggtgaacagcaacctggcttttcttgtcactgttcttatgttgttcatggtactgaactcacaccagatgtctccgaactttttggtttggctggttttgggtgtgttcctaatggccaccagcctaaggatgtacgccacatgccagcagctccaagcgcaggcgcaagctcacgctgcagctgccaacggcttccttggacacactgagctgcgggtgcatgtcccgccgaccatagctctcgccacacgaggccgtttgcagagccttaggctccaacttgcgctacttgaccgcgagttcgatgatttagattatgatgcccttagggccttggatgcagacaatagccctcatgctccttcgatgagtgaagaagaaataaatgctcttcctgtattcaaatacaaggttcaggcacatcagggaagtgcctctttccgaaaaagtgatggaccatctcaaccatctgtttcttctactgaatctggcaatgagaaaaagcaggatcgtttcaaggctgatgcaactgacaacaccctggaggatgagttgacatgcagtgtttgcttagaacaagtcgttgtgggtgatctattgagaagcctaccatgcctgcaccagtttcatgcaaactgcatcgatccatggttgcgccaacagggaacatgcccagtttgcaagcaccgtgtaagcgatgggtggcatggtgaagcagatgcttctaacatggttgtgatatttttggttgacctgtaccctgttcagtatgaactcacatacaatcctttttactctgtttccgtggggaaattggcgtattatgggtgtttaaggctgaagatcagtagaggatttaagatccaagagtag

SEQ ID NO: 13625 - DNA, 501 bp, Oryza sativa
  Clone ID: TFbOSC18908j.C1.o5.fg
atggcgacggtgggcgccgtggacggcgttgaagttgtgagcgcactgatcggccagtactacgacgggctggcgctggagctcgtggtgttctccctcgccatcgtcgtcctgcggtacgccgcggtgctctacgcgaaccacctggtcgacagcctgagcgagctccaggcggcggtcggcgccgggatcggcggctcgtcgtcgggaggcggcctcgactccgccgccattgcgcggctgccctgcttcgtgctccctccccgccgcggaggtagtgcggcggcggcggcggcggagtgcgcggtgtgcctgggcgccgtggaggaaggggagacggtgcgcgcgctcccctgctgcccgcacgccttccacgcccgctgcgtcgacgcctggctgcgcctgcggccgacgtgccccctgtgccgcgccgacgtgccggtgccggcgaggccgacagctccacgacgcaggcacgtgcctcgtggcacagtggagtga

SEQ ID NO: 13626 - DNA, 556 bp, Oryza sativa
  Clone ID: TFbOSC413688j.C1.o3.hg
atcacccccgggtttctctgggtacgcccccccccttttcgggaaattttgtttattggaccaccgcggcgcccaaaagacaagtaggggggtttcccttatacaaaacccggggtgttcgaatcgcccttctggagaaacatgttgcggggggcctttggtgttcttggccctccccggtcccgccctgggggtgaaggggcggagacgacaaactggcggtaatcgcggcgccccccgcgtccgcggccgggggggggggggcccaagcctggcgaacagtttccgaaacagtttcaggccgcaaagtttcggccgccgacaaggcgggggcgcgggcgcgaccaattgccgtgtctgcctcgcgcggttcaagccggagtcggtggtgaaccgcttcccctgcggccacttcttccaccgcgcttgcctcgagaagtggctggattacgaccacgccacctgcccgttttgccgccaccgcttcctccccgccaccaccgagtccccctcgccgtcgccggcgacggcgaccccccatttcgcccggatttag

SEQ ID NO: 13627 - DNA, 804 bp, Oryza sativa
  Clone ID: TFbOSC400547j.C1.o23.fg
atggaggtcgcggccgcggaggacgcgctggaggagagcggcgtggcggtgtacctccccaggcttctcgccggcgtcatctccggcgctctcaccggcctcttcgctctcgctggggccttgaccggagcggtgaccggcgcgctggccggaagggcttcagacagcggcgtgctccggggagctggattgggggcgttcgccggagctgtgctctccattgaggtcctcgaggcttctcgtgcttattggtgctcggaccggctgggctctcatggcacatcctccatggtcagcatttcagattttggtcatgatgatctgtatgatatttttggagattgttcatccaaagggctttcacgggagtcactgaataaattaccacactatgtggtcactgaccaaacacggaactcgtttggtgaagacctctcttgcactatctgcctgcaggatattgtaaccggtgaaacggcgaggagattgccgaattgctcccacactttccaccagccttgcgtggacaaatggctcgttggccatgggtcttgcccttgctgcggctgtgcctcctccgcctgtgcgcgtccgtttcgctcgccactgtttggctatggggaggagaaagagaaaccggggcagtgcgcgtacgagaaagttgattgggttcctgatgttgatggaggcggcagcatcctagtacagcgtcgcatctcatcagagagtaggcgagcagcagccgccaactgctggatggtcgtagtcgcggctcagaatctttgcccaccttggcgctgctga

SEQ ID NO: 13628 - DNA, 2253 bp, Oryza sativa
  Clone ID: TFbOSC401537j.C1.o14.fg
atggcttcgtcatcaaatccatcaaatcttccctgctctagtgatggtgtatgcatgttatgcaaggtgcttacaacagaggtagagcagctgcgttgtagcacctgtgctacgccatggcatactccctgcctctccagcataccgccccttacagatgtggcccactgggtctgtccagattgctccggtgatgtcacagccagctacccgccatctgatgttgttcgtccggagagcagcctcatcgctgcgattcgtgtgattgaggctgatccggtgctgtccatccaagagaaggctcgtcgtcgccaggaacttcttggccatgccggtgatgcaggggctgcaataactgaagctgttggggaaaacgtagaggacagtgagagcaacaatcctttgtctatgctgaacaagaacatcaactgctcattttgtatgctgcttccagagcgacctgtcactacaccatgtggccacaacttctgcctgaaatgcttccgaaggtggattgaaaatggtaaaagagcttgtgtgatctgccgagcacctattacacaaaaagtagcacaagatctaagaattaacttggcactagtccaagctatccgcatggccaaggctgcaaacaatgctagcacaactggtgaaacaacggtttatcattataaagaaaatgaagataaacctgacagagctttcactactgaaagagcaaagagagctggaatggcaaatgcttcaagtggacaaatatttgtgactattgcaccagactattttggtccaattcttgaagatcatgacccaaggaggaaccgcggtgttcgagtcggggaccattggaaagatagaatggaaggtagacagtggggtgctcatttccctcatattgctgggattgccggccaatctacacatggggctcaatcagttgccctctcaggaggttatttagatgatgaagatcatggagagtggttcctctatactggaagtggaggaagggatctaagtggaaacaagcgaacaagcaaggagcagtcttttgatcagaagtttgagaagctgaatgctgcattacgtgttagctgcttaaatggctatcccgtgagagttgtacggtcttttaaagagaagcgctcaccatatgctccagagtctggtgttaggtatgatggaatctataggattgagaaatgctggaggaaaactggagttcagggtacattcaaagtgtgcagtgatgaacatggagaccatccaaggccattaccagatatcgaagagctgaaaaatgcaattgatattactgagaggaaaggaaacccagcatgggattttgatgcaacagatggatggaagtggatgattactccacccatcagcaggaaggctgtcgtaactggagatcctagaggcaagaaaatgcaaggagcagcaaggcatacaaataacttgtcaatgagagaaaggctgttgaaagaattcagatgctccatatgtaggaacgtgatggaagagccagtgacaacaccgtgtgctcacaacttctgcaagaaatgcctgcttgggtcatatgataatctttcccttacagaggagagaagccgtggtggtcggaccctccgggcacgaaagattgttaaaaagtgcccttcttgtccaagtgatatcgctgatttcgtacagaatcctcaggtaaaccgtgacattatgaacgttattgaatcactccaaaaagaagctgagaaggaagatcatgctagggtgagtggagaaggcagcagtgcagcacttgtagattctgatgatgaaaatgacactgcttgggagaaccaagatgatggtaatctggatgagggaggttgcaacaatcctgaggacatgataactgaatctgttgatttgaattctgttactaatgttgataatactgaaaacaaggtggaagttcagcagcctcacaagcgtaccgccggtgccgggaaggggaaaggtggcaaatgggctaggacaagctctgcaccaggtgatgcagatgccaggaatgttgtgacttcaactgaaacattggatggaatagctgctgagaatgtggctgatttagtacaaattgaggattgcactttcactggtgtggaaagagccgaccccaatgcgttagaagttgatggcaagaatatgattccagacttttcagaagctgagaaggttaaccctaaacaggatcaagaagttcttccatga

SEQ ID NO: 13629 - DNA, 1086 bp, Oryza sativa
  Clone ID: TFbOSC407908j.C1.o13.fg
atggcgtccgccgcctccccgccgcgctccggcgacgcctccccgtcctcccctctcctcccttccccgacgtcccccgaccgccgcagcggcggcggcggaggcggaggacgcctgcttccggggctgcgcggcgcggcgcggttcctgggccgcacggggagccgccgcctgatgcgggagccgtcggtggcggtgcgggagacggcggcggagcacctcgaggagcgccagaccgactgggcctactccaagcccgtcgtcgtgctcgacgtgctctggaacctcgccttcgtcgccgtcgccgccgccgtcctcgccgcctcgctcccggagtccccctcggtgccgctccgcgtctggctcgccgggtacgtgctccagtgcctcttccacgtcctctgcgtcaccgtcgagtacaggcggcgccgggaggcgcgcggcggcggctttggggcggaccagggggctgcggctgatggggatttcaagctcagtattgtgaagcacctggagtccgcaaacacgatgttttctttcatatggtggatcattgggttctactggatatctgcaggtggccaagctttgtcccatgatgctcctcaactttactggctctccattgtgtttctggcatttgatgttttctttgtagtcttctgtgttgccttggcctgtgtgattggcattgctgtctgttgctgcctgccttgcattattgctatcttatatgctgtaactgatcaggaaggagcatctgaagaggacatcaacaacctgtccaaattcaaatttcggacaatgggtgatgcagacaagctggttgctggaattgcagcacctgtgggtggagtaatgactgagtgtggcaccaatcctcctgttgaacacttcctttctgctgaggatgctgagtgctgcatctgcttgtgtccctatgaagacggtgcggaacttcgagaactcccctgcaatcatcatttccactgtacctgcatagacaagtggcttcacataaatgcaacatgtcccctgtgcaagttcaacatcatcaagagcaaccttggtccagaagacgtctag

SEQ ID NO: 13630 - DNA, 783 bp, Oryza sativa
  Clone ID: TFbOSC900241j.C1.o6.fg
atgccatcgtcatcgtcatcctcggtcgccgctgccccttctggcagcaatggcacccgccgcgacggtgggagcgggagcgtcacgggctgcctcccggctgaccaggcatgcttcgcgctttcgtcgtcggccagctcgccaggctacctgcacgcctcggccacaacgacgcgtcgcgatgcttctgccaccgtggcgcgcgcgtgctgcaccaccgcgtcgtacgtcgtcgtcctcgggatcagcttcggctccctcctcgccatcctgctcatcctctgcatcatccggtggtacctcgtgtggaggtcggcgcgaccacggcgggacgacggcgccgcggatgaggcggttgggtcagccaagaagcggtcggctgggctggatgacgacgccatcgcggcgctgccggtgttcgcgtacaagcaaagggaggagggcggcggcggcgcggtgggggcagcagaggaggaggaagaggaacgggagtgcgcggtgtgcctcgccgtgatggccgacggggaggcggcgcggcggctgcccagatgcatgcatgtcttccaccggggctgcgtcgatgtgtggctcagggagcactcgacgtgccccgtctgccgcgccgaggtggttgttaggccggccggtgcggcgcgcgttgagaagttgccggagagcagcgcgtcgcgggcattgacatcgccggtgccggcaccggcgccgaggccgacggggacagtggtggacgacggcagggagagggacctcgaggcgcagcagtag

SEQ ID NO: 13631 - DNA, 438 bp, Oryza sativa
  Clone ID: TFbOSC18110j.C1.o2.fg
atggcgacgtcgagcgagtcggtgaaccagttgaaggacgatggtacggaggagatggacgtcgacgactacatcggcggcggcagcggcggtggcggcgaggcgttgatcgggatgaagacggtggaggcgccggacgacggcagcaactgcccgatttgcttggacggcggcggcggcggtggggagaagacgacgacggaggcgtgggtggagacgccgtgcgcgcaccgcttccactcgcggtgcctcgagtcttgggctcgggtgaagctagggacctgccccatgtgccggcgcgagctgacggcggcggcggcagcggcgacgacgacggccggagaggatgtgcatgtgctggtggccgatccgatggtggcggatccgctgcaggcgaggtggaatttgtttgttcaacggtcaactgatggtttctag

SEQ ID NO: 13632 - DNA, 2631 bp, Oryza sativa
  Clone ID: TFbOSC21837j.C1.o7.gm
atgccgccggcggccggcgaaagcggcgacgacgtcgtcaggctctccttctacgacgtcatgttcgtctccatgatgccgatccagcgtctcttcttctacgagggcgccgcgctcccgccgttcccgtcgctcgtcggctccctccggtcatccctcgccgccgccctcgccgccttcctccccctcgccggcaagctgacgttccgcgcggcgctcggcgacgttgtgctggattactccgccgccgccgtccccccgggcgtcaagttcgtcgaggccgagtacggttcatccgacgagatcagcgccttcgacgccatgcgtcgcctcgccggcgacgtcgagcacaacgtggaggcgttcatggagctcgtgccggagcttgaggtggagcaacttccggccccggtgctcgccgtgcaggtgaccaggccggcgttccggaacgacgacggcgacgacgcggtaggcgtcgtggcggtcggggtgtccgtgcaccacgcggtggctgacggccagtcgctgtggcagttcatgaaggcgtggtcggcggcggcgatggtgggctcgccggcggcgccgggcctcctgccgccgacgtttgaccgggcgttgattcgccatcccagaagtgaagagctcgccagcaagttccttcaattgagttctccgactctacctgaggtgaagctatcccgtgtggcggctgacgtcatcaagggccagcggacgaggaccttccttctccgcgccgaccaaatcagatcgctgaagcgtcgcatctcgcgacgcatcgccgccggcgagccaccgcgcgagacggcgtctccagtaacagcctacgtcgccatcgcgtcgctggtctggacctcggtcgtccgcgccaagccgcacgacgccgccgacgaggcctacctcatggtcaccgccgactgccgccgccgcctccgcccaccgatcgacccggggtacttcggcaattgcgtcgcggcgtgctacgcgcgcgccaacgtgggcgccctccgccgcggcggcggcgacaacggcggcgacgacgaggggctcgcgcgcgccgcggcggcgatcggggcggcgatccgcgagcagctggaggacccgctcggcggcgacatcgaggggtggctccagttccacctgagcctcccggcggcgaggctgacggcggtggggtcgtcgcaccggttcatggcgtacgagacggacctcgggtggggcgcgccgagccgcgtcgagctcgtgtcgccgttcgcgcgcgagctggtgatgctgctcggcgcggcgggcggcggcgtgcaggtgtccgtgtcgctcgacgaggcgcacatggatgccttcgagaccagctgcatcaggatgagcaccctagtgcgagtcctcgccgtctcccatgtccaccctgacgaggcggccgtcggagccgcatggccgccgccgaacaccgtcgagctctctttcttggacagcttccaagttgcccgcggagcgatccagcggctcttcttctacgagggcgacgacctcccgccattccagtctatcgtcggtgccctgcagtcctccctcgccgccgcgctccccgtcttcctgcccctctccgggaagctggcctacctcccggagtccggcgacgtcgtcatcgactactccccggacgccgtctcccccggcgtcaggttcgtcgaggccgagtactccggcagcgtcgacgacatgcgccgcctcgccggcgacgacgagcaccagattgaggcgttcttgcagctcgtgccggagctcgaggtgagcatgctcccggccccgcttctcgccgtgcaggtcactaggcctagagatgacaacgtcggcggcggcggcgccggcggcgcggtggccgttggtgtggccattcaccacggggttgccgacgggcagtcggtgactccactcccgatgggggtcgacatgtcgcagcagagaaggagaaccttcttgctcaacgccggcgagatcgaatctctgaagcagcgcatatcggagagcgacgccggccgcgagcagctgcgcaaccggctgtccacctacgtggccatctcctccctggcgtggacgtccatcgtgcgcgccaagtccctggacgccgccgacaaggtctacttcatggtgagcgcggactgccggcgccggctgcgcccgccggccgacaagggctacttcggcaactgcgtcaccacatgcgtcgccaaggccatctccggcgacctgtcggccggctccgacgacggactagccggtctcgcgcgcgccgccgcggcgatccagagggcgatccgggagggtctggaggtcccgttcggcaactcggagcgctggctcgacggcgccacggcgacgaccccgccggtgaggtcgttcacgaggtcggggtcgtcgcaccggtacatggcgtacgagacggacttcgggtggggcgcgccgagccgcgccgagctggccaccgtgtacggcgaggaggtggtgatgatgctgggcgcggcggacggcggcgtgcaggtgtcagtggtgctccgccgcgcgctcatggatgcgttcgccaccaacttccggcggcagctggtggcgtcgacctga

SEQ ID NO: 13633 - DNA, 1599 bp, Oryza sativa
  Clone ID: TFbOSC400832j.C1.o5.fg
atggcggggagatgcgccggcggcggcgacggcggcggcgagggcatgctggcgcggctgcggagggcggcagccaggcggatcgggctctcctgcgcctccttcttctcccacgccgccacctccccttccccgcctcccaagaccatctcatgctcagcactgaatgcgcctgcagacagcactgatgaagaccaggaaaagctggaggagcccactagcacaagaatggctgacaagaatctctgtgcaatatgtctggagcccctcagcaccggcagcgttgatattgacaatggtgacaggccagcaatcttcacatcacaatgctcccactccttccacttcctatgcatcgcctccaacattcggcacggcaatgttacatgtcccatctgccgtgcacagtggtctcagctgccgcgtgacttgaaggtgccaccattgctgcagaacaaccagtctgacccaatcctccgcatccttgatgacaacatcgcgacatctcgtttcaacagaaggtcatccatccgtgctgcccggtacaacgacgatgatccggttgagccttacaccttgaccgagcatgtggatccatgccttcgcttcgctctgatcccatccccagtggcggctcaccatcatgctctcggacattacccttgtggccgtgtgatgccactgcagcagcattgccagtacagcagctcctccatgctctcaccgccacagattgcttcaccaagtgggcagaggcgcgcttacctctccgtcagtctcgcgccacagccagccatggacctagttctggttgccagccctaatgggccacatctcaggctcctgaagcaggcaatggcgctggctgtcttctccatgcgcgcaattgaccggttagccattgtcacaaatgccaccactgcaacccgcgccttccccttgcgccgaatgtcatcccatggaaagcgaatggcattgcaggtcattgaacacctctgctgtgttggtggtactgatcctgtaggggcattgcagaagggcctgaagatactagaggaccgggcgcaccagaacccaagcagttgcattcttcacctgtcagaccatccaatccgaagctgtttcggggtcgacatgaaccgtttcaacatcccggttcaccagttccatgtcggcctcggtttcggggtgcagaatggctttgtgatgcacgagtttgaggagctcttagcgcggttgcttggcggtgtcataagcgacacccagctcaggattggcgagcacggtggagtggtgaggctaggtgagctgaggggtggcgaagagaggaggatcccgcttgacctggtgtcggactgcggcttcatacttgttggctatagctatctggaaggtggaagggaggatcagttcaggacaggcgaagtcgctgtcggtttcgaagagaaaggcgataaccggtactgcggggtcagggatgccggtggtctgagtatcggcggtgagaggaggagcagctgctgcgccgagagatgggactaccttgatccgttcatggcgcggcgatgggcgaagcatttcaatgtgtatagggcctga

SEQ ID NO: 13634 - DNA, 629 bp, Oryza sativa
  Clone ID: TFbOSC900165j.C1.o19.gp
aaagaaagaagcacctcgacattccttctatttactttatacttaaacaaagggaaagcattgcatacttacatttgcatgcgagtatatacatagatagcacggcaaaatcctagttaatccagatcaccctttcttaaatttgagaggagttattaattaatccacatcatctatgagcacacgcggaagaggaggaatcggatccgtgccgcgttgctccgggccctcgccgtcatcgtgggcccggcccatgaccagcacgctcagcaccacgcgcctccccctcatcaccaccctctccccatgcaccatcgccaccaccacctcctcctcctccgcctccgccgccgtcgccggcggcatctcgtgccggcacagcgggcagctgccgtggatccccagccaccgctccacgcactcgccgtggaaccggtgcccgcacggsatctccttcctcctcccgctcccgcacgtctccctggactcctccccgtcgtcgaggcagatcgcgcagtcggacgcctcctcgccgtcgtcatcctcctcctcgacctccctcagcgccgcgatcgatgccctggacgccggggccacgccgccgccaccgtcggcgctggcgctgccgt

SEQ ID NO: 13635 - DNA, 756 bp, Oryza sativa
  Clone ID: TFbOSC900112j.C1.o20.fg
atggaactcccgtggctggatctgcccttcacgctgctgacgctgctgctggcgacgcggctcgcctacgactactacggcgtcgtcgcggccaccttcacggggagcttctcgctccagatcttcctcttctactgcttcgcgcgctggtaccgccacaccatcgccgcccgcgccgccgcagacgccgacggggatggcggcggcggcgcggtggcggatgaggaggcggcgccgcccgtgctgatcccgctgctggagggccggggcggtggaggcgggggcgcgggcgcggcgtcgtcgctggcgaaccggtgcttcgccgtggtgttcatggtgttcgtgccgctggtcatcgtggtgttcgagcggagccaggccgacgtcgtggcgtacgcgctctgcctcgccaacatcctcgtcatggtcgtctggctctcgcccgacgccgccgcggaccccgcgtcggcggccaagtcgttcctccgcctcagcgacgacgaggacgaaggcagctgcagcggcagcggccacggcgccgccgaggacaagtgctgcgtctgcctcgccgggatgcgggaggcgcaggcgctccgcgacctcccccggtgcggtcaccgcttccacgccaagtgcatcggcaagtggctcacggcgcacccgacgtgccccgtctgccgcaccacggccgtgccgccgccggcgccgctgcccgccagcggcgaccatgccgacgacgccatcacccctgtctag

SEQ ID NO: 13636 - DNA, 504 bp, Oryza sativa
  Clone ID: TFbOSC900112j.C1.o18.fg
atgctgtacctcgccggagcacgctgggtgctcctgctcctcgccgcggtcacggtcctcctctgcctccagctatcggccagggacaacgccgtcgatggcgccgccgccgccgccgctgccgcaggcccagctcaaacagctgatctcccgctgcaacagccggcggcgctcccgcgcgaggcgcccgcagaaggtgatctgcgtgggcttggcgcgtcgtcgtcgccggtcttcgtcgtcgccgtcctgccggcgtacgcgtggaggaagaaggccgccgtcgacggcgacgacggggacggcgagtgcgcgatctgcctcggcgaggtgcggcgagggcaggtggtgaagcagctgccggcgtgcacgcacctgttccacgcgaggtgcatcgacaagtggctgatcacgtcgcaggggacttgcccggtgtgccggactccggtggactccgccgccgccgccctgcaagccgtgagagttgccgatcagccaccgtag

SEQ ID NO: 13637 - DNA, 1686 bp, Oryza sativa
  Clone ID: TFbOSC401716j.C1.o92.fg
atggacgccgatgaggccgcggggagtagcaggaggatggatctgaacctctaccttggcctcccacgcgccccgcgcccgcgccgctccgacctcggctccgacctcgccctcagcaccccgatgccctcctccccgtccttctccgcagcctccgtcgacgcgccgccgccaccgcccgagctgtcgcatcccccgtactccccctctcacgccgacctttcccctccgctgcaggaggtctactccctgtacaaccccgacgacccgcctgcttccgagacgcacctgccgccgtatgcgccgcctccggctccggtggtctcggagctccctgacgacctcgagtttggcctccaccccccgccgccgctggtgcgtgccagcgaactgctaggttgggaggaccggccgtcttcgtcgacggcatcgtcctctttcctccctgacaccgcagcccgttactggcggcttctcgagcagactggaagcagatggctccgtgcgaggcggtttaggtcggaccttccgccactcagttctgaagcttacccagctgggcgtgatgctgccgcagtcccagtgctgcagcatgaaccgatgaatgatactgttgaacataataaggtagctgccgatggcgcggaagtaggcgcctccgaggaatcggaggagcagggcaggagcgctgccacatttgagtgtaatatatgcttcgatatggccagcgagccggtggtcacctcttgtggccatctcttctgctggccttgcttgtaccaatggctcaatgtttattccaatcacaaggaatgcccagtctgcaaaggcgaggtgactgaggcgaatattactccgatctatgggagagggaattcatgtttggatgccgagaaggctgtggaaggtgggaaacaaacaggtcctactatcccaccaagaccacatggaaatcggctcgaaagcttcaggcagcagtttcaccatttgcgaccgatctcaagaaggcttggtgaggctcatgggttattgtcatcatggaggcgccttctggaccaacagattatgaatactgcgagtaggtttgaaggtccgcctgaatcagctgtgcaggaaatggttgacactgctcacgctcagcacaccagtcgcctaagtagattggcgtcaaggatgagagcaagacggttgctgagagaagcagacaaccctaaccctcccgatggcggatccacttcccctgacagtggtttgatcagaaacaatgcatcggatccatccagaaatggtccgagctcattattaccagatggaattgactggttgcgtggacttacccttcttgggtatgaagacacggaaagatttgcatctgccatgagtgattttagaaggataactggaccaagccaatatggtgcatcggcttcatcatcgaatcctccaaatctcgagtcaacatttgacagaactcatgttgttgcagcaccttctgcagaccaagcatctaactcaagcactgctgcagtgatacagggggatgctggtatctctgagagtgcaggagaaccaagtaacgcggggtcatcaagatccctgaggaggagagggaggagcagtgccctgggttctttggatgctgatggcgggggcctccaacggaacaagaggcgaaggataaactga

SEQ ID NO: 13638 - DNA, 600 bp, Oryza sativa
  Clone ID: TFbOSC405090j.C1.o7.fg
atgtcgtcgacggcggcgggcggcgcgccggggccggcggcgcagcgtcatggcggcggcggcggtggaggggggtgctgcagctcaggcgtgacgctggagctcgtcggcgcgttcacggcggtgtgcctggtgctgtacggggtgatactctacttcaactacctgtacgtgcggtggagcggccgcgacggcgtgcaccggacttcgggcggcggcggcggcggagggcgtggagcggcggcgaggaagaggggcggcggcggcggcctcgacaaggcggcgctggcggccattccggtgttcaggttcaaggcgtcggcgtcggcggcggcgctcggcggcggcgaggcggagtgcgcggtgtgcctgagcggcatgcaggacggcgacgcggtgcgcgcgctgcccgggtgcggccacgccttccacgccggctgcgtcgacgcctggctccgcgcccacggcacctgccccgtttgccgcgcgcgccccgccgtgccgcctcctccgccggcgaaaccaccctgcctgaaggcgccggagcccgccgccgccgccgccggccggcagccggtcgacctggagagccatgtatag

SEQ ID NO: 13639 - DNA, 2370 bp, Oryza sativa
  Clone ID: TFbOSC401785j.C1.o3.fg
atggatgccgcagctcttcagtatgagaaccagaagctggtgcagcaattggaggcacagaagtccaaaatgcgtgcattggaaggcaagttcaaggagctgagggatgagcaatgttcttacgacaatacattgatttgtttgaataaaatgtggaatcagctgattgatgatttagtgctgcttggggttcgagctggtggggatttaaacggtttgcaagcgcttgatcatgaagagatgtcagaagaatctcttgagtcatgtccttctgaggagatatttctcttcagactcttgaattccaggaatttcagaaataatgatgacagtagcctgtcaaaattagttgaggaagctcttgccttgcgctattcaacaacagttactctgatgaagtccctgcaagaggcttttgctgtacagcaggctagaagtgaatctttatcattagctttaaatggacagaactccagtgaagacgttattgtggcccttgaaaaccataatgattacttgaaagaagtggttgacaatttacgtcaagctgtgtctatcatcaacaggaagcacgaaaagtatctggatgagattgaggctttcaaaaacaatcaatcaagagaactacatgaagtaaagtgtctttcaggtgagctagaggaaagcatggcagagcttgaggaaagccgtcgaaagttggctgttctccagttgcaaacgggtggaggctcactgatgaacacatctgctcctaacggtgtgaacggtagtgtttcaactgataaatcttcagacaagggtatgggctggcgagatctgaaagatgctgttgaggaggctaagactcttgctgcaaaccgcctatttgaactccatgagactcaagaggataatctgatactatccaagcagttggaagatattcaggatcaattaaaagatgagaactatattgttacatcaaaaccatatacgattctcagtgaccagttacaccatctgaatgctgagatagagcgatacagggggttagttgaagtgctacaggccaaaattgaggacctggaacatgaaatccagaaacttatggctgaaaagaatgatcttgagatcaaggctgaggaagccttgcaagattcagggaaaaaagacttcaaggacgagattcatgttatggctgcatcactctccaaagagatggaattgttggacaatcaaatgaatagatccaaggatgcggcttctgaagcacttgcactacgtgaggaagctgactatttaagaactttgctagctaagaagattgagacactggaccaggaaaagcaggagttacaatttatagtggatatgctcggtaaagaatgttctgagtcgagggcaatttcagagattgaagaatcagaaaaccgagctcgcaagcaagctgaatatttgagaaaatgtttagaagagcataatcttgaacttcgagtaaaagcagcaaatgaagcggaaactgcatgccaacaaaggctttcaattgctgaagcagaactggaagacttaagggccaaagtggatgcatcggaaagagatgttatgaaactcaaggagtcaataagaattaaagaagctgaagtagatggccatatttctgaaattgagacaattggtcaagcatatgaagacatgcaaacccaaaatcagcaccttcttcaacaggttgctgatagagatgattttaacataaagctagtatcagatagtgtaaagatgaagcaagcctatggttcccttcttgctgaaaagaatatgctacagaagcaacttcagcatgtcaacagttcactggagtcatctaaactaaaaatcaccagtggtgaagagcagatgaagacctatgtagcacaagctatgaaatcttcttcagagaataggcatcttgcaattagccttgaaaggactatgctggaggtatcagatgcagagaaggagctcaagtggcttcggtccgctactggatctgctgagaaagaatatgagataaatcagaaaaaaatagctgagctaaaaatggagctagagcgtgagagaaatgagaggataaagcttgaggaagaatacgaagaggtgaaaaacgaagtcagtgagctaacctcagaaactgaagagactactatacagaagctccaagatgaaataaaagaatgcaaggctattctcaagtgtggggtgtgcttcgaccggccgaaagaggtcgtgatcaccaaatgcttccacttattctgctcgccatgtatccagaggaaccttgagatccgccaccgcaaatgcccaggttgtggcaccccctttggacagagtgacgttcgggaggtgaagatctga

SEQ ID NO: 13640 - DNA, 1380 bp, Oryza sativa
  Clone ID: TFbOSC422293j.C1.o1.fg
atgcttgcaaagccagaatcagtggacgctgttcaacaatccattaccacttacaaggccaaaattgaggacctggaacatgaaatccagaaacttatggctgaaaagaatgatcttgagatcaaggctgaggaagccttgcaagattcagggaaaaaagacttcaaggacgagattcatgttatggctgcatcactctccaaagagatggaattgttggacaatcaaatgaatagatccaaggatgcggcttctgaagcacttgcactacgtgaggaagctgactatttaagaactttgctagctaagaagattgagacactggaccaggaaaagcaggagttacaatttatagtggatatgctcggtaaagaatgttctgagtcgagggcaatttcagagattgaagaatcagaaaaccgagctcgcaagcaagctgaatatttgagaaaatgtttagaagagcataatcttgaacttcgagtaaaagcagcaaatgaagcggaaactgcatgccaacaaaggctttcaattgctgaagcagaactggaagacttaagggccaaagtggatgcatcggaaagagatgttatgaaactcaaggagtcaataagaattaaagaagctgaagtagatggccatatttctgaaattgagacaattggtcaagcatatgaagacatgcaaacccaaaatcagcaccttcttcaacaggttgctgatagagatgattttaacataaagctagtatcagatagtgtaaagatgaagcaagcctatggttcccttcttgctgaaaagaatatgctacagaagcaacttcagcatgtcaacagttcactggagtcatctaaactaaaaatcaccagtggtgaagagcagatgaagacctatgtagcacaagctatgaaatcttcttcagagaataggcatcttgcaattagccttgaaaggactatgctggaggtatcagatgcagagaaggagctcaagtggcttcggtccgctactggatctgctgagaaagaatatgagataaatcagaaaaaaatagctgagctaaaaatggagctagagcgtgagagaaatgagaggataaagcttgaggaagaatacgaagaggtgaaaaacgaagtcagtgagctaacctcagaaactgaagagactactatacagaagctccaagatgaaataaaagaatgcaaggctattctcaagtgtggggtgtgcttcgaccggccgaaagaggtcgtgatcaccaaatgcttccacttattctgctcgccatgtatccagaggaaccttgagatccgccaccgcaaatgcccaggttgtggcaccccctttggacagagtgacgttcgggaggtgaagatctga

SEQ ID NO: 13641 - DNA, 318 bp, Oryza sativa
  Clone ID: TFbOSC900044j.C1.o9.gm
atgggggtggtggagaagaccgatgcgagcaaccctgtgttcatcggagagatccgagtcggaggcgagctgagcaaggccatccaaggcctgcgtgaggtgacggcggccggcgcgagggaggaggagtgcgccgtttgcttgcaggatttcgtggcggaggagaagctgaggatgatgccgtgctcccacaccttccaccagcgctgcatcttcgactggctccggctcagctgcatctgccctctctgccgccgcgctctacccacacagcactacagcaggaggatgacgacaagcttgggtgcccggagctag

SEQ ID NO: 13642 - DNA, 594 bp, Oryza sativa
  Clone ID: TFbOSC400283j.C1.o28.fg
atggagaaggggggattcatcgcaatattcgtcgcctttgggctcatcaacctcggcttgcacttgtacgagagggcgccggggtggttggtgtggatgctcggcggcgtcaccacgctggaccgcgcgctgggcgactgctcgatgtgccggtacggcatggtggccggcgacgtcgtccgcacgctctcctgcggccacgtcttccacaaggactgcgactacagcgtcgacaaatggctccgcgagcacggcctgtcctgcccggaatgccgcaagaaggctcgcagcgttcgcgtgctgccgtggagagcgcggccgcagcagccgttgccggaggagcagaacccgccgccacaggagacgtctgcgtcgtcgtcgtcgtcgtcatcgacacacgtcaggattgctccggaggagccgggcgacctcgacctggaggctcaggaccagctgctaccgcccccggcgacaggttcgcccaagggcccggaggagcagcacccaccgcggccggcggcggcgacgtcgtcgagctccgccgacacctcgagtttggaggagccacttctgcggccatctgcgtcgccatga

SEQ ID NO: 13643 - DNA, 1038 bp, Oryza sativa
  Clone ID: TFbOSC400555j.C1.o10.fg
atggcctcatggccgacatcatgtaccaaggtgtacgagatcattcagttttcgcgctgcaaggaggaggcgagcgcaacatcaagcatcatcgaccacaggacggccaaagtcggcagacgagatgacggcccgaacatgtcaaaggtgctaagagctacaatacctgagaattcagttagtggatcatcagttcgaggaaagctgcgagaaatggagatggacttggcagtcgagcagtacggcagtataggtgcgtcctccatattaagtactctctccgtcccagaatatagcaacctagcatgggatgagacctatcctaagaccatgttatctgctctctctgcaacaaagaacaggatgtacaacaggattgctccaattgtggggcatgcttgggtaaatatttctgcgcaaaatgcaacttttatgatgacgatgcaagttgtgctaaatatgcattcctgtgacggagtaatgaaatatgagccctttttgataaatctcaccatcacattttacagaactggtggtgcagagaacttctttcactgtgacaaatgcggatgctgctacagctatgtgctgaaggattcccatcattgtgtggaaagagcaatgcaccataactgccctgtatgcttcgagtatctatttgactcaacaaaagacatcagtgcactgcactgcggacacacgatccatctggaatgcctatacgagatgagatcccatcaacaattctcttgcccggtctgcctgaggtctgcttgtgacatgtcccatgcatggcaaaagcttgatcaagagaacaccatccaaataactcttcactcaggttgcagcatcgccgatgccagtgatctatcagaagaaaatgatatggatcctatgcaacgactgtgggacgacatcgaacgtgcaattccacatattgggacacaagtgccccggatgcagctcttacaacacccggcagacaagagccgcccctgctgccgcgtgctccagagtctgaattctgaagaacagtga

SEQ ID NO: 13644 - DNA, 1248 bp, Oryza sativa
  Clone ID: TFbOSC419721j.C1.o5.fg
atgccgctccaccaccgccgggcgctgcactccaacgactgcgacgacggcggctacggctgctcctcgtggccgctgtcccctcctcctccgagcgtcatccttactcccttcgcttccccttcgccggcgccctgggcttgcccgcccgcttttcctgccccgtcgccgtctcctctccatggcgccgcggggggcaggagggatcagggaggataccacggctccccaccaggcggtggcggtgatgcggacgagcaccgccgacgcatcatcaaccttatcgtcgtcggcgccgcggcgctcgcgttcctctccatgatcctcctcgtcgtgatcgtcgccgtccggcggcggaggctgcggcggcggcggcagaggcagcaggcgctcctcgcccccgcggcgccggccgacgcggtggcggtgaacgtcgaggacggcggggatgacgatgcggagggagggggaggaggaggaggaggaggaggagtggtgcaccacatctggtacatccggaccgtcgggctcgacgaggcggcgatcgattcgatcgccgcgacgcggtaccgcgcgggcgctgggctcctcggcgccgccgactgctccgtctgcctcggcgagttccaggacggcgagctggtgcgccttctccccaagtgcggccacgcgttccacgtcccctgcatcgacacgtggctccgcgcccacgtcaactgcccgctctgccgctccgacgtgctaggccccgccgccacggccacggagtccggtggcggcgacaccggctccatgccacaagctgatccagtcgcaaacaccatagccgcagcccagcaagcggctgcgccgggcgatgcaatcttggaacgccaagaagaagaagaggaagcagaacaggaggaccaaggagcgccgccgcacatggaggaaaaccggcaagagcaatccagctcaccggatccattgccgccgccgcgcaacgtgcggcgcgcggcttccatggacgcggcgatcgtgtcgaccgccgcagaggtcgcggcgctagagcggctgccggaggcggctcctgaagaggagcagagcggcggcggcggcggcggcgacaagcgcggcggggctcctggcgcgtcttgcctgaaggtctcgagctccggccgcctgagcaacctcggcgccgccgagaggctcccgaggtcgttcttctcgcggcattgccgtgcccggagctcggtgctcccgctgtga

SEQ ID NO: 13645 - DNA, 1329 bp, Oryza sativa
  Clone ID: TFbOSC401685j.C1.o93.fg
atggttcaacccaataatgagcaactcaaccaacctctgcctttaggtcagaagttatttgtgcatgctggaaatgatgcagcccttaaaattggcccttcataccatgggaatgtggcaattagatcgaatgatcttccatcttcaagtcgagtggcacaatattcaggtcatagagttaaaaacacaggaaccttacataactcctatgttcactatcctgctggaagctctggtggccatgtatcctacaatcctcaaactgaacctgttataacttatccacatagatctgagggagaatttgctcgagggagttcccaaatcgacaacagaactgctgcagtgaaacgaaaaaatcctgtcatttatccagagtatagcatcaatggtgatggttattgtgccggtagctcatcaagtacccagttctctaattatccacagccagctccattttctgagtccttgcatcgtcaaatgcctccaagtgttggcccaattaattggaatgaccagagcttgcacatgtatttaaatgattatgtaggtgcctctggaatgcactctggagaaatgccttacactatgggaagcagcaactcatctgttcctgtcccaactttacaaggctcttcaagcagtgcaatatttgccagtggtgtctttgcacctaggcatgttcatggtgacactgttcctagctacattcatctgccttctgtagcatcctctagctctacagcgattccccatgaggtgatcattccgagctaccaacctgctacctctgcaactacctcaacacccatgagggccagtcagccattacctgtcagagctgttgcatcttctagacatgcaaggaatgtactcatagggcatgctaacagcggaaggaacagaagggcgagaagctcatactatggtattcagcctttgatgattgatgcacagcaattgataatgatgcaacaatttgctctccgcgaatcaagagaagcacaagacccccacagggccatgagactggacattgacaatatgagttatgaggacctgctggctttgggagaatctattggtaatgtctgcacaggcttggtggacgagaaaatctcaggttgtgtgagagaagtgatctattgcagttctgatgaacagcaaaatgatcaagatgatgggaaatgtgcaatttgtctggaggaatacaaagacaacagtttgctgggaatactgaaatgcaatcacgacttccacaccgactgcgtcaagaagtggttgaaggagaagaactcatgcccaatttgcaagtcggctgctgcatag

SEQ ID NO: 13646 - DNA, 579 bp, Oryza sativa
  Clone ID: TFbOSC400860j.C1.o33.fg
atggcggccaggaagcttctagagcagccgggcaccgccgcgccgccggtgctgggcggctccatcgccgacgacagggacatcgtcatcatcctcgcgtcgctcctctgcgcgctcatctgcgtgctcggcatcggcctcgtcgcgcgctgcgcgtgctcccgccgcggcggcggcggccccgacgcggccgccgccaacaagggcgtcaagaagtccgtgctccgcgcgatccccaccgtcgagtacgtctcccccggaggcggcggcaaggggaaggaggaggaggaggcggcggcggaggagggggagcagtccgagtgcgccatctgcctctccgacttcgagcacggcgacgccatgcgcgtgctcccccagtgcggccacgcgttccacgccgcctgcatcgacaagtggctgcgcgggcactcctcctgcccctcctgccgccggatcctcgtcctccagcttccccaaggcgagcggtgccagcgctgcggcgcgcggccagagccagccgccgcctccgcggtctggaagccgacacactacagcgaggtcccgcccttcttgccgtag

SEQ ID NO: 13647 - DNA, 1164 bp, Oryza sativa
  Clone ID: TFbOSC20771j.C1.o9.gm
atgcttccgggggtggagctggcgaggcggcggcgggtgcactaccacggcgacggggcggcggcgggggcagggtttggggagcaccaccacgggcactacaactacttccaccagcagcaccaccgtcaggcggtggcgagcgcggaggcgggggcgggcgcagggggcgaggtgagccccgcggtggcggcgcgcatccggctcgaggagaagctgcggggcgccgcggccgcgccctcgtcgtctctctcgagacaacagaacaaccagcaagagcagcagattcagctgcccactgaacccaggcctactcccaaacattcgatgaccatgctggaggcgccatcaacaagaaaagccccccgccgcgagatgaggaggacactttccaaggccgatctctgcgctgtgtgcctcgacgaagtgcgggagcgacaccagcgggtcaccaggctaccctgctcccacaagtaccactcggagtgcgtcctcccctggctggccatccaaccagactgcccctgctgcaggacgcaggccatgatcgccatgctgccagatggagcaggagcacaaaatggagatgggagtaggtgcagcaaggtgaggtgcgggatggggagctgcagcgagtcgagcgactacgtgttcgggttcgcgtgcaggtgcaaccccgggtggagccgctaccacctcggcaacctgcagttccccttcctcccatgcaccatcaactactcgtgccagaacgggtcgtcgtcgccgtcgccgtcgccgccaccgccacctcctccgccgccggcgatgccgtcgctgacgaacctctccatctacgacccttgcctcctccagtactgcggcgacggcggcagctgcgagaggtcgtcggagttcggccaccgctgcgcctgccacgacggcttccagaaccttctcaacgacacctcctacccttgctaccggcagtgttcgcttgggtcggactgctccggcctggggatcagcatgttcaacgggtcgcagccggggacggcgccgccggcgccgttctcgttcaccgtcaagaagtccggcgccgccgcctcctcccttctgccggccggcggcggcgtgctgctccacctcctcctcgtgctggtctcctccttcatgataggatga

SEQ ID NO: 13648 - DNA, 906 bp, Oryza sativa
  Clone ID: TFbOSC900339j.C1.o2.gm
atggccagccgctcgccgccgcctccgccgccgccgccgccattcccggacttagagacatgggattacttctttggccagtacgaccacccctcgtcgccgtcttcctcggccacggcgatgccgcatctgccactctcccgcgtatcgtcgtcgtcatcgttcgtctccacagagctggaactgccgccgcctccacccccgccgctgccgacgcttccggcaaagccactactccggcggcgcgtagcctcgccgtcgtcatcgtccttttccacagagctactgccgccgccgccgccgctgctacggcgggaaccctcgtcgtcgtcgtcgtccttctccactgagctgctgctgctgccgcctcctcctccgccgccgccgtttctctcctcggattacttcatctcctccgatcctgacacgccgccgcacgccggtggtccaccgacgtcttccatccacgactcctccttcgtgtcaggcccatcgtcgtctcgaccggcgctggccacggtgatcactgtcaccgtctccgacgacgcggcggcggcggcggcctgcgccgtctgcaccgacgccctccagctcgcgtcgccggcgtccaggctcccgtgcggccacctgtaccacgcccactgcatcgcgcagtggctgtcgctgcgaaacacctgcccggtctgccgccgcagcgtcccgatgcgtactgaggagaccgcgccgccatggtcgccgccgacggagaccgaccaagaggccgtgccatcgccgccgccgacgacgacgactgcgaccgatcaccggcggcggtctctgccgggagaacgccggatcaggaggatttgccgcaggttgcttaattacatggaaatcagccgtcagcggcagcaacacactgattga

SEQ ID NO: 13649 - DNA, 627 bp, Oryza sativa
  Clone ID: TFbOSC101188j.C1.o17.fg
atgagcggcggcggcgcgccgcctggggcgccggggatgatgacgccgggcgacggcaactccgtcggcatgttcagctccgaccgcatcggcgggttcggctacggcgtcggcgtgtccgtcgggatcctcctcctcatcaccaccatcacgctcgcgtcctacttctgcacgcgcgcgcccgtcaccgcggccgatgcagcggcggcggcgggatcgtcgcggcggcaccgcggtgggggtgggggcggcggcggcggcggcggcggggccgggcacgaacacgacgacgtcgagctcggcatcgacgaggcgacgctcaaggggtacccggaggtggtgtacggccagccgaggaaggaggcggcgaaggcggcgtcggcggcggcgacgaagaagggcggcgcaaccacgtgcagctgctgctcgatctgcctcgacaactacggcgacggcgacgtgctccggatgctgccggagtgcggccacctgttccaccgggagtgcgtcgacccgtggctccggcagcatccgacctgccccgtctgccggacgtcgccgctgccgagccccttgccgacgccgctcgccgaggtcacgccgctggcaatggcgaggccgtcatga

SEQ ID NO: 13650 - DNA, 438 bp, Oryza sativa
  Clone ID: TFbOSC964j.C1.o1.fg
atgctgttcttgaaagagctgcccatctggcaggcgttcgggttctccttgctcacaggagccctcgccggcagcaccctgtacgccgtgtgcgtcgtcctcctctgctgtgtcgatcgccaacgtcgacatgccggtgcgccgccgcccgatccgaagatctggctgccggaccacacgcaccatcgccggcagcgggatgaatcgtcggagtgcagcatatgcctgggggagttggaggagggggagaggtgctgcacgctggtggcgtgcaggcacgagttccacaaggaatgcatctaccggtggctcgccaaccacaacacctgccctctctgccgccacatgcccctcccccctgcttcatcaccaccacctgcgccgccgcctcaccatgcttctcctccttccaatgtaccgcctgctgctcatgtttag

SEQ ID NO: 13651 - DNA, 1368 bp, Oryza sativa
  Clone ID: TFbOSC401457j.C1.o8.fg
atggcggcggagtcgtcggctgctgctgctgcgggcgggggcgagaggaggggcccgatggatctgaacctgtatctcggcctccctccgctgccgccgcctccgggaaggctggatgtcgccgccgattacccgtcgctgctgctgaactccgccgccacggtggcgaacgagcaaaggggctcggtggtggtggcggcaccgcctccggcggcggcggcgtactcgccgtcgaacgcgctgtcagcgccggagcaggtgctggtagatcctgttgcagcgtggcttgttgatcccggtgagcagcagccggtgccgccgctcgagacgccatcgtacatggccagggcctcgtcgacgctgccacagatttttgcttgtgcagcgttggaaatgcttgtgcagaccggtggagcaatcccacctactggtcttataaggggagcagagattgctgctgcaagccgccctatgacgccggagaatcggctgcggaggttgatccaggtgagcgatcaacacggcgtcgggaatgggagggcggggactgggccagtgagccgcagccgacgggcgaatagcccggaagccgataatctggcgcgggccatccagaggtctcataattctcttgaggcatcaaggaggcagatgcttgatggtgatggcagtgatgccaccaagaaggatgacggttgcggatgcaacggcagcttcgaatgcaatatctgctttgaatcagctaaagatcctgtggttaccccttgtggccacctcttctgctggccttgcatataccagtggcttcatggacattcagagcactctgattgccctgtctgcaagggcgaggtgctcgaagtaaacgtcacaccgatttatggaagaggaggtggcgaggagaactcctccagaaatgatatccaaatccctcccaggccgagtgcgcagaggaccgagagcttgaggcagcagctgcaaaggccagacacaagaggaggcattgcaaacatggtgaggcggttgatgcaaaaccaagatatagtggtaggccaggcggcttcatctgcaccccggccaaggggtaggggtcgaaggcaggcaaaacaagatgcgccttctgcaccagcaacacagcagcaggtggtcaatgctgatgctgggagtggccatcaggctcctttgccccctcctgatgctaatggtgctgccccggctgctgctgtcgctccccaacagtcatcatctgtggagcaagcgtcgacttctagcaccgtgggtgttatagcgggagggccagcacaaggtaggaggtcaagagtttctgaatccacccctgcaaggaggacaaggaggaggcatcagtag

SEQ ID NO: 13652 - DNA, 744 bp, Oryza sativa
  Clone ID: TFbOSC900031j.C1.o15.fg
atggagctcgacgacgcgtctcgccacggattcggcaggatgggatttggatgcaagcactacaggaggaggtgcaggatccgggcgccgtgctgcaacgacgtcttccactgccgccattgccacaacgagtccacggttatctgtctcgtctgtgacaccgaacagccggttgcgcaagtgtgctacaactgcggcgtttgcatgggcgagtacttctgcagcgcgtgcaaattcttcgacgacgacgtgagatgccgatgctgcttgctttgcttctgctggatctggttgacagggaacacttccactgccaagattgcggcatctgcaggatcatgctactcggtcagcctgcgcgacaagcactgctgcatcgagaactccatgaagaacaactgccccatctgttacgagtatctgtttgactctctaagggagacgtccgtgctcagatgtgggcacacgatgcacctgcaatgcttccacgagatgctgaagcacgacaagttctcttgtcccatatgctcgatgcctatctttgacatggacaagttcttgagggctttggacgctgagattgaagcaaatatgctgcacatagattacatgggaaagggatggatcgtgtgcaacgactgcagggacacgacgcaggtgtacgcgagggtggcagggcacaagtgctgccattgccagtctcacaacacctgcagggtggctgccccggtgctccctgcttaa

SEQ ID NO: 13653 - DNA, 1335 bp, Oryza sativa
  Clone ID: TFbOSC400897j.C1.o19.fg
atggacacgtcggcgtccacctcgccgccgccgccgcgctctgtgctcagcaccatcgaggacaagatgagcccgggcgtcctcctcatcatcgccatcctcgccgtcgtcttcttcctcttcggcttgctcaacctgctgatccagaacctgctccggatgcgccgggcgcggcggcggcggcggcgcgtgggcgacggcggcggcggcgtcggcatgggcagcccgacggcgttccagggccagctccagcagctgttccacctccacgacgccggcgtcgaccagaccttcatcgacgcgctccccgtcttcgtctaccgcgccgtcgtcggcgccgggctccgcaaggacgacccgttcgactgcgccgtgtgcctgtgcgagttcgccggcgacgacaagctccgcctcctcccgacgtgcggccacgcgttccacgtgccctgcatcgacgcctggctgctgtcgcactccacgtgccccatctgccgcggcagcgtcctcgccgccgccgccgccgccgacgacgacgacgactcgtcggcgtccaccccggtagcgcggcgcgtgctcgactcggagagcctcggcgagacgttcgccaacaatggaggtggggacagcgaggggtcttctcccaaggcggcggcggcggaggaggaggaggtcgtcgaggtgaagcttggcaagctcaagtgcatcgacggcaatggcaatgccggcgacctcgccgtcgtcaaaggcaccaccaccagcaacgatggcgacatcggcggcggcggcaggggagatcttggacagagacggtgcttctccatgggatcctacgagtacgtcatggacgagcacgccgcgctccgcgtcgccgtcaggacgcccaagcggaggccgccggcgaggtcgaggtctcgccgccggctcgcgctgtcggagtgcgacttcgcgggctccgcctccaagaagggcgcgtgggaagcggcggtgatagaggccgcgtcggcggacgccgcggcggcgaggctgaacagggacagcttctccgtgtccaagatctggatgacgtcagccactaggaaggaagatgtccggacggcggcggaattggccggcggagggaggcgtgcggcgtcgttccggtggccggcgatggccgaggccagcaagaagcatggcgggatcaacgacgagcgccgcgacgtcgaggccggcggcaatggcgactcgtctctcgccgacgagcggccgtcgttggcgaggacggcgctgcagtacatcgtcggcggcggcggcggcgggcggcagcagagcagccgagttggaagccattcttga

SEQ ID NO: 13654 - DNA, 618 bp, Oryza sativa
  Clone ID: TFbOSC21837j.C1.o18.fg
atggcgtcgtcgtcgtcgtcgtcgtttgccatggacgacggagaagcttacctccgcgacatgacggcgatcaccgagttgctcgacggcgacatgacggcgatcaccgagtcgctcgacggcgacatgacggcgatcgccgagttgctagaccaggcccgttcctacagcttcgcggaccttcagtcacatgatccgccggcggcggcggcggcggccgtcaacgacgacgacgacaatgtatccgggctgatgatggcgatgatgaagacggtggatgcgccggccggcggcggcgacggcggcgactgcccgatatgcctgaacaacggcggcggcgaggagtggaaggagacggcgtgcgggcaccggttccacgcgcggtgcgtggcgaggtgggcgcgggtggggaggaaggggatgagctgcccgatgtgccggcgagacatgatgtcgccggcggtggacttgctggtgagggatatccgggccttgtacggcgacgaggagcttagtgatgtgcgcgagctgctcgaggacggtctccggcagctcgagattagcagctcgatcgccggcggtgcggaagaagcagcatatagagcttcccaggcttaa

SEQ ID NO: 13655 - DNA, 1680 bp, Oryza sativa
  Clone ID: TFbOSC418082j.C1.o3.fg
atggcgccagctcgagtccacagcaatggccgcctcctcatgcttctcctcctgctcgccgtcgccggctttgcggcggcgcagccgagccaggacaatcctccggcgggctactacgcgaccaacttcagcccgtccatggccatcgtcatcgtcgtcctcatcgccgccttcttcttcctcggcttcttctccatctacgtccgccactgctacggcggccgcggcgactactcgaccaccccgctgccccggtccggcgccgcgcggtcgcggcggcagcgcgggctcgaccagtccgtgctcgcgacgttcccgaccatggcgtacgccgacgtgaaggcgcacaagtccgtcaagggcgcgctcgagtgcgccgtctgcatcagcgagttcgacgacgacgagacgctgcggctgctgcccaagtgctcccacgtcttccaccaggactgcatcgacacgtggctcgcgtcgcacgccacctgcccggtctgccgcgccaacctcgtcgacggcgcgtccgagccggcgagcgatgtcgccgccgagctaccgacggcgcccgctccgcgcccggaaggcgcgacgccgtccgaggcagcagcgccagggggggaggcgccggcggcggcggcggcggcggcggtggtgatcgacgtggaggagaccgaggaagagaggatcataagagaggaggcggccgagctaacgcgcatcggcagcctgaagcgcgcgctgcgctcgaagtccggccgcgcgcccgccgcgcgtttcccgcgctcgcattcgacggggcactcgctctcctcctccgccgcggcgagcgccggcgccgagaggttcacgctgcggctgcccgagcacgtgctccgggaggtcatcgcggcggggcagctccagcgaacgacgagcctcgtggcgttccgcgccggccgccaggggagcacgcgccgtggcctcaggtcgggaggcggcggcggcggcggtgaaggcagcagccgcgccgggagaagcgtccggctcggccagtctggacggtggccgtcgttcctgccgcggacgttctcggcgaggctgccggcgtggggatcaaggtcgacgcggaggggcgacggcgacgggtccagcaagggcggcaggactgccggctccggcgccggcgccggcggcaacacgacaacatgctcgccgcggatctcctcaccgtgctcgccgcggacctccccaccagtgccgccgcacctctttgtcatggaatgctacctcggcggcgccgacgcgtgcgccgagctcaccgagaacggccaactgctagtgatggcaaagaggctgggggaggaggggctgatgcaggagttcgctagtagggtccggctgctcatggacccggcatggacgacgccgtggaggcggccgggaggagaagcggggcacgccgtcgatgcggcggcggaagaggaggaggacgccggccaccgtactgcggcgggatccggcggggacgaggaggacgacgatgctgacaaggaggagaggatcccgtcgggaagagcgggcacggggcacgccgatgctgatgaccaccgggagaagggagagaacaggggaaataaggagaggaggctaacgtggataaccctaacatgtagggcccacggtaactcagccgccacgtag

SEQ ID NO: 13656 - DNA, 1791 bp, Oryza sativa
  Clone ID: TFbOSC403595j.C1.o4.fg
atgcccgccgccgagagctgccactcccgcagcctctcgtggctcgtcaagtcctgcatccccgccgaccccgcccgccacatcgccgtccccgttctttgccccaccccgcaaccgccgcctccctcgtcgccgccggcacccccaatctccaccctccccgacgacctcctcctcgagtgcctcgcccgcgtcccccgcgcctccctccctccgctccccgccgtctcccgccgcttcgccacgctcctcgcctccgacgccttcctccacctccgccgcgcccacgcccacctccgcccctccctcctcgccctctccgtctccgacaacggttgcgtcccgcaggcgctgctccggtttgaatcctccgtgcccgtgctcgaggtcgccccgctgccgttgcccccgaccctgctgcattgcggcggctctgtgttcgcgcatgcccgcgcggtcgtgctgggacgggatgtcttcctcatcggccgcggggcgacgctgcgcgtcgacgcgctcaccggcgccgcccgcgcgtgcgcacccacgctcttcccgcggaagaagttcgccgcggccgccgtgggtgatcggatctacgtcgccggcggatccgcgcgcaccgcggcggtcgaggagtacgacccggaggtcgacgcgtggcgcgtggtcggcgaggccccgcggcggaggtacgggtgcgccggcgcgagtgcgggaggcgtgttctacgtcgccgggggcgtcgcggtgtccggcgagggcgcgcgggcgctcgaggcgcacgtgtgcgccgggtcggtggacgcgctgcacgtcgcgtccggcacctgggcgcgcccccgtgcgctccccggcggcggctgtgtcgtgggggcgtgcggcgtcggtgaccacctgtacgtagtagccagccacgcggtggagctctccttctggaggtggtccggcgccaccggccgtggcggtgacggcagaggctggggcgggtgggtggcgctcgaggcgccgccgatgccgagggggtcggtggggctcggcatggcggtgcgcgtggcgatggctggcctaggaaccaacagggtggcggccgtgctccgccttaaattttgtcacgccattttcaactcatacgccgcacgcatcgcagctcgttcgtgccactatccagctgcaagctccacttcactgcagccgcagtctccatctatcccatttgatttgcccacgctgctgctacgaatgcacgcgtccatctccttcgccctcgcgcccgcatcttcgcccgacgccgcctccttcgcgcccaccgcagcggacgtcggcggcgctgtgtgcctcggctacggcatcgccatcgccgtcggcgtcctcgtcttcatctccaccgtcatgctcgcctcctacatctgcgttcgggccaaggctggagcagctgccgtgctcctcgccgacgacgacggcggcggcgccccggcagcgtccgccgtcgtggtgctaggcctcgacggcccggccatcgacgcgctctaccccaagctcctacacgtcggcgtcggtgacgacgacgacgcgtgcgcgggggcgcagtgcgccatctgcctcggggagttcgtagcaggcgacgcgctccggcgagggcacggctgcgggcaccggttccacgcggagtgcgcggagcggtggctgcgggtgagcgccacctgcccggtgtgccgcgactcgccgctgccgtcgccgatggccacgccgctcgcggaggccgtgcccctcgccgcgcacgctcgatga

SEQ ID NO: 13657 - DNA, 966 bp, Oryza sativa
  Clone ID: TFbOSC414138j.C1.o13.fg
atggcggcggtggcggccgtgttcctggcgttcgtgctctgcttctacatattcgtttgcgccaagaggtacaggggcggcgcgccgccggcggagggcggggtggcggcgaggctgtggttcttgcttggaggtggcggcggcgggggaggcgcggcggggtcaggggacgccgcgtggtgctacgacggcgggctcgacgaggcgtccatggcgaagctgccgtgcagggtggtggggaaaggggaggaggcggtggactgcgcggtgtgcatcacggagctcgccgcgggggagacggcgcgcgtgctgccgcggtgcggccacgggttccacgtcgcgtgcgtcgacatgtggctcaagtcccactccacctgcccgctctgccgctgccccgccgtcgacgagccgccgcccgccgcgccgccgccggtggtggcgccgcccgaggccgacccggagtcccccaacttccccaccaacgtcctcttcttcggctcccaggacgagttgcttcgaattgaaaagaaattagttgacctgggaggtaagatagttgagttagcagcaagcatggttttgcaaagcagttggccaaacaagcagcaaacagcaaagccagcgacttcaaagaactggaggaatggagatagtccagctaatcacttgcaaattactagtagtagtgatttgctgtgtgacgccacaggaaaatatattttttttgtgagaagaaaatttcgctactccgcgttcacaaaatcaaaagattctttcctcattcatatgagattaagttgttgcatggaaatgttccaatttcagtcgcatcctgacacagaaagaatgatcctcgcgatatggggtttgaaactgacatcggctacggacatcaagtacctgctccgttgggtatggactataatcgacacaaaccgagatgagcagctagtagcagaaatgtag

SEQ ID NO: 13658 - DNA, 963 bp, Oryza sativa
  Clone ID: TFbOSC412751j.C1.o3.fg
atggcggcgggggcgacgctgtcggtgctcctcctcgtcgccggcgtggtgctcatgctcgtgctgcacgtcgtcgtcgtcttctgggcgctgcgccggggcgtgttcctgcgcggcgcgttccgggtggaggagcgccgggaccagcgggccgccggcctgacgcccgacgagatcgccgtgcttccctgccacgagcgcaaggaagacggcggtggcggcggcggcggcgagtgcgcggtgtgcctggaggcgttccaggcgggcgaccggtgccgcgtgctgccgaggtgcgagcacgggttccacgcccggtgcgtcgactcgtggctgcgccagagccgcgtgtgccccatctgccgcgccgaggtggaagtgtccggctacgccggcaagccggccgcggcggtggccgaggcaagtcaggcgaccacgctggagatcgttactgaaagattgggaggcacagaacgcctcgaggtctcaaatgtgtgtgaagtccatccgcttgattcggttgatcgcatgaaaggagacaactccaacgtcttcctcgtcgccggcctctcgctggtggtcgtcgtccatgtcctcgtgctcctatgggcgctgtggtggggatacggccgctcgcgcctcgccctcgcccgcgcccgcgtcgtcgggcagcacgacgtggcgcgcggcggcctctcggcggaacaggtcggcgagctgccgtgccacgttgtcaaggagggtgccggcgagtgcgcggtgtgcctggaggcgttccgggcgggcgaccggcgccgggtgctgccgaggtgcgagcacggcttccacgcgcagtgcgtcgactcgtggctgcgcgtgagccgcctgtgccccatctgccgcgccgaggtggccgccagccgcggcaaggaaggtgacgcgccggtggccgaggccgcctccttggagatcgtcgccgaacgatag

SEQ ID NO: 13659 - DNA, 2310 bp, Oryza sativa
  Clone ID: TFbOSC400839j.C1.o11.gm
atgtggccggtcagaccgtgctactctgcaacggctagaaaattagccgttgtagtgctgtcagagggccccatcggcctggccggtcagaccgaggttgagtggccggtcagaccggccttggctcggtcagaccgccatcggctcggtctgaccgactacggctcagtcggctttgtatcggccatcccgagcagcaccatcccggcctccacggggccggctgaacgcctgaacacactgatatactttgcactaggatcacctaggttagatttagtcgggtggttctatttgggattgatgaacgacattgtagatgaaagggagaggggtttagataccgaccggttgaggtgttcgtggaggaagaagcgccggacatcgtcgttgtcgtcgcagcttgacgtggacggcggcgacggtgtgcttgacggcggcggttgtcgttgcagcggtggtcgtgggcaatcccggcgaggtcgtggcgcggcgtgtgacggggacccaccagccattaggctgggcgcccccgatcagggcgcggtcaaggtccgttgtgccgttgggcccgacgggtgggagatctatctaacacacatcaacaaagaaaacgaggacagtcgggacagacagacaatcgacgcgtgcacactgtccgtcaagcctacagctgcgtgcgttctccccagccacgcacgacacgaggttcgcaagtccaacccacgcgccgacgcgagacctactcgaaacacctggacggcccggatcccccgcccgcgcccggtcacggacgccaagacgccatctcgtctcgtccattccaacccctccaaacccaaaccccccaattctgaccgcgcgaaccgcgactcgcgccaccaccagaccagacgacacgacacgctgcgccccaagtcatataccgcccgccgcgacctcgtccaacaaacgcaacgcaaacactcgctcgatcgccacatgccgacgcctcgtcctcgccaccgccaccatgcgctcccgctcgcgctcgcgctcgccgcgccgctgctgctgctagccgcggcggacgggcagccgaacgagtcgagggacaagaacaacggcggcgggggaggtgggttcatggcgcccagcggcggaggcggcggcatgggctctcagtcgccgagcttcagcgcgcccatggtggtgctcctcgtggcgctcatcgcggccttcttcttcatcgggttcttctccatctatatccggcggtgcggcggcgaggcctccacggggccgaccatcccggccgcggcgctggcggcgctgtcgcggcaggagcagcggagccggcggcagcgcgggctcgaccccgccgtggtcgagtcgttccccaccatgaagtacgccgaggcgagggagctccgcgacggcggcaaggacgccgtgctcgagtgcgccgtctgcctcagcgagttcgacgacgacgaggagctccggttgctgcccaagtgcagccacgccttccacccggactgcatcggggagtggctcgccggccacgtcacctgccctgtctgtcggtgcaaccttgcgcccgacgcggcggcggcggaagcgaacgtcgtctccggcgaggtggatggggagcagcaggaggaggaggtggtggtggccatcgacgtggaccgcgagggcgaggaggaggacgaggagaggcggagggaggcgatggagctcgagaggatcggcagccagcgccgcgcggtgcggtcgaggtcggggcggccgctgccgctgccgcggtcgcactcgacgggccactccctcgccacgacgcggctcggcgacgccggcgacctcgagcggttcacgctgcgcctgccggagcacgtgcgcagggagatggtcgccgccgccggcgaggagagcctgcgccgcaccgccgtccgggaaggccgcgtcggcggcggcgcccggagcgcgcggatcgggcggtccgaccggtggccgtcgttcatcgcgaggaccttctcctcgaggatcccgttctggtctgcgtcgaggagggtactcgacgccgcggaggccggagctgacgccgccgccaccaccaccaccacgacgccaacgtcaacggcgaggaccaagcgtgacaagacggccgccgccgcagatggctccgtgagctcagccaagggcagcgtccgcttcgactgtctcggcggcggcggcggcggcggcggcccgagcaacagagtcgtcgccttcgccaacgacgacgaggaggatgacgacgagaagccaatcgcccggcaagtttga

SEQ ID NO: 13660 - DNA, 480 bp, Oryza sativa
  Clone ID: TFbOSC900212j.C1.o9.fg
atgaaggtggccatcgccggcaacgtcgtggtggcggtgctcttcgtcgccgtcatcgtctggcggctcttcttcttcgggggtagagatcgagccggcggcgcggcggcctccgccgccgccgatgcggacggagagtcgtcctccgccgggagctcgccgtgcgcgtcgcctcgggcgggcggcggcctggggagagaggacctcatggcgctgccggtgtacgtgcacggcgcgtcggcggcggcggacggcggcgccaaggcggaggagtgcgcggtgtgcataggcgagctcagggacggcgacaccggccgtctcctgcccaggtgcgggcaccgcttccacgccgagtgcgtcgacaagtggttccggtcgcacgccacatgcccgctctgccgcgccgccgtcgccgccgcggacggcgactccggcggcgagggcgacaccaaggtagcggttgtgcagcaagacgtgtag

SEQ ID NO: 13661 - DNA, 725 bp, Oryza sativa
  Clone ID: TFbOSC410532j.C1.o3.hg
gggctggggctgcgcataacgcggacgtgggcgcacaacgggcgggtcgtggggacactgcgccgggcgcacatcggaaaccagaactcccccccaaaaaaagaaaagacaattctccccccgccggcggattttttgggcccggagcgcggtccctcccggtcggggccgggggcggcaaaacaagggcccccgcccccggcctgccgcagggaacacccccggcccccccgggacacaggacgggaaagggagggcgccacgggcggcggcgccgggaatgcgccggcgcgggcgcgcgtctcctgtcgctcggcgtgcaggcggcggtgatggccgccgcgctcgcgctgttcctccttttcgccgcggcggccgccatcctgctgctccacctcgtcgtcgcggcccgggcgttccggaaccagcgccacggcggggccgggaggagccggtaccgcgtcccggagacctcgtacacgccctcccgcgccggcctctcccccgcggacctccgcttccttccctgcttcgccgcgtccgcctccgcctccgcctcgccggagctatgcgctgtttgccttgaggccgcgtgcgcgggcgagcggtggcgcgcgctgcccgcctgcggccacgcgttccacgccgcctgcgtcgaccggtggctcgccagggcggccgcctgccccgtctgccgcgcctccgtctccgcctccgcgagctga

SEQ ID NO: 13662 - DNA, 1143 bp, Oryza sativa
  Clone ID: TFbOSC401894j.C1.o36.fg
atggcgacgcctcgctccccgagcacccgcggcgacgcgctccttgactcggcgcccctgctcggcgggggcggcggcggcggcggcggccggcgccgagggggcgcgctccgccggccgtcgctccgcggcgcggcgcggctgctgcggcgcggggggcggcgggcgatgcgggagccgtcggtgctggtgcgggaggcggccgcggagcacctcgaggagcggcaggcggactgggcctactcccgccccgtcgtggcgctcgacctgctctggaacctcgctttcatcaccgtcgccgccgtcgtgctcgtgctcagccgtggcgaggactcgcccatgccgctccggacctgggtcgccggctacgccctgcagtgcgtcgtccacatggtctgcgtcgccatcgagtaccggatgcgccgggggcagcgtgacagggccccggcgtccgccgacgaggaaaggggaagtgacgggtcgtcttcatctagcgatgatgatgtcacggaggacgatcgccgtggtagctgcaccgattgcgtcagtattgcaaagcacctggagtcagctaatacaatgttctccttcatatggtggataattggattttattggatatctgctgggggtgaggatgttatccgtgatgcacctcagctttactggctttgcatagtctttctggcatttgacgtgttctttgttgtattctgtgttgctctggcttgcatcattggtattgctgtatgttgctgcctaccttgcattatagctattctctatgcggtttctgatcaggaaggagcgtcagaagatgatattcgccaaattccaagatacaaatttcggagaacagatgaacctgaaaaacaaactgctgatgagacaggaccttttggtggaataatgacagagtgtggcaccaatcaacctattgagaaagtactcgcacctgaagatgcggagtgttgcatttgcctttcggcatatgatgatggtgcagagctgcgtgaacttccttgtgggcaccatttccactgtgcctgcattgataaatggctgcatatcaacgcaacatgccccctgtgcaagttcaatatccggaaaagtggcagtagcagtggaagtgaagaagtatga

SEQ ID NO: 13663 - DNA, 1350 bp, Oryza sativa
  Clone ID: TFbOSC23746j.C1.o3.fg
atggcgcagcagcagaagaagaacgcgcacgtgccgaaattcggcaactgggacaatggcggcaacgtgccgtacaccgtctacttcgagaacgcgcgcaagggcaaggtcgccgccgccggcaagatgttcaaccccaacgaccccgtcgacaacccggaggccttctcctcctccatcgccgcgccatcgccgagccgagcccctcctcctccgccgtcccaccacgagcgcgccccgagcgacgcgccgccgccgccgccgccggccccctacgccggcggctcgccgtaccaccgccacgccgctggtggtggcgagacgccgccggcaagaagaggaggcgggcggacaagcggcggcggcgggtcgtcgtacagcgtcgagcactcgccgtcgccgtcgccgctgcacccctactccgacagcgggagcggcagctacggcggcggcctcgtcgccaactcccgcgccaagggcggcggcggcggcgccccgcgcggcaacgagacaccgacgagggggtcggcggtgccgcggttcggcgactgggactcgaacccggcgtcggcggacggctacacgcacatcttcaacaaggtgagggaggagaagcagaccggccaggccgccgggaagccggcggcggggctcggcaagggcggcgccgccgccgccggccacggcaacgccgccaagcgataccacgacgacgacttcgcctccacggttattccaaatatcataagaatcatgagtactgcaagtactgcacgctctaggaagcgagcccatgatggatccagacaaaaagttgatgttataaacttggaaacaactgctccagtggtgaacactgggagccagcatgaggctctgatccttaggggtacacggacctcacccatcgatgttgaagctctagatgataaaaggaggagcagaaaaattatgaggcgctctgtggctgtagtggatccggagaaggatactggtccgggaggttatggcgttgctggagctatattttcccggggcagaaattttcagggtgctgtacatgttatatgcctttctccagatagggaagaagggaccagcaagccgaaaaatgtggcccaaaccagtacgacgcatgccaaggttgctccaaaggaaccaacctttacctgtcctgtgtgtctgaacaaactggacaagccatccacgacaaattgcggtcatatcttctgcgagaaatgcatccaggcatggctcaaggctcagaagaaatgccctacttgtaggaagagtctagggatcaagagcttccatcgtgtttacctccctactcctgctgattatgattaa

SEQ ID NO: 13664 - DNA, 1398 bp, Oryza sativa
  Clone ID: TFbOSC405088j.C1.o5.gm
atgacgagagcaagccgagcgtcgctgctactgttttgcttcggcgggggagatgatgattacgagtgccgggcgtgctacggggtctccgtggcgtgcgtgtcgctgctcctgttctgcgtgctcgcggcgtcggtcagcgtcaccaaggcctgcgccgtggcggggctcgccgtgctgctgttcggcgtgatcgggtggttcgtgccgctgtgcggcgcggggggcccgcccgcgcgcgccggcgccgccgcggggggcggggggcggggagcgggcgccgcgggggtgacgcggtgcgcgtgccggctcgtcggcgcggcgctgatcgccacgctgccggcgttcgtgttcgagggccccgcggagggcggcgccggcggaggcggcgggagcaagcacggcggcagcgtgctgtgcgcggtgtgcctggaggacgtggcgcgcggcgagacggtgcggcggctgccggcgtgcggccacctcttccacagggactgcgtcgacatgtggctgcactcgcacaccacctgcccgctctgccgctgcgaggtcttgccgcggaaaccggcggcgaaacctgccccgccgccgccggcgcaagccgccgaatcgacgtcggcgtatgcagatcccgatgcgttgccgccgccgcgaatacctcgggccagaaaccttaaaaccggccgcgccgcggggccgacgccgacgccgagagcgcgcacccggcgcgccacgaccgggctgcagatgtttaacggcgaacggcgcccggcggcgagccagcgcggcggggatggtgggtacctcgcgtgctactccgtcgtcatggtctgcgcgtcgctgctgctgctgtcggtgctcgccgccacggtgagcatcgccaaggcgtgcgtgttcgccgcggcggccgcggtgctgttctgcgccgtcggctgcgtctcgcggtggtgcggggatgccggcggggctccggcggcgctgccgacgacagcagcggcggcggaggaggcgcgggcgagggcgcccgcggcggcggcgtgcgcgacgtgcgggctcgtcggcgcggcgatcgacgcgctcccggcgttcgcgtacgcgcgccctgcggccgacgacggcggcggcggcggaagcaagtcggggaggtgcgcgctgtgctcggtgtgcctggaggacgtccaggccggcgagatggtgcggcagctgccggcgtgcaggcacctgttccacgtgggctgcatcgacatgtggctgcactcgcactccacgtgcccgctctgccggtgcaacgtctcgccgccggcgaccatcgtggtgaaagccacagccacgtcgacggccaccgccgcggcggcggcgcagcagctaccggctgacacgttgccgccggtgtga

SEQ ID NO: 13665 - DNA, 552 bp, Oryza sativa
  Clone ID: TFbOSC5323j.C1.o1.fg
atggacaccgaggaggcggttcacctcgtggtcgtcggggtggtggccgtgggggcggtcgtcttcctcctcgccgccgccgcctcgggggcgtgcggttgcgccgccgcgttcccggccgcccggtggaggaagagggcgcaggtgggcgacgacgacgacgatgtcgagagcgcgctcgggggcgccaccacggtcacgacgtacgagcaggcggcggcggcgtcgtcgtcttcgccggcggcaggggcagcggcggagggagcggacacgtgcgcgatctgctgtcaggaatactccggcgccgacaaggtgcggcgggtggtgcggtgcagccatttcttccacgcggggtgcgtcgacggttggctccgggagaagcggaattgcccgctgtgccgcgccgtgctgtcgtcgttgccgccgcttcccaaccctggctgccgccgcggacgagccgccccgccgtgtccgccgccgctgccgccaccgttgtcgtcggctaattacttatcaggattttgcagatctcattttgttttggattattga

SEQ ID NO: 13666 - DNA, 729 bp, Oryza sativa
  Clone ID: TFbOSC18908j.C1.o1.fg
atgttgacctgctcgtctactaacccaagccttgtcgggcgcgccgccggcggcgaggtcggaggattcgtggagtcagcagcagagctacaacttcagcgggcgcgtgctgctcacggccgtcgtgatcctgttcgtgatcgccgtcgtcttcgccgtcacccgcgtcttgctgtactacctcgtggtgcggtccggcggtggcggcggaggccgtcgtcgtggcggcctggcaggggggatcttgcggtcgttgaactcgctcggcgtgagcggcgccgcgggctggacgcgtccgcgctcgccgcgctgccggtcaccgcgtaccggaagaacggcggcgggggcggtggtggggagggctccaaccgcggcgggcctggcgccaccgccgccgactgcgccgtgtgtctgtcggagctcgccgacggcgagaaggtgcgggagctgcccaactgccggcacgtcttccacgtggagtgcgtcgacgcgtggctgcgctccaggaccacgtgcccgctctgccgggccgaggcggaagtacccaaggcgagggcttcggcggcggcgacggcgacggcgcagtcgtcgtcgtcgctcggtgacggaggaattaccgtggtcgtgaccatacacggcggctctgacgaagccggtggcaggtcaacggcgttgactggtcaaccgggatcctcgaactctcctagctgcgaggctgcaaggaattga

SEQ ID NO: 13667 - DNA, 714 bp, Oryza sativa
  Clone ID: TFbOSC401369j.C1.o9.fg
atgtcggatacagccttgtcgggcgcgccgccggcggcgaggtcggaggattcgtggagtcagcagcagagctacaacttcagcgggcgcgtgctgctcacggccgtcgtgatcctgttcgtgatcgccgtcgtcttcgccgtcacccgcgtcttgctgtactacctcgtggtgcggcccggcggtggcggcggaggccgtcgtcgtggcggcctggcaggggggatcttgcggtcgttgaactcgctcggcgtgagcggtcgccgcgggctggacgcgtccgcgctcgccgcgctgccggtcaccgcgtaccggaagaacggcggcgggggcggtggtggggagggctccaaccgcggcgggcctggcgccaccgccgccgactgcgccgtgtgtctgtcggagctcgccgacggcgagaaggtgcgggagctgcccaactgccggcacgtcttccacgtggagtgcgtcgacgcgtggctgcgctccaggaccacgtgcccgctctgccgggccgaggcggaagtacccaaggcgagggcttcggcggcggcgacggcgacggcgcagtcgtcgtcgtcgctcggtgacggaggaattaccgtggtcgtgaccatacacggcggctctgacgaagccggtggcaggtcaacggcgttgactggtcaaccgggatcctcgaactctcctagctgcgaggctgcaaggaattga

SEQ ID NO: 13668 - DNA, 318 bp, Oryza sativa
  Clone ID: TFbOSC21790j.C1.o1.gm
cgtcacggcgtgcgcgctgaaggcgcggccctggacgccaagcagctgggcgcgctgccggtgttcacgtgggggtcttcttctccggcgacggcggcgccgaacgccgccgtgcagtgcacggtgtgcctcggggagatggaggacggcgagctggggaggctgctcccggcgtgccgccacgtgttccacgccgagtgcatcgacacgtggctcgccgtgagctcaacgtgcccggtgtgcaggacgacggtgggggcggcggaggatgatgagccagcggcggctccggtcgctggcgtgtcgccggcgagctag

SEQ ID NO: 13669 - DNA, 486 bp, Oryza sativa
  Clone ID: TFbOSC401978j.C1.o3.fg
atggtggtcatcctggcctccctcctctgcgccctcatctgcgtcgccggcctggccctcgtggcccgctgtgcctgccgccgccgaggcgccgctaccaccaccaccaccactactactacaccggctgctacatcccctgcacccaaaggcctgaagaagaaagccatcgacgcgctccccaccgtgtccttcgcactcaagcagcagcagcagcaggcggagtgcgccatctgcctggctgagttcgccgggggggaggagctacgcttgctgccgcactgcggccacgccttccacgtctcctgcatcgatacgtggctggggacccacgccacctgcccctcctgccgcgccaccgtcgggactagtacattattcctccctctccccggccgctgccggaggtgcggggaggtcgacctgcccacgctgcacgatttctccaccgccaccgccaccgcccaccacaacacacctccctag

SEQ ID NO: 13670 - DNA, 2424 bp, Oryza sativa
  Clone ID: TFbOSC400058j.C1.o5.fg
atggagatggagatggaggacaacaaggcgccctcgccgccatcacctatggagtccgacgtcgctggggagaagcgcaagagggaggacgatgcatcctcctccgctgtacttgccgccgccaacaacaccggcggtgcccagcaccccatgtggaagaccagcctctgctccttcttccgccgccgcgccgcctcctccgccgacggctgcagccacggcgactcctgccgctacgcgcactccgaggaggagctccgcccgcgccccgacggcacctgggaccccacctccgaccgcgccaagaagctccgcaaggtcgccgccgacgaggtggaggaagaggtggtcaccattgacgacaaggccctggacaagtgcctcgtcggcctcccgaggggatgggccaacgacaggctcaagactttcctccaagacaaggcaagaactaactactcctccattcttcctcctgctctactactaggaatctcgtatgcaacagcgaagaagaagaagggaatgactgttggttttgtaacttttgaaaatattgaacagctgaagaatgctatcgaggtacttacagagaaccaatctggtggaaaggaaataaagatagcagatgccaatcgtagatctcatcaaaagctgcacacagaaaagcctgtatctgacaatggagtgacaacagaaaatggtactagtgttgatgttcctcctggggagacatctgcacctgaagcagcaatatcaaataaaaaaagtgtccgcgatgcagttactccccttgcccacatgtcttataatgatcagctagagcacaaaaagaattctgttgcgcagatactgaagaggcttactcgcaatgctaggaaagcttgccctactggcattccccttccagattgggtttttaaatccaaagaaattggtggtcttccttgcaagcttgaaggcattctggagtccccagtgattaatggataccgtaacaagtgtgaattctctgtgggattttctttggagggaaaaaagacggttggatttatgcttggaaattttagggaaggtgtgactgctgttgaggaacctgtggactgcccaaatgtctcagaaatttcctgcaaatatgctctgatgttccaagactttctgcagtcatcaagcttgcctgtgtggaacagagttgataattgtggattttggcgtcaattcacagttcgggagggaagatgtcaagctcaagctgttgcacagaatgcagaaaaccaaatatcagaagtcatgcttattgttcaggtttgctccacaggtgttgatgatgcagtaatgaaagatgaatttgacaagttgaccgttgccctgcaacaaggagcagcaacatgctcacctccattacctctaacaactatagtagtgcaagatcacaaaggaatttcaaatgctgcaccagctgattgtccattgatcccactattggtgccaaaagtagatcaatcagaaggtacagtggataaaacaagaatccatgaccacatcggtaatctgtggttctccatatcaccaacagcattttttcaggtcaatactctcgctgcagaaagattgtatacccttgctggtgattgggccaacctcaattcgggcacattactttttgacgtatgttgtggaacaggaacaattggactgaccttggcacaccgtgttggaatggttgttggaatcgaaatgaatgaatcagcagtttctgatgctgagagaaatgcgctcattaacggtgtatcaaattgtcgctttgtctgtgggaaggccgaagatgtgatggggtctcttctcactgaatatcttggttcaccgcagcaggacattcctgtttctgaaggtgcagtaagtggtactgtgaaagatgaggaagttattgacagttctaagaatagtggcgaaaatttggacagctcaatgcagaaaaatgacaatggcgaaagccagcagctcggggatgcaccagctgattcttcctcttctgccatagatgagataaaggggaattccaatgatagggttggcaatgggttggaaggcagccatgatgaatacaatgaggttgctggagaagatattcatggggaagcatcattgatcaatgagtctgttgacctgaaagtatcggactgtttggaggacagaaagacatctgatgatggttcttccatttctaacaatgatgtgactgcagctactgcatgtcagttcgaagacattgttgctattgtggatcctcctcgtgttgggcttcaccctactgatcaagcttacacactgaatttgataggtgatcaaggcattgaggactcatccacgaattcgacgtctagtgtaaaccccaaaagaggacagggagttgctgttttcatttaa

SEQ ID NO: 13671 - DNA, 1092 bp, Oryza sativa
  Clone ID: TFbOSC418263j.C1.o1.fg
aaatttattcatgcaatttctcctactccagcatctaccatgtccagtgttgatattcacgcaaggcctccaaatactactttatccccatatatttctccagcaaagtcagttcctgttgaagaaactccaaagcgtcctgctgaggatgctgatttgcaatactggcgttacgatgtcaagaagcaaagacatggtgaagccggtgggaatcgtctatgtttcaaatttacatcatcaggatcctgtcctcgagggagtaaatgcaattataggcatgatgaggaggccagggagcattacaataggaatgtctgttttgatttcttaaacaaaggaaaatgtgagaagggtcctgagtgtaggtttgctcatagcctttctgatgagggtgctgttagggatacaaaaccacgtagcgaacgaagacgtgttgagagcagttgctggttctgcttgtcaagtccagatgttgaatcacatcttgttatcagcattggagaaggttactactgtgcacttgcaaaagggccacttgttccaaaccatgttctagttataccagttgagcactgctctagtacactaaagatgcccgtggaagctgaggcagagcttgggagatataaggatgctctggccaagtattttgagaaacaaggaaagatagctatatacttcgagtgggtttctcagcagtcccgccatgcaaaccttcaggctgttccagtaccattgtctaaagcatcaagtgttaaaaagatattccatttagcagcacagagactgggatttgaattttctgtagtgaatccagatggtgatgctaaccgcgccagggaattgttaagatcagagtgtgacagcaaatcaagcttgttttatgttgagctaccagaaggttcagtgcttttacatttggttgacagtaatgagaagttccctgctcagtttggccgtgaggtgttggctgggttgctaagcatggcagatcgtgcagattggaggaactgtaaggtttctaaagaagaagaaatccagatggtggatgattttaaacaagggtttcgtgagtttgatccagctgaatga

SEQ ID NO: 13672 - DNA, 2355 bp, Oryza sativa
  Clone ID: TFbOSC400591j.C1.o19.fg
atggaggaaccctcgcccgtcccgcccgcggcggctcctgcctccctcgccgccgcgccgcccaccaccgatgtcctctctcgccggagagcccatctcgacagcgcctcctaccgcgcgctctcccggctcttctcgcactgcctccacctgcaccctccgcggcacgcggcacgccccgacgcggaggtcgagcctgccgccgccgccgccatccctcccggcggctccggcgggcttccccatggggattcgccgcctcctgcagacgtgggaggcgatcgggggaagaacttagaggtggaggtggctctgggaaaccatgctccgcacgagacgccttcgacttcggcgtccccggacgccgccgtgaaccctaccaccgatcccggcgtggtgccgcaggggacggaggagggtagagtcgctggggtcgagcgggtggagggtgtagaagaggttgttttcgccggaggcacttccggggaggctgatgccgatggcgatgagttgggggctggggctggactgatgggggatgacgaggctttgaggtcgatgcaggcttgcttagacggggaggatagtgaattggtgattgaaatggttggtaatgacaatgagcaattgcaactcgatgcgatgatgaacaacttgtcagggttgattgatgatgctagtgcctgtgtaatgtcggcgcagagctgtggagtatctggagataaactgcagagtgatgacagagtagctgaggaggtgaaagaattgggagctgggattggcaatgacagatctgtgtgcagtttagatcatgggtcactggatggtggtggtggttttgaggaaggagagattgagggcgacacgcagaatttagatgcagatgattctggcaattcagagcttcaagatgatgtggaattggaagaggattttgatagcagaaggatagaggaggatgggtcatgtggccatgacttaaagagcaatttgcatttgatacctcaaaaaggaaatggcgacactgcacggaacatgctatgtaatagcaagggtgattctcaaatgcatgttgccagggcgcaagcagtcagttatgatgaagttctcgattggaatgagacacctttgcctgatgataaggctctcaaacatggaaacacaagaaagcgcaccttgacagaggagagaaaagctaagaagacgaaaactaaacgaattaagagagcattgcaacgggaagccgaaggggtgaaaagactgaaacttcaaccagttataaagcctaaagtggtgaaggtttgccacttctacttgcatgggaagtgccagcagggcaatttgtgcaagttctcccatgatacgacacctttgacaaaatctaagccctgcacgcattatgcacgtggttcttgtttgaaaggagatgattgcccttatgatcatgagttgtcaaagtacccttgccacaattttatggaaaatggaatgtgcatcagaggtgataaatgcaaattttctcatgtgataccaactgcagaaggtccgtccacaccagatgcaaagaaatctaatgcgtcatcagtacctgaaaaagcaaattgccaagagcaaacaagtcgtcagaaaacttcaacagtatacagtggtgaacctgcaacctctgttcctatcaaacatcattccatccttaaaaaccttgctggcatatcaggaaatgctcaaaaggatgttgtgtccactgagaagcataagaatccaactggtggtccacatcagaactttggaagacctcaacccgcagacgggaaaaaacttggcaagcacaatggacatagatcagctccactgttggatgaaaaagactcatcaaaacaagctaatctacatccatgttcagaaccaaagaaaaatagtttgcctaccactgctgcagtgcccagctcacatacttggatgttgttcagtgatgaacccgtgcccatgagattgtgcagcattttttgtattccgcacaccagttttattgctgtaactccatcttgcaagttgcaactgctgatgtggacttattttgcagaacttggggcaaatatttactgtcagattttgaagattggtaactatcaaatgaatgcacttctgttcaatccacaggcatacaacagcaaatcacaattcctaatcttcattagtttgcagcagcaagaagccaacagtgcagcaaaagggagtatgcccgtgtgcatccatcagctcgttttaagtatgttcctcaataaagatttgaattggaaagttggtgtttatctctttgtttgggattatgaaaatgctaagcgccatatgacttag

SEQ ID NO: 13673 - DNA, 4170 bp, Oryza sativa
  unsure (1)..(4170): unsure at all n locations
  Clone ID: TFbOSC400657j.C1.o8.fg
atgagtcggcggcaggagatttgccgcaacttccagcgcggaagttgcaagtacggagcgcagtgcaggtatttgcatgcctcccctcaccagcaacagcagcagcagcaggcgaagcccaacccgtttggatttggcaccggaagcaggcagcagcagcagccgtcatttggctcacagttccagcagcagcaacagcagcagcagaagcccaatccttttggttttggggtacaaggtgccaatgcccagtcacgtaatgctcctggtcctgcgaagccttttcaaaataagtgggtaagggacccctcggccccgacgaagcaaacagaggcggtgcagccaccgcaggcgcaggctgcccacacctcctgtgaagaccctcagtcatgcagacaacaaatttctgaggattttaagaacgaggctcctatttggaagcttacttgttatgctcatctcagaaatggcccttgcaatattaagggagacattagcttcgaggaactaagagctaaagcctatgaggaaggaaagcaagggcattctctgcaatcaatagttgagggagaaagaaatctacaaaacgcaaagttaatggagtttactaatctgctcaatagtgcacgtccatcacaaactccaagctttcctactatgagttccttccctgaagtgaaaaacaactcatcattcggggcttctcaaaccaatggaccacctgtgttcagtagtttcagtcaaattggagcagcaactaatattggacctgggccaggaaccaccgcaccaggaatgccagccagtagtccttttggtcatccaagctctgcaccacttgctgcccctacttttggcagttctcaaatgaagtttggagtttcgagcgtatttggaaaccagggttcaggtcaaccatttgggagctttcaagccccacgttttcccagttcgaagtctcctgcttcctctgtccagcacagagacattgataggcaatcacaagagttgcttaatgggatggtaactcctcctagtgtgatgtttgaggaatctgttgggaacaacaaaaatgaaaatcaggatgatagcatctggttgaaggaaaaatgggcaattggggaggtgtgggatactttcctcttggtcattttcgaagttctgtttgctagaaatgtttgctcatttacaacttttgttcctgctatggaagttattggaataagaaacagtattgcaatattgagtgattggccgggagattggtccggcctcgagaaatttcacgacttgccactgaatatgcaagcttttgaaatttaccatttaattcatgtgacttttgaaatttgtaccgaaatgcgaatttcttcgccctaccacttcggtccatctgaagaaattgacagatggtgcaaatttatgtctatagttgcaattgttcacactttctatgggaacctgtggatgagggatggcgtcttcataacggaaattcaagacaggtggcaagacaaaatccaattggacataatggacaatatattagtggtatgcaagtccacattagctgacgatgaatcagctagtgaggtatcttcagggagtgacagtgacagtgattgcattcttggagatgattgcccatcagatgatgatgaagaggctgcacagatacacaagcgttttaaagaactgaaggagaagttaaagacaggaaaagtagataagttggatgatgttgtttttgaagctggtgctgaacaagatggtaatgacaccccatcttttgatagcgatgatgaagagtcggtagaagaggttgcaagcgatgaagaggtttctgctagaaaactcatcaagtatccaaggttcaaggagaagcctggtgttccaacatttgaattaggaatgacgtttagctgcaagaagcagttcaagaaagctattacagcatatggtttagctgagaggaaggcgatcaactttgtcaaagatgatcctaagagggtgagggcaagatgtgactggcctagctgcccttgggtttgcctactgtcaaaaaactcaaggactgacggttggcagatagcaacactagaaaattctcatctatgcccctctagaagagataacaagctggtgacttcttctaggattgctgagaagtatggcaagtttatagttgcaaatccctcatggaaattagcacacatgaaggcaaccgtacaagaagagatgtttgctgatgttaacatctccaagctgaagagagccaaatccattacgatgaagaaagctataaatgcagctaagtggcagtatcaaaagttgtataattatcagctggagctacttagaagtaaccctggaagcactgttgtggtggatagagaggtagatatggatccacctgttttcaaaaggatctacatatgcttagatgcatgtaagaaaggcttcctagctgggtgcagaaaagtgataggacttgatggctgcttcttcaagggagcaaaaaatggagagctcctttgtgccataggaaaggatgccaacaatcagatgtatccaattgcatgggcagtggtgcacaaggcgaacaaggaagaatggcactggttctgtggattgttgtgcagtgacttgcaagttggtgatggatctggctgggtgttcatatcaaaccaacagaaggaaattattaatgctatggataaatgggctccacaagctgaacacaggatctgtgctaggcacatatatgctaacttgaagagacacttctatgacaatgaacaccagaagttttggaagtgtgccaaggctccgtgcataacgttgttcgacttggcaatggcagagctggtacaacttacaactcctgcagtacaaaccatcttgaataaccatccgcagcattggagccgagcgtggttcaggtcaggctctaactgtgacttagttgacaacagtatgtgtgagtccttcaataaatggattctagaggctaggttctttccaataataacaatgcttgaaacaattagaaggaaagtaatggttaggatccatgatcagagaactatatcaggtagatggaccacatcagtttgcccaaacattctgaaaaaaatgaatgtatatatcaccgagtcagctttttgtcatgcaacatgtaatggaggtgatagctttgaagtaaaacaccatgacaataggttcacagtacacctagacaagaaggagtgttcttgtagatattggcagctgtcaggattaccatgccctcatgcaatatcatgcattttcttcaagactaagactaattcactggatgagtacattgctgagtgttattcagtgaaagagtttaagaaaatctatagtcaatgcctggaaccagtagagggcatgagcagctggccagaagatgacaaagagccacttaatgctcctgggtatatcaagatgccaggagagaccagaagagaatccaatgaaccattaaaagccaccaaactgtcaaggattggctcaatcatcagatgcagcaagtgcaagcaaattggccacaacaaatccacttgtaataagcatcatggaggaggctctagcacaccagattctctccaagttgtaaatccagctgataatttaatgctctcaaacacacaacaaagctctaaacaaagcaggaaaagaaagtcacgtacagctgctaacaccaattctgcaagtcagtcaaggaaaacagtgtcttcaaagcaaaaggcactagtggaattgcatgcccattctcagggttctacaagtgcaacaattaaggtcacttctgggcaagcttttgtcaatgtttcaactcaagaatcagcaaagttcaagccaaagaagcttacacctgttgccagacttaatggcatattgatgcagtcaagaaaaccatctgggagttttggctccagctgttccagcatcaacaattttctgaagtcctctgcaggaacgacaaaaatgaaaatgaagatgaataatctggtgaaggaaaaatgggcaattggggagtttgtatgccatttatcagagggcattgattctggaagctatgttgcagctccagggtcaacaaaggacctctccaacaaccagaagaagaatacncaagagtga

SEQ ID NO: 13674 - DNA, 1275 bp, Oryza sativa
  Clone ID: TFbOSC6623j.C1.o1.fg
atgagtcggcggcaggagatttgccgcaacttccagcgcggaagttgcaagtacggagcgcagtgcaggtatttgcatgcctcccctcaccagcaacagcagcagcagcaggcgaagcccaacccgtttggatttggcaccggaagcaggcagcagcagcagccgtcatttggctcacagttccagcagcagcaacagcagcagcagaagcccaatccttttggttttggggtacaaggtgccaatgcccagtcacgtaatgctcctggtcctgcgaagccttttcaaaataagtgggtaagggacccctcggccccgacgaagcaaacagaggcggtgcagccaccgcaggcgcaggctgcccacacctcctgtgaagaccctcagtcatgcagacaacaaatttctgaggattttaagaacgaggctcctatttggaagcttacttgttatgctcatctcagaaatggcccttgcaatattaagggagacattagcttcgaggaactaagagctaaagcctatgaggaaggaaagcaagggcattctctgcaatcaatagttgagggagaaagaaatctacaaaacgcaaagttaatggagtttactaatctgctcaatagtgcacgtccatcacaaactccaagctttcctactatgagttccttccctgaagtgaaaaacaactcatcattcggggcttctcaaaccaatggaccacctgtgttcagtagtttcagtcaaattggagcagcaactaatattggacctgggccaggtgattgtgttactaatctactccctccgtttcacaatttctcaaatgaagtttggagtttcgagtatgttgctgaaagttgtgcatttactagcatattcgtagctgtgtatcatggtcgtattttggaaaccaggggttcaggtcaaccatttgggagctttcaagccccacgttttcccagttcgaagtctcctgcttcctctgtccagcacagagacattgataggcaatcacaagagttgcttaatgggatggtaactcctcctagtgtgatgtttgaggaatctgttgggaacaacaaaaatgaaaatcaggatgatagcatctggttgaaggaaaaatgggcaattggggaggtgtgggatactttcctcttggtcattttcgaagttctgtttgctagaaatgtttgctcatttacaacttttgttcctgctatgcttcatgacgatacaaaggaattatacaacaaacaagagaatttgcaagagtga

SEQ ID NO: 13675 - DNA, 837 bp, Oryza sativa
  Clone ID: TFbOSC415553j.C1.o1.fg
ttaaatggaggtgggaagaccacacattcggcagagtatccagaacggccggggcaaccagtttgtgagtactatatgaagaatggaacttgtaagtttggctctaattgcaagtatgatcacccaagggaaggctctgtgcaagcagtcatgttaaattccagtggataccctctacgctcaggtgagaaagattgtacctactatgtcaaaactggccattgcaaatttggatctacatgtaaattccatcacccagaaattggtggagtttcagagacacctaacatgtatccaccagttcagcctcagcctatctcttcctctcatccatatcaacatcttgctggctggcaaatggggaggcctcctgttttgccaggatcatttttatcaggctcatatccaccaatgatgcttccgtccacagtcgtaccaatgcagggatggaacccttacatttcacctgtgaaccaagttgcgtcagctggggggcatcaaactgttcaagcagggccgttttatggcttatcgcaccaagggccttctgctgcagtcacttatggcagtcagtatgcaccgttatcttcttcaaccatgccttcaagtagcagtaaacaagaacctgcctttcctgcgcgacctgggcaacctgaatgccagtattatctgaagacagggagttgtaaatttggatctgcatgcaaatatcatcatcctcagtatttgaatacacctaagtctaactgtatgctgagtcctcttggtcttcctcttcggccgcacgctgttgccaggatagtcagtccaaatgtatatcgcttgagtctggattag

SEQ ID NO: 13676 - DNA, 1431 bp, Oryza sativa
  Clone ID: TFbOSC422882j.C1.o4.fg
atggcggacgccgacgcgagggccccgcccaaatcggaccccggcgccacgccgatcgatgaggtctccggtggtgagaagctgccgggtgaggtggcggcggcggtgggggtggagggtgctgcggcggattcgaggccgcggttcccgaggcgacccggggagccggactgcacctactacgtcaagttcgggagctgccgctttgggatgaagtgcaagttcaatcatccggcgaggaagaagaagagtagggtgaaaggtagtaacggtggtagtggcagcggcgggagcaacagcagcagtaacaaagcctcctcgcctgatgatgagcagcaggctccaaaagaggaatacggaagctatgttccagatatttcacctgaagttgattctttgggatttgctgacaaggggagtgcgtctaacttagaaaactttaagaaatattcttatgagattatcgatgtgaagaagggaagagtggagccaaaggaacttaaggtactgaaggttgccaaagagaaaaggaaggaatttatttcagaaggtagttcccaggaggaatgcaagtattattcaacacctggaggatgcaaatttggtaaagcttgtaaatacctccaccgtgatggaaaagaagggaaaacagacgctgaaaaggttgacctgaactttctcggtcttccacttcgtccaggggaaaaggagtgtccctactacatgcgtactgggagctgcaagtacgccactaactgcaagtttcaccatcctgatccttctaatgttgcttctaaagatccacagttggagcatgagaatggggatgctccacagcaagatgttcaaggatcatcgtctcagccaaatgcttcaatttggcccgatcagagaacagtgaatgagcatcatgttccgtttatagctccatctccatcgtacagtgcagggatgcttcctcctcaaggaatgtatccacctcctgaatggaatgggtatcatcaggttccgttgaatccatattatcctcctggagtccctttccaacattttccagctgctcctataaatcatcctatgtacaaggcaccagaaatacctggacatcagcaggttccttccgaggaatacccagagagacctggccaacctgaatgtcagcattttgtgaagagtggtttttgcaaatttaggatgaagtgcaaatatcaccacccaaggtcaccggtgcctccagcaggagctcttagccctcttggcttgcctataaaacctgatcagcctgtgtgcacatactatggtcgctatggggtctgcaaatttgggccagcttgcgcatacaatcaccccttcaattttagccctgtacctgcagcgggacctcctctcctccctgctcaatacccaactccaggaaactacactctctga

SEQ ID NO: 13677 - DNA, 2157 bp, Oryza sativa
  Clone ID: TFbOSC27392j.C1.o3.fg
atggccgcccccgccgccgacgacgacgaccaccgcgccgccctgccccgtgaggaggacgacggggaggaggaggagggatcggaggaggaggtggagagcgacgacgaggaggaggaggagggggaaggatatgactggtcggaggaggacgaccccgaggccgcgagcctcgccggcatctgcgaccccgacgcgggctcctacgacgaccccaccttcgaccccgccgccgacggtgacctcgaggtggacgccgtgctgcggtccaggatggcccggatgtcactctcctccgcgcgcaaggacaggaaaggatcgcggatgccgaagatggggaaggaggagatggatcttctagccatggtggacaagctgatgcatggtcagttctttcttcgattgccattgtgtgactgtgatatctccaacaatgtgatgcaaactgatggccagttggagaaactaaaggtttatgaatgcaaagcatatttgaggatgcacaagctaagattgtcaggcaacaaggaagtgctcctaactcgcatcagaggacaaattgagtatgaactatatcctttatgtaatctgtccttcttctttatatgttacttgtcaactttgttgatattttgtaatgcaaatgaactgcttttgtttgaccactttcttgtgcttcaaaaccagggtgaaaactatgggagaggtgattcatgcaaaggtgatgttgtggtctttgagcaaaatatttacaaaaggaaaaaaggagctcctcgtggtgtcaagggtcatttatgtggtcaaaggacaaatgcaggtcgaataatcaaagaaagctatggcactaagaagcaacagcacacgttcactccatggcttgatgaagaggaaagaaacagagccctccaagaaaaacatgcaagagggtatgtggcacgtaagacaagggaagtcaggattaaggacaaagagaatgaacggatgaggagattaaataggaacaaggaaaacaagagcaaaggacaggacaacatgaataaaaaatcatctcaagcggtttttccgcaacatacggtgactacgaatactgttcagaaaagagctgagaagataattccttcactccaacatggtgaatctgggaactcaagtcagcaacatttatcatcaaagcaaactcccacagagcaattgctccattacctgccacagttccctcatcctcaacaacacaacgaagtgcttctccaaaagggaacatcaagaactagcacaacgcagctcattaaccatcaggctccttccctccaacatgccgtaaaagtggaaacaacacagcagcagcagcagcagcagccgccaaaatcaatcaagcctgctcctatacagcaaagttctgcatacccacagcagtatcccaaacatcaacaccacaatcaagcgcttccgcgggttcctccttcgcaagagcaaagggctgcagtatcccaaacatcagctgccagacaagattttaccaatcaccaggctcctccatccagacaacatggaggatcagagaacatgaggcggcaggagatatcttcaagacctactcctactcctactccacagcaagcagtctcttacacacagcagcaacctcctaatcatcaatacaggaatgaagcgttttggcagcagggcgggacaagtacttcaagaacaggcttcatggatcgtcagagtaacaattggggctctacagaccatgataaaccagccttccagcctttcactcagaaggcaaagacataccaacatggttccaatggctctggtcatcaccaggctcgtgtcgatcgcgaaacgcatcaacctctcaggtcaagaaaccaggattaccattgggaggaccagagttatcatcaccaacagaaccatcatcagaattattatggtcacaggcaaatgtctcaagatcagtatcatcaccaacagaaccatcatcagaattaccatggtcgccagggaatgaacggaaaccagtaccatgacaggcagaatcataaccagaatccccagaggtttcgaccatggaagccatgcttcatttatcaacaacagggatggtgcccgtatggggaaaactgcaaatttatgcatgatttgaggtag

SEQ ID NO: 13678 - DNA, 2160 bp, Oryza sativa
  Clone ID: TFbOSC411215j.C1.o5.fg
atgcctcaggacgatgactggttctgggggcgcccgactcccgtcgtcgtcggcgacggcgagacgacgtcgaagccaaagccgccggtggcgggaaagacgaagaaggtggaggagcagcacccacggcgaccgggggagccggactgcagctactacgtcaagttcgggagctgcaagttcggcatcagctgcgtgtacaaccacccggatccgaggccgcagcatggcgccgacgacaagaagccggccgagcagttcccgcggcggcccggcgagcccgactgcagctactacgtcaagttcgggagctgcaagtttgggatgaattgcaggttcaaccaccctccccgcatgccagtgccaccacaacaagagtatttctctgggaatgcatgccactgccaccatattgaaggcaaaagtaaagttgagcaagtaaagctgaacgttcttgggcttccacttcgtcctgggacagggttgtgctcatactacatgaaccggggaatctgcaaatttggcactaactgcaagtttgaccacccagatccaggctcagatcatgagaagtgggtcgtttcaagtaatgccaatcaagtttcctctcaggtgaacatttactcggtgcttgaccatggagaatcgaatgagcatacttttacctccgaagaagtccatcagccagggattccaagttttcaccaacgaatcagttacacaagggaccaacttctccaactttgtcagaatgtcgaagtgcccaaggacatcttaaaattttgtcaagatattaatgttgaactgaatggtgaagataaaatttcgggatttggagcagagaaagatcatgtgagcatccttcccttctcatatgtcatcatggcagaaatcgtttgtgctgctctgattaatgttcctcaaagatgcaaagtcttgtatttcatagtacaaactccatcatataaacggtttgacgcgacagacagccgtgactggcattcatggtctgcacaaactaattgggaacagaaattttgggacaacttctctgaagcaaaagaaccctattctttaggttggaagcaagagaaatttaacaagcctgaccaatcaagcttccactttgattctaaagatcagagaggcattatctctggcaaagatgaagttctgaaaacattgaaaagtatactaaacacattttcaccaaagatgttcgatcttcagaagggccagctaatagaaacaagaatctctagcgctgatattttgaaggatgttattaatcttatatttgaaaaggttgttgctgagccagccttctgttcgacgtatgcgcaactttgcacatatctaaatcaaaacctcacaccattccctcctgaagactgtgattgtgaagaaattacgttcaaacaagcactgtcgaacaaatgtcaagaaatattcgaaagtgctcacaccgtatgttctgagattggcaaattgattggacaagaccgagagatggagcaacgggataaagaaagggtagtgaaacttgaaacactgggaaatattaatttcattcgagccctgctcaagaaaaagttgatcacaaataagataatagatcacattgttcaggcagtgatggattgttgtaagtttcgctttgaaccacttggaaaagttgatttgctaaatataatatttgaaggcatgctggattcagattcagcaggtgatgaatctaatatttgcgtcaatgctatgattggtggcaataaatcttccatagcttcaaatgatgtcgagatgactcgtaagaatgtcaataggcaaaatgaagaggcaatattacaaaaatcttatgatgaagtcccaaataacaaaatggatcctcagaaaaattatgcagatggagcaatcagttatctcattgagaaagagaagccaactaacttagaatcatctgtgaggatctgtcgaggaggatgcagtatttcagagataatggagttagttgttgatgcaggagctgtggaaggcagtgatgagcatttcatggctaccttattatttattaaacctgaatatagggaaatatttcttacccttgatacacgtgaaggaagacttgggtggctgaaaaggatgtacaaggtgaaggaataa

SEQ ID NO: 13679 - DNA, 719 bp, Oryza sativa
  Clone ID: TFbOSC32478j.C1.o1.gp
ggagaacctgtctgcacattctattctcgttacgggatctgcaagtttggtcctaattgcaaatttgaccatcctatgggaacccttatgtatggaagtgcaacatcaccaagaggtgatgtgtcatctatgcattatcagttgtcaccctcaccagggcatccaggaatattgcttgatggaggctctggaaggtctcaccgggttcctcagtctgattcccagcaaataccctctggcgatgggaatgccgagagagaggcatcataagccctcctcggcctttcctcatgctacctcccattcttgactcttcagtaattatctccaacaaattcaaagagctgaagctgtacaggtccttgtccatcctttttctgcttctctgaatcaccacacaccggtgcttcatcatgtatcacattcaggcaggaaaatgttcttgcttgcccctccccgccccaattcctgcatgccccgtgaaaataaatggggcaaccattcttatttatccctaccatatatacacacacaagatacactcacctcctgacactcggttcggcgaatgatgtgccttgatccctctgttgtagttatacaggtggcctgcagtggacaaagcttaccaaactgactgtattggggattctgtttcgttttgctcttcttcctttctaggcattggggagtaagcgcaagacttgctgcttgtgcaa

SEQ ID NO: 13680 - DNA, 1242 bp, Oryza sativa
  Clone ID: TFbOSC101178j.C1.o1.fg
gaggcgaagaaggagtacccgcctgacctgacgctgcccgacctcaagagcggactgttcagcaccgacgagttccgcatgtacagcttcaaggtgaagccgtgctcccgcgcctactcccatgactggaccgagtgccccttcgtccaccccggcgagaacgcgcgccgccgcgaccctcgccgctactcctacagctgcgtgccttgcccggagttccgcaagggcggctcgtgccgcaagggcgacgcgtgcgagtacgcccatggcgtgttcgagtgctggctccacccggcgcagtacaggacgcgcctctgcaaggacgaggtcggctgcgcgcgccgcatctgcttcttcgcccacaagcccgacgagctccgcgccgtcaacccctccgccgtgtccgtcggcatgcagcccaccgtatcgtcgccgcgctcctcgccgcccaacgggctcgacatggcggcggcggcggcggcgatgatgagccccgcctggccgtcgtccccagcgagccgcctcaagacggcgctcggcgcgcgggagctcgacttcgacctcgagatgctcgcgctggaccagtaccagcagaagctgttcgacaaggtgtccggcgcgccgtcgccgagggcgagctggggcgccgcggcgaacggcctcgccaccgcgtcgccggcgagggccgtgccggactacaccgacctgctcggctccgtcgacccggccatgctgtcccagctccacgcgctgtccctcaagcaggccggcgacatgcccgcgtacagctccatggcggacaccacgcagatgcacatgccgacctcgccgatggtgggcggcgcgaacaccgcgttcgggctggaccactccatggcgaaggcgatcatgagctcccgcgcctcggcgttcgccaagcgcagccagagcttcatcgaccgcggaggccgcgccccggcggcgcgttcgctcatgtcgccggcgacgaccggcgcgccgtccattctctcggactggggctcgccggacggcaagctggactggggcgtccagggcgacgagctgcacaagctccgcaagtcggcgtcgttcgcgttccgcggccaatccgccatgccggtggcgacgcacgccgcggcggcggagccggacgtgtcatgggtgaactctcttgtcaaggacggccacgccgccggcgacatattcgcgcagtggccggagcaggagcagatggtggcatga

SEQ ID NO: 13681 - DNA, 723 bp, Oryza sativa
  Clone ID: TFbOSC33167j.C1.o1.fg
atgtacctgcgtccggacatgatcacccctggaattgatgctcagggcaaccccatcgaccctgagaagatccaggccgacttcgaggatttctacgaggacatctttgaggaactcagcaagtacggcgagatcgagagcctccacgtgtgtgacaacttcgccgaccacatgatcggcaatgtgtatgttcaattcagggaggaggatcaggccgccagagcgctgcaggcgctgacggggcggtactactccggccgtcctatcattgtcgagttctcgccggtgtccgatttccgggaggccacctgccggcaatatgaagagaacagctgcaaccgtggtgggtactgcaacttcatgcacgtcaaggagatcggcagagacctgaggaagaggttgtttgggcacctgcataggtcccggagaagccatagccatggccggagccgcagcccgagcccgtaccattaccggagggactatgatcggaggagctcatcgcggtccagggaccacgacgattactaccgtggaggtagccacgattactaccgtggaggtagccggaggagcagcgagaggcaccgcagcagctacgacagcgatggcagcaggcggcggcacaggtccaggactaggagtcctgtcagggatggtagcgaggagaggagagctcaaattgagcagtggaaccgtgaaagggaggctgcacaagtgtga

SEQ ID NO: 13682 - DNA, 1273 bp, Oryza sativa
  Clone ID: TFbOSC14394j.C1.o1.gm
atgacgacaaagtttgcagatcttccaagggttgtgacatcggaaaagaaagaatatccagtggatccgtcccttcccgatatcaagaacagcatctatgcttccgatgagttccgcatgtactcatttaagatcaggccatgctcgcgggcgtactcacatgattggactgagtgcccgtttgttcacccaggggagaacgcacggcgtcgggaccctcgcaagtatcactacagctgtgtgccatgccccgactttagaaagggagtttgccggcgtggtgacattaccatccccaagagcctcggcaacagctacaatggagatggctgcagcaatgggcttgatgcctggttctccatcatcagtttcagcagtcatgtccccatttacaccaccaatgtccccttcaggcaatgggatgcccccttcattgggctggcagcagccaaatgttccgacactacaccttccaggcagcagcctcagtcgagccggctccgtacctcacttagtgcaagggatatgcctgctgatgattactccctgatgcaggatattgattcacagcttataaatgatttgtgctattccgtattgggtggtatgttttcaccatctcacaaggctgctttccttaatcagttccagcaacagcagcaggcacttctttcaccaatcaacacagtcttctccccgaagtctgtggacaaccagcagttgccttcacactcatctctgttgcaagcatcacttggtatatcctcccctggccgcatgtctcctcgatgtgttgaatctgggtcccctatgaactctcatctttgcgctgctcttgctcagcgtgagaagcaacagcagacaatgagaagtctcagttctcgtgatcttgggccgagtgctgcaagagcatcaggtgttgttggctcccctctaagctcatcatggtcaaagtggggatcaccttcagggacacctgactggggtgttaatggtgaagaattgggcaagcttcgccggtcatcatcgtttgagctgagatctggtggtgatgatccagatctctcttgggtacacacactggttaaggaatctccaccagagaagcaagtcactactgctgaatccataaactttgttggaccttcaccactgatgcctcccagtgtaagcaacggtgaaggtcctagtctgaatgccccgctggatgggcatgaccaagctgctgttattggagcattgcttgaacagatgcagcttgatcagcatattg

SEQ ID NO: 13683 - DNA, 1161 bp, Oryza sativa
  Clone ID: TFbOSC400431j.C1.o28.fg
atgatgatgatgggggaaggagtcagcagcgtcccgccgtggtctcacctccccgtgagcggagtcgatgtactcggcggcggtggtggcggtggggatgagatgacgccgtacgtgatcgccgcgctgcgggattacctgccggcgaatgatgtcggggtgggggctgacgaggaggaggaggccgcggcgatggccgcggcggtggacgcgtacgcgtgcgacgagttccggatgtacgagttcaaggtgcggcggtgcgcgcgcgggcggagccatgactggaccgagtgccccttcgcgcacccgggggagaaggcgcgccgccgcgatccgcgcaagtaccactactccggcaccgcgtgcccggacttccgcaagggcgggtgcaagcgcggcgacgcctgcgagtacgcccacggcgtgtttgagtgttggctccacccggcgcgctaccgcacccagccgtgcaaggacggcaccgcctgccgccgccgcgtctgcttcttcgcccacaccccggaccagctccgcgtcctcccggcgcagcagtccagccccaggagcgtggcgtcctcgccgctggccgagtcctacgacggctcgccgctgcgccgccaggcgttcgagagctacctcaccaagaccatcatgtcctcgtccccgaccagcaccctcatgtctccgcccaagtcgcccccgtcggagtccccgccattgtcgcccgacggtgccgcggccatccgtcgcggatcttggcccggcgtcggctcgccggtgaacgacgtcctggcctcgttccgccagctccgcctcaacaaggtgaagtcgtcgccgtccggcgggtggagctacccttcgtcgtccgccgtctacgggtctcccaaggccgccaccggcctctacagcctccccaccactccactggcttccacggcaacggtgaccaccgcctccagcttcatgcccaacctggagccactggacctcgggctcatcggcgacgaggagccggtccagagggtggagtccggaagagccctccgggagaaggtgttcgagcgactgagccgggatggtgccatctccggcgacgccacagccttcgccaccgccggtgttggcctcgacgttgattgggtgtccgacctcatcaactga

SEQ ID NO: 13684 - DNA, 1395 bp, Oryza sativa
  Clone ID: TFbOSC900188j.C1.o9.fg
atggttcggaagcgtcgcgacaccgcgagggttaacccaaccgcggttagcggagggggcctctctggtttatatagccgcgcctcctcttcccctcctcttcaccacagcggatcacggcggcgacttcggacgaacaccttgcctcgccggagttggagaagaggagaggagttagagagcaagatgatgatgatgggtgagggcgcgcacgcgccgccgtggcagcagcacgtggcgtcgccggtgagcggcgtggagggaggaggtgggagggagatcgaggtggtggccacaccgtaccacctgctcgacacgctgcggcattacctgccgtcgaacgaggcggcggcgccgaaggataaggagaaggccgcgccggtggcggcggcggtggacgcgtacgcgtgcgatgagttcaggatgtacgagttcaaggagcggcggtgcgcgcgcgggcggagccatgactggacggagtgccccttcgcgcacccgggggagaaggcgcggcggagggaccccaggcggtactgctactccggcacggcgtgcccggacttccgcaagggcgggtgcaagcgcggcgacgcctgcgagttcgcgcacggggtgttcgagtgctggctccacccggcgcgctaccggacgcagccctgcaaggacggcaccgcctgccgccgccgcgtctgcttcttcgcccacacccccgaccagctccgcgtcctcccgccctcgcagcagcagggctcgaacagcccgaggggttgcggcggcggcggcgcgggcgccgcggcgtccccgctcgccgagtcctacgacggctcgccgctccggcgccaggcgttcgagagctacctcaccaagagcatcatgtcgtcgtcgcccaccagcacgctcgtctccccgccgaggtcgccgccgtccgagtccccgccattgtcgcccgacgccgccggcgcgctccgtcgcggcgcgtgggcaggagtcggctccccggtcaacgacgtgcacgtctcgctccgccagctccgcctcggctccccgaggtcggcgccgtcgtgcgcctccttcctccccgccggctaccagtacggctcccccaaatcccccgccgccgccgccgccgcggcgctctacagcctcccgtccaccccgacaaggctatcgccggtgacggtcaccaccgcctccggcgccaccgtcaccgtcgagccgctcgacctcgggctcatcgaggaggagcaacccatggagagggtggagtccgggagagctctccgggagaaggtgttcgagcgtctcagcaaagaagccaccgtgtccaccgacgccgccgccgccgccgccggcgtcgcgcccgacgtcggctgggtatccgacctcatcaactga

SEQ ID NO: 13685 - DNA, 1167 bp, Oryza sativa
  Clone ID: TFbOSC418457j.C1.o13.fg
atggccgatcccaacggccgccgccgcctccccaccggtgatccagatcaagccaacgcctccccgtcccggcgagtctccgccgtcgatggcgtcaccggcggcgagggcaggcccacctactcccacttcccccccggcgcgtacgagccgacggacgtggcctacggcatccgcgacgcggccaacgacgagcgggcgcgggcgcgggctcgggctcgccatgaccagggtggcggggctcatgaccaccaccacgaccggccccggcaagaccagcgcggcgaggctcacctccacgacctccccggcgagaagagcgaggtccccgacgtcggtccatctgaccaacaggggaaggaagcctccgacaccgacatggctccattggcggcgctggcaaagagatcctacgacgtcaacttcccgccgctgcacgagcaccgcgccgcccccttccccgccccggcacccgcattcgcacccgcaccggcgggcaccatgggatcctcttccgcacaggtgcagggtgacggggctcctgacaatcacgaccacgacccacgtcacctaccccggcaagaccagagcggcggagctcaccccgacgacctccacggggagaagaccatcggttcaggctccgatatcctcgacgactccaagagaggaatgatcaacgccggtccccaacacggccgcatcaccacctccaatggcggcagcggcagcggcagcgacaagggcaagggggtctcctacgccggggacaagcccgcatctagctcgtcgtcctccagctctgctggccagcaggggagcgacaccgacaaaactccttcggcggcggcggcgagctcctacgccgtcaacttcccgccgctgctgcccgcacccgctcccgtccccgcccccgcacccgcacccgcggtcgccggcgccatgggtgttgccaatgcccaccacaagattgcgctgtgcagcaagtggaggaaggggaggtgccacaacggggcagcgtgtcgctactctcatggcgaggaggagcaacgaattgtgccggagatgagagtcggcggcgggggacgtccgtgcccggagctcgccgccgccaagggatggtgcaggtacgggctcaactgcaagtattgccatggcggcgtatag

SEQ ID NO: 13686 - DNA, 160 bp, Oryza sativa
  Clone ID: TFbOSC32469j.C1.o1.gp
agaagcaatgtggcaaatgactttaggaggaggagagtctatggagtccactccataccctgagcggataggagagccagactgcagttattatatgaggactggactatgtaggtttgggatgacctgcaaattcaatcaccccccaaatagaaaactg

SEQ ID NO: 13687 - DNA, 1521 bp, Oryza sativa
  Clone ID: TFbOSC419228j.C1.o18.gm
atggagcagccgcacgccgccgccgccgcagctggtggaggggagggggagggcggggctagccccgacaccggcctggaagggccgatgtggaggatggggctgggaggaggaggcgggggaggtggaggtggaggaggaggggatggggacgcggcggggaggctgccggagcggcccggggaggaggactgtgtctactacctccgcaccggcgcgtgcggcttcggtgaccgctgccgctacaaccacccgcgcgatcgcggcggcactgagcttgaaaattgggcatgccactgcctagatcttgtccggcgcatcggtagcactcatcgggtagcagcattagagtttgggttcgcggtggagggtgagaaggagtgctcctactacatgaaaactgggcaatgtaaatttggaactacatgctcatacaccccaatgatgctctcatctggaatgatcccattgcaaggatggagcccttatccggcttcggtaaaccctgtagtgtcaggtggagctcaacaaaatgttcaagctggacctgtgtacggcatggggcaccatggatcttcctctacaattgcttatggtggctcgatagttctcatcggcagttcgcggcactgggagactcggatccattccctcgtggccggcggggaaaaggggcagagcgcgccgacttggagacgcttcggcgacatcgtccacctcgacacgagcggtggacgcggcggatactcctcttcctcctcccctctcttggtcactggccagtggtcaccgctcgccggagaggaagacaaacttgtggtggtcgtcggccgattggcaatcattcggcaacgacgaccgatgctggttcagccgccgaacgccgacgcccagcacactgacatccccgacggccgctccttcctcggcgtcccccgctactaccgccacagcctcaccgtcctccagagagccgtccgctcctggaatgcccacaaccacaagcatccaatgacggcggcggtggcgccgtcgctgctggccgtccaggccgtcgtcgccgagtttgaccgcttcctcgacgcgtacgacttcaacgccgtgggatggtcgcgcgaccacccgatggccgcggcagcggggagattcttggacaagaggaacccgaacacggacaagaacaacccgagcggccttgccggcgtggccaggcggttcgtgatgttcaacggtgccgtctgtgaggcgcagctgcggtggctcgacggcgtgctgcgggggctgatgtggaactatgagggggtgatgcgcgtggtgcaccggtggacccgaggccccacctgtcatcgtctccccccaaccgtctcctcctctctcctttcccccgaggccccacctgtcgggtccttcccccacctcccgccgatcccggtgtcgccgtcgctcgtccgcacctcggcatcgccggtcttcgccgcctccctcgtttttctccgccggccattgccgcccctccggtga

SEQ ID NO: 13688 - DNA, 1701 bp, Oryza sativa
  Clone ID: TFbOSC400711j.C1.o10.gm
atggccaccaccacctcctcttccgcctccgatcccgccgccatttcgccgacgccctcgcagcaacatgccagcagcacggtgaagacattggatgaccggcggcctgctggcaccagcagcagcgccggcgagacggaaccgaaggcggcggttgagccgcaggagtacccacggcgacccggagtgccggactgcagctactacgtggagttcgggagctgcaagttcgggatgcgctgcctgtacaaccaccctgcgaagcatgccggcggttgcgacaagctggagcacccgcaacggcccggggagcacgactgcctccactacctgaggttcgggagatgcaagtacgggatgaactgcaggttcaaccaccctcccgaccgcctgcctcagcagcaagtgcctgctgagcaaatccgttacacaagggatcaacttctcaaactgcgcgagactgttgatgtacctaaggacatcatgaaacttattcaagatattaatgtagaactccgtgctgaagatgaaagtcgggctccaaatgaaacaaattatgagactgacagccatgactggcattcacggtctttacaaactccagtggttgccgaggaagagaaatctcaggacgatactcgtgaagcaaaagaaccctatgctttaggttggaagcaaaaggagtttaacaagcaagaccaaaaaagcttccagtctgattctaaagctcaggctggccccaccttggctcttcataaggctgaagacccttggtcaatccagagaagcactgtccctgagaaatacaaagttcttaaaacagtaaaaggtatactgaacttattgacaccagagaagttcgatattctgaaggaccaactaatagaagcaggaatcactagaaccgatattttgaaggatgttattgatcttatattagagaaggcggttgctgaaccaactttatgtccgatgtatgcccaattttgctcttatctaaatgaaaatatcacagcattccccccaaaagacactcattgtgaacaaattacattcaaacaagcactatcggacaaatgtcaacaagcatttgaaattgctcgcaatgttcgagccgacatctacaaattgactggacgagagcaagagatggagcgacgggataaagaaaggctagtgaaacatcaaatacttggaaagattcgtcttattcgtgatctgctcaagcaaaaaatggtcccagataagatagtacatcacattgctcaggcagtgacggattgtgaaaattttcactttgaaccacttgagaatgttgatttgctaaatataatctttgacggcgtgctggattcggttttaccaggaactgaagctaataaagttgtcaatgctattattggtatcgagaaatgttccattgcttcaaatgatgctgggatcattcataaggatgttaataggcgaaatgaggaggcaaaattacaaaaatcttctaatgatatcccgaataacttgatcgatcctcagaaaaattatgtggtttcagcttttggtcatcccattgagaatgagaagcaaacaaattcagaaacatccgtgagaatcagtgaagtaggatgcggtatttctgagatcatggagttaattgttaatgctggtgctgaggaaggcaccctcaaggaagacttcggtggctaa

SEQ ID NO: 13689 - DNA, 1260 bp, Oryza sativa
  Clone ID: TFbOSC400964j.C1.o103.np
atggacgacgccggaagggcctccgctccagcggtggtgacgctccccgccaccgccgccgccacggacgagccttcccacgaccccgccgctctctatggagagggtatgtggcagcagatgaccatgagcggcagtggcgctatgcaacctggaccatatcctgagcggtccggagaaccggactgcacttactacctcaggactggattgtgcagaatgaaaggagaataccctgagaggatggggcaaccagaatgtcagtattatctgaagactggaacatgcaagtttgggcctacatgcaaattccatcatcccagagaaaaagctggaattgcagggagggtgcagctaaacacattaggatatccactccgaccgagtgaaaaggagtgtgcatattacttaaaaacaggacagtgtaaatatgggaatacatgtaaatttcaccatccagaacttttcaatgctatggcttcttcacgtggttcacctatttatccttctgtacattcctctgcaaccgcgggtccaccttatactggaacaatggctagctgggcttttccaagaggttcttttattccaagccctagatggcagaatccctcaaattatgcaccgatgattgtaccgcaaggtcttgttcaagtaccaagctggaactcatatactggccaaatgatgcctgtttcatcttctgagagtcgactgcagtccccaggggctcaacaaacctatggaacttctcagcaagttgatgccagtgcaggcaatcagggaatgttgtcaccctacagatctagttcatatcctgtacctcaatacgcattgcagagagagaatgtatttcctgagagacctgatcaaccagaatgtcaatactacatgaagactggagactgtaaatttggtgcggtgtgcaagttccatcatccccgggtgcgatcaatgcctactccagattgtgtcttgagtccagtgggtcttccactacgtccgggagaagaactgtgcaagttctattctcgctatggcatctgcaagttcggcgcgaattgcaaatttgaccatccaacgatggctcctccaatgggagtgtatgcctacggctctgcttcaactaatgtacctatgattgtcggtatcggctttagtggatcttggcagcaaggagccaaggacccgacagattcctccggggctccaccaaacacacatgtactcggagaagaccctatcccatatcgtaaaatc

SEQ ID NO: 13690 - DNA, 1830 bp, Oryza sativa
  Clone ID: TFbOSC22496j.C1.o9.fg
atgctcctcgtcgacggcgagcccgtctccgcctccgcctcccccaccttcggctcctcccgcggggtgcgcctacttggttgttggagggatttcttcccaccccgtctctcaccctcccgattcttgcaggggagcggcgggagggagctggtggcggcgctcatggggaaccccgggctccgcgccgcatcggagaggctcagggcggagccggagaggcggatctcgtcggggccagaggaggatgatgcggacgccgcggcggcggcggcgccgaggcacgtgtacgtgttccagcgggagttcgccacggttgatccggcgcgcgtcgagttagtgggcacagatgaggtgactacatgcgtgggtgtagtaattcgcaacaacaagactggaatgacctccattagccacatggacttcccaaaaattgtggagggagggctcaaacagatgttagaattacttggtgatgacaatgcaccgtttgatgttgtacattctgctggaaggaagcacatcaaacaggaagggtattcctatccactatgttgcaggatacttgaggtgttgtataagtcccggcagcaattccatcttcgtacattttgtgtccttgggagcaataccacaactgattcatacgggaatacacggccaataatcggtggatttgtggtggagacctcatctggggctgttaatccagcaagctttgaaatgaattcaaggtgtccagatgaaatagttaggagaattcgtgtgagcgtttcttcttatgatccaaattggcaaggaaggctactagagacttatgatactcacagtgatgcttttgaaattgcacctgcctgctggatgccggattgggctgaaatggcatcatcacttaaccagctatcggactctgaggtcttgttgcagtgctccacctctccagctgccgagccaccacattttgtggaaaatgagagaaggatatggagatacttgattgaaaatccatattggcaagacacatttccgaaatacaagcctcgggtcttccataggaccagtgatggaagtacttctggctgtccttttggttcaagttgtcattttctccataacttccctggtggctaccaggctgctgcaaagatgaccagccatggtgggacagctgttgcagctcctcctggaagaatgcctttaggacctggtgctcctaatgggccacctacatccagcgtgaaaactcgcatgtgtaacaagtacaacactgcagaaggatgtaaatggggtagcaagtgtcattttgctcatggagagagggagcttggaaagccgatgctgctggacaactcaatgccacatccaatgggatcaatgccgtttgaggctccaccaatgcctggcccggacatcgttcctccctcaacctttggtgcctcagccacagcaaagatcagtgttgatgcatccctggctggcggtatcattgggaagggtggaaccaacacaaagcatatatcccggatgactggggccaagctagccatccgggataacgagtccaaccccaacctcaagaatatcgagcttgagggtacatttgaccagatcaaacatgctagtgctatggtcacggagctaatcgtccgcatcagtggtaatgcccctccagccaagaacccgggcagggggtcgcatgctggggggcctggaagcaacttcaagaccaagctgtgtgagaacttcaacaaaggctcctgcacgtttggagacaggtgtcatttcgcccatggtgaaagtgagctgcgcaagccgccggctgctgcttga

SEQ ID NO: 13691 - DNA, 1491 bp, Oryza sativa
  Clone ID: TFbOSC26691j.C1.o8.fg
atggcggactcggaggatggagatcacgttgcgacgacgacgacggagcagcgctacgacgacgacgggcacctcgtccccagcagcggcggccaggaggaggagggatccggcggccgcgacgtcgtcgtccccggcggccacgtcgctgaggattaccgctctggcgttggcgtccccgtcggccgagacgcaggcggcgccacctcctccccgccgcagccagtccacgtcaccccgagcatcctcgtcggcagcatccacgcgccggtcttccagggcgagctcgtcggcatgaagttcggggtcgggtcaggctccatgggtgccggcaccagcgcgaccaggcgcctccccgcgaccggttttggtgctctgccgaccagcagcatggcggaggatagtgccgaccacgccgacgacgaccacctcgccgaggaggaggaggaggaggaggaggagcactacatcgacgacgggcccctcgtccccagcagcggcggccaggaggaggagggatccggcggccgccacgtcttcgtccccggcggccacgatggtgaggaggaccaccccgacgacctcgtcgccgacctcgacctcgacctactcgtcgacggcgtagtcggccctgtccccggtggccacctcaacgcagatgcccccgccttcgtccccaccacccgtgggcgccaggacctctattccgccctctcctcatccgcccccgccgccggttaccggtaccgccactacatcacctcgtccgcgctcgcagaagccggccacgtgtccccattcctcggtctcccgtacgccacggccttcgattctccgctcgaccgcgagttggtcggcccgtcgtcagcgccgccgccgtgctccgccgctagccgtgcctggttagtgcgctgttcctcaccgctctccgactccgagtggactcggcgttcgatcctggcgcgagaggctgcacacacaccggcctccaccgtcactgggcgtgggcggttcgagttcgtgcccattcccggcgcaccctatgctccgccgccgtcattcgcccccatcgccgccggagctggaccagcagcgcgaccgctacagcagctggcattcggactggaggaacacaagacgaagctgtgcgcggaatattattcccgtgggcttggttgtcctcgtggcaacacatgcaagtacgcccatggagaagatgacctgcgtttggtggtggcggtgagctctctagccgacgccggtgagggctcctcgtcctcggattcgtccttcgccgctttgggaggggaagacaagtacaagacgaagctatgcaagacgttcacgagtggtggattatgcctgtttgcagccaactgcaggttcgcgcatggggaggtggagcttgggaagaaggagccgtgctggtatttcttctccggtcagacctgcccccgcggtgacacctgtggtttccggcattcctactag

SEQ ID NO: 13692 - DNA, 1605 bp, Oryza sativa
  Clone ID: TFbOSC418457j.C1.o20.gm
atgtcggtgatggacgccaatcaggcgtacgctcggcaccactttgacggcggacacctgcgtggtgaccgcgccgacgtgctggcgcagcaggctgggatggatatcggcagcatggcggactcggaggatggagatcacgttgcgacgacgacgacggagcagcgctacgacgacgacgggcacctcgtccccagcagcggcggccaggaggaggagggatccggcggccgcgacgtcgtcgtccccggcggccacgtcgctgaggattaccgctctggcgttggcgtccccgtcggccgagacgcaggcggcgccacctcctccccgccgcagccagtccacgtcaccccgagcatcctcgtcggcagcatccacgcgccggtcttccagggcgagctcgtcggcatgaagttcggggtcgggtcaggctccatgggtgccggcaccagcgcgaccaggcgcctccccgcgaccggttttggtgctctgccgaccagcagcatggcggaggatagtgccgaccacgccgacgacgaccacctcgccgaggaggaggaggaggaggaggaggagcactacatcgacgacgggcccctcgtccccagcagcggcggccaggaggaggagggatccggcggccgccacgtcttcgtccccggcggccacgatggtgaggaggaccaccccgacgacctcgtcgccgacctcgacctcgacctactcgtcgacggcgtagtcggccctgtccccggtggccacctcaacgcagatgcccccgccttcgtccccaccacccgtgggcgccaggacctctattccgccctttccttatccgcccccgccgccggttaccggtaccgccactacatcacctcgtccgcgctcgcagaagccggccacgtgtccccattcctcggtctcccgtacgccacggccttcgattctccgctcgaccgcgagttggtcggcccgtcgtcagcgccgccgccgtgctccgccgctagccgtgcctggttagtgcgctgttcctcaccgctctccgactccgagtggactcggcgttcgatcctggcgcgagaggctgcacacacaccggcctccaccgtcactgggcgtgggcggttcgagttcgtgcccattcccggcgcaccctatgctccgccgccgtcattcgcccccatcgccgccggagctggaccagcagcgcgaccgctacagcagctggcattcggactggaggaacacaagacgaagctgtgcgcggaatattattcccgtgggcttggttgtcctcgtggcaacacatgcaagtacgcccatggagaagatgacctgcgtttggtggtggcggtgagctctctagccgacgccggtgagggctcctcgtcctcggattcgtccttcgccgctttgggaggggaagacaagtacaagacgaagctatgcaagacgttcacgagtggtggattatgcctgtttgcagccaactgcaggttcgcgcatggggaggtggagcttgggaagaaggagccgtgctggtatttcttctccggtcagacctgcccccgcggtgacacctgtggtttccggcattcctactag

SEQ ID NO: 13693 - DNA, 1104 bp, Oryza sativa
  Clone ID: TFbOSC416788j.C1.o1.fg
atggattacaccaacgccatccacatcatcccggacgcggcgggccccgacgcctgggcgaacgcggcggcgcagggcggggacgccgggatatgggccaccgaggacgactacaacagccagtggaacgccgacggcggcggcggcggctcctcgagggccgggagcgagcagccacctccgggcaagaaatcccgcggcggcggcggcggcgaaggcggcgggaacacgagcaagtcgcgggcgatcgggaagatgttcttcaagacgaagctgtgctgcaagttcagggcggggacctgcccctacgtcaccaactgcaacttcgcccacggcatggaggagctccgcaagccgccgcccaactggcaggagatcgtcgcggcgcacgaggaggccacggaggcgagggaggagcaccagatccccatcatgacgtcgtcgggacccaccgccggcggcgacgcgggctgcggcggcggcggcggcggcggctccgggagggcctacaaggggaggcactgcaagaagttctacaccgacgagggatgcccctacggcgacgcgtgcacgttcctccacgacgagcagtccaaggccagggagagcgtcgcgatcagcctctcgccgagcgtcggcggcggcggcggtggcgggagctacaattctgcggccgccgcggccgcctccgcctccgccgcggcggggaatgggccgatgcagaagccgtcgaactggaagacgaggatctgtaacaagtgggagatgactgggtactgcccctttggcagcaaatgccacttcgctcatggagcagctgaactccacaagtatggtgggggacttgttgacatagacagcagggatgctgcagcaactcccgactccaagcaagctgtggtatctgcgaaagctccagcagagaccgctgctgcatccaccacagtgctccctcatgcagacgtgtaccatctaggcgtgcaggcgcagcgttctaccattgccggccaaaggtctgggcaggtacagaggcccattcagaaatggaagggccctgacaagatcagcaggatctatggtgactggatagacgaaaccgagtag

SEQ ID NO: 13694 - DNA, 1164 bp, Oryza sativa
  Clone ID: TFbOSC400011j.C1.o3.fg
atgcaggaagctcttctacctccggctcatccaggccgcttctactcggactttggcccgaagccgttcggcagcggagatcaacggctctcctcgcccaacctgctgaccaacggtggagatctcttctacggctgctactcccccttcagccctacccgcgtgctctcgccgccgccgccgcggcgcgccgcctcgttctcccactgctcgtcctcctccgactccgtcgtcgacgacggagatggtgcgggggcagcggcagcgaccgagcaccgcctccacctcgcccacctcgcgctccagtaccaggagatggccaaccgcttcgagctctgcctctcccacctcgccgatgccgcggacgaggcggccgcgctccgtcaggagaacgccgagctccgcgtcgccaacaacgacctcgcatgccgcatcgccaagttcggcggaaggcagagctccgccatcgccctcgccggtgacctccgccgcctccgcctccccaaggagcagaccgtgccagctcttcctcctccgccgcagtctccgccggccgcactgatgaatcccgtcgccgtccccgagaagcaggctgttcttccgaagagcatctccatccgttcgaccggataccagaagctgaaccagggcggcaagcatcgcgtgtcgaagccggtgaacgtcggctcggtgagaccaaatcccccaattcctccattgtgttgtgtctggctcccactcttgcagcgcactgactcctgtgctgaatccaaaatcccaatcctaactagtacgatgttcttgatgcgacaatgcaagcagcagcgcgtgttcgtgggcattgacggcgcggagggaggcgagcacaaagttggtgtgaagaaggaggagccgcccatgggtgggctggagttcgaggtgtacaaccagggcatgttcaagacggagctgtgcaacaagtgggaggagaccggggcttgcccctacggcgaccagtgccagttcgcccacggcgtcgcggagctccgccccgtcatccgccaccctcgctacaagacccaggtctgccgcatggtgctcgccggcggcgtctgcccctacggccaccgctgccacttccgccactccatcacccccgccgaccgcttctccttcggccattga

SEQ ID NO: 13695 - DNA, 1326 bp, Oryza sativa
  Clone ID: TFbOSC400848j.C1.o12.fg
atgtcggaccccttctacccgcacggccacggcggcgccgcgggcggcgagggcgcggccgcggcggggtactcgtcctacgaggtcgacctcatcgcggcccgctacggcggccgcccgctcgccaacccttcctcggccgccgccgacctcgacgcgcggctggccggcgcgaggcgatccatgggagttctctatcatcagccaattatgggaagccatagtactgttgaacagattgaggctttgtattcttcaaatactatgaccaagcgccctaggcttgaaagcagccttcctatatatccacagcgaccgggggaaaaggactgtgccttctatatgatgacccgaacctgtaaattcggaggttcctgcaaatttgaccatccacaatgggttccagagggtgggattccaaattggaaagaggctgcaaatgttgaagaatcctatccagaacaagaaggggaaccagattgtcctttttttatgaagactggtaaatgcaagtttggatcgaaatgcaagttcaatcatccaaaggaaaaggttaatgcattagcgtctggaaataccaatgatttttatgcaaaaacaggcaaatgcaaatttcgtgcaatgtgtaagttcaatcatcccaaggatattgaaataccttcaagtcaaaatgaacccgaaagtgcagtgactgttgaaggagaaacggatattggttcagcagctgattcagtttcagcgaagatgcaaactccagttgctgctgcgcaagagtttaactctaaagggctgcctatgagaccaggtgaagttgattgtcctttttacatgaagatgggcagttgcaagttcggttctacttgtcgattcaaccatcctgatcgtctagttttaaattttccacttccactgggtcaaaccattctccctactccggaatccatgctgctaaattcatctgcaaacttcatgcaaggctttgattttcatgcggcacacatgcctgttggacctgggccagtcacctatccccagaggcctggagcaactgtttgtgatttctacatgaagacaggattttgcaagtttgctgaccgatgcaagtttcaccacccaattgatcgttctgctcccgatccctctgcaaactgggagcctgctgaggagtctgtgcagcttactcttgctggcctaccaagaagagaggatgccgtggtatgtgccttctacatgaagactggcgtgtgcaagtttggtatgcagtgcaagttcgaccacccaccccctcaggaggctatcgccaaggtgtcgaattcagggagctga

SEQ ID NO: 13696 - DNA, 2037 bp, Oryza sativa
  Clone ID: TFbOSC404615j.C1.o9.fg
atgtcgacggcggccgctgatcccgccgcggcggcggatgcggcggtcacgaggaaggagaggcggagggagcggaagaaggagcggcggcgccgggcgcggagggaggccgcggaggccgctcggaaggcggctgaggcgctcgcggccgacccggaggaggagcgccgcctccgggagctcgaggaggccgaggccgacgcgtccgagcgcgcgcggcgagccttcgaggacgcggagcgccggtggctggaggccgccgccgcgcgcgccgcggagaaggccgcggctgcgagagaggagtcgacggctccggaggattcctcccgcgagtataaagatgaccatggaaatggaaccgaggaggatgacgaatgggaatatgttgaagatggaccagcagagatcatatgggaaggaaatgaaatcactgtgaagaagaaaatggtcaaagtaccaaagaaagccaaggaaaaccagccaattcaacaggataaggcacattgcccatttcacctcaagacaggggcttgccgctttggagtgcgttgcagcagagttcatttttatcctgataaatcatgcactctgctcatgagaaacatgtatagtggtccaggccttgctttggagcaagatgaagggcttgagtgtacagatgaagagattgaacagagctatgaagaattttatgaagatgtgcacacagaatttctgaaatttggtgaacttgtgaactttaaggtgtgtcgaaatggatcactccatcttcgaggaaatgtttatgtgcattataaatcattggattcagctcttattgcctacagcagcatgaatggacggtattttgctgggaagcagataacatgtgaatttgttgctgtgacaagatggaaggttgccatatgtggtgaatacatgaggtcaagattcaagacatgttcacgtggaatcgcttgtaattttattcattgctttcgcaaccctggaggagattatgagtgggctgattgggataatcctcctcctagatactggattaggaagatggctgctctttttggtccctcggatgattctatctatggcaagccaagcgacaccccacatttagagcgctcacagagttcagacaggaggagaccgagaagttctgatcctaggtacacaccaagcagaacaagggatgaagatgcacataaacagcactcgtccagagattattcacattcgaagcatgaacgcagcagccatactgagcacagacgagacagaaaagaatcatctgcatcagataagcaccgacatcgagagattaaagataagaccagcaaatactcctctaacatggaaagtgaaagagagtcccacaagtacatgcgtgaagaaaaacataggattgaccatggaaatggaggtaaaggagaccatggtaaagttaggtcgaggaagaacagatctgaacgccaagaaagtttggagcctggatcttctggccggtcttcggacttcatcgatcaagacaccaccgagagtccttcaggcagcaagtccactggcaggcatcacaagaagaccaggaggcaatccttagaagagcacagcaccagaaggagctcaaggcatcgggacatggaagatgatggaagaggacagtctgtagctgtaaaacgcaaggatcaccatgatacatcggatgatagatgggtagcaacaaacagtgatgttgattcagacttggagactcaataccagaggtcaagtagtgaaggcagcaagctgggaatgaaatatcatgctcgatcagattcagaaactgggtacggaaggtcaagaagtggaacaaccaagagccgtagggaaaggaagcgtcagagtggaaacggtgagcgcagcgacactttagaggttacttcagattcagacaccagagatatgagctctgatgcatggaggagccgatcgagaagcagtgacgagaatctctcaacgcacaggtcaaggagaaaaagaagtcgcagtagtcatgattcctga

SEQ ID NO: 13697 - DNA, 1818 bp, Oryza sativa
  Clone ID: TFbOSC413661j.C1.o5.fg
atggcagacatgaagcaagaggaggatgagctagccgtggatcccggtgtcggtgctgtgtgcgatcctgtgacgaagctgcggttcgaagcgatcgtctgcctcctggataggattccgatcacgctgcagcagatcgacatgtttggccaggacgtggcgttccgcacgaagagaattggcaacatagaggcgttgctcgacttcctcaaaggaagcgcggccgcgacatggggagcgcgcgccggcgccggcgagccgatcgatgcgtcgtcgccggagcttcaccgtctggtggaggatgcagagacagcttaccgcgacgtccgcggcctccaacccagaatggtcgtgcaaatgccccgcgtgttccacaaggtgtgtctcccgaagctgcaccagctgctggtcatcgcgcgccgcctcctcgcccagaacgtggcgctccgccgacttctccttcagccagtgggctgtgacgtctctcccatggcgttggccgaggccgctgtaagttcggacgacttcgagcggcacggccgcaacaaggtcgtcatagacgagttcggctacgaggacctgctgcgccgccgccacaccggccacgagtcgcagaacgatgcggacgacgcagagcagcacggccgcgaggtcagagaaggcgagtacgaggacctgatcctgatgcgccaccgcgacaccagccacgagttgttgcaggatgatgcgcgccggcgccgcgcggatgcagaggcagagcagcaaggcggcgacggcgaggtcagagatgagtacgaggactacctgtgtcgccagctcggcgccgtctacagcgggcccgatcaaatctacgagcacgacatgcgaggtccggaaccagcacactcgccaaacacgcccgaccagatctacgtcccctgcgaaaggatgcttccctacccaagcaactgcgacaacgccgaggaccggattcatatggcatgtcttgctctcaagaacctggtaaaagacatggaaggaatctactctcctcgaggaaccttgtggcagtatctggaggacgtcatctctcttgcgcatgctctgtttctggagaacaccaagctccaccggttcactgatcaggcttcgcaccaggacttgccgttgcagccgccgcagggcttcccatttcaacagcagccgcagcacgatggctaccagcagccgggcgtcccgttccagcaaccgcagcaaggtggctactacggccacggccagggcatcatgtttcagcgaggtggctacctccaggatgtcccgttccagcactggcagtggcagcagggtggttacggacaaggcttcatgtttccgcaggctcagcatcaaggtggctacggccaaggtttcctgtccgagcagccgctgcccggtgaccccagcttcatgaacatgcaggctccttacgacggcgacgggggagtcctgttccagaagccgcagcactatcaccatgggcatgttccgagcgagaagggcgctattcaggccaaggggaagcagaagatgcgggaaccaaaaactgtcatgtgcccggactggtgcagaaccggacattgttcctctggtgacgggtgcgaatatgctcacagtcaagacgaactgcgggtaatcgacgcccgccccaagtacagaacagagccgtgccgttactggctagctgggaaagggtgctggtatggggacaaatgccggtacaagcagcaccgattagctcgggagccactgtatgtcgatccattcttgacaggtcatgaattgagaaataagacatag

SEQ ID NO: 13698 - DNA, 903 bp, Oryza sativa
  Clone ID: TFbOSC101298j.C1.o6.fg
atggaagtcggcggccgcaagaggggcaagcccgacggtgcgaacggcgccggcgggaagcgcgcgcgagaatcggagtcatttcaaaccggtgtaggaagcaaatcgaagccatgcaccaaatttttcagtacctctggttgcccctttggtgagggttgccacttcctccaccacttccctggtggctaccaagctgttgcaaagatgaccaatcttggtggtccagctattgcgccgcctccaggaagaatgccaatgggaaatgctgttcctgatgggccaccaacacccactgttaagactcgcctgtgcaacaagtataacactgcagagggatgcaaatggggggataagtgccactttgcgcacggtgagagggagctcggcaagcctatgttgatggatagctcaatgcctcccccaatgggaccaaggcccactggtcactttgcacctccaccaatgcctagccctgccatgtccactccagcaagctttggcgcttcggccacagccaagatcagtgttgatgcatctcttgcaggtggcataatcgggaggggtggggttaacacaaagcagatatccagagtcacaggggccaagctggccatccgtgatcatgaatcagacaccaacttgaaaaacattgagcttgagggcacatttgatcagatcaagaacgctagtgcaatggtgagggagctgattgtcagcatcggtggcggtgcccctccacaaggcaagaaacctgtgggaggatcccaccgcgggggaggccccggaagcaacttcaagaccaagctgtgcgagaacttcaccaaagggtcgtgcacttttggcgacaggtgccattttgcccatggtgaaaatgagcttcggaaatcagctgctgcttga

SEQ ID NO: 13699 - DNA, 1401 bp, Oryza sativa
  Clone ID: TFbOSC419228j.C1.o6.fg
atggagccgtacgcggcggcggaggggggaggaggaggaggaggtggaggcagcaccgacaccgggctcgaagagtcgatgtggaggatggggctgggcggcggcgggggtggcggaggggaggcggtggcggcagggaggctgccggagcggccgggggaggcggactgcgtctactacctccgcacgggggcttgcggctacggggagaactgccgctacaaccacccgcgcgatcgcgccgccgcagcagtgttaaatggaggtgggaagaccacacattcggcagagtatccagaacggccggggcaaccagtttgtgagtactatatgaagaatggaacttgtaagtttggctctaattgcaagtatgatcacccaagggaaggctctgtgcaagcagtcatgttaaattccagtggataccctctacgctcaggtgagaaagattgtacctactatgtcaaaactggccattgcaaatttggatctacatgtaaattccatcacccagaaattggtggagtttcagagacacctaacatgtatccaccagttcagcctcagcctatctcttcctctcatccatatcaacatcttgctggctggcaaatggggaggcctcctgttttgccaggatcatttttatcaggctcatatccaccaatgatgcttccgtccacagtcgtaccaatgcagggatggaacccttacatttcacctgtgaaccaagttgcgtcagctggggggcatcaaactgttcaagcagggccgttttatggcttatcgcaccaagggccttctgctgcagtcacttatggcagtcagtatgcaccgttatcttcttcaaccatgccttcaagtagcagtaaacaagaacctgcctttcctgcgcgacctgggcaacctgaatgccagtattatctgaagacagggagttgtaaatttggatctgcatgcaaatatcatcatcctcagtatttgaatacacctaagtctaactgtatgctgagtcctcttggtcttcctcttcggccgggtagccaaccatgtgcttactatacacagcatggattttgcaaatttggtccgacttgcaagtttgatcacccaatgggtactctaagctatagcccttcagcgtcatcgattactgatttgcctattgctccctatcccctcaattacgctgttgctcctgtggctccaccttcatcttcttctgatttgcggccagaataccttctaaccaaagagttttcagccaaccagtcagcgtcacctggtactacatgcggacctgctggagcaatgttaaaagcgtacgctccacacatgcttatccgacctcaaacttctggagctggtggcatggttacaactcatggtggagagctctaa

SEQ ID NO: 13700 - DNA, 2073 bp, Oryza sativa
  Clone ID: TFbOSC400151j.C1.o17.fg
atggcgagaatcaaagagctttgcaactccttttcctcagctgcattattgtatattggtagttctatctcgatctccatgcgcatgcatgattcgctgcacgcatatggcggggaggggtgggatggtggagtgggaggtggggcggcggcgggattcggaggacgtgatcgtgctgcgccggggccgccggcgaggaggcggccaccgccggtgaaggcggtggagccggagtccggcgggttcgcgtacgagccgccggagaagctgttctacaagacgagggtgtgcgagacgttcgtgaccagcggccggtgcatgttcgaggacggctgcacgttcgcccacggcgacgaggagctccgcccctcgctcaccgcgtgcgccggcggctggaggaagccttcgccgtcgttgtcggcggcggcgcctcccgtggcggtggcgccgacgcctccgccggcgcaggtcgtgcacgagctcctcgccaggggatccggctccggcggcggcggccaccgcgccatcaccaaggtgtgcttcgagttcagggacaagggcatctgctatttcggggagacctgcgccttcccccacgtctccgctgcagagatccgccagggctcaaggctgtcgtcgatgtcgtcgtcgtcgtgggagatgccggcacggaggagcgtggcggtgaccgtgcccaggacgttcgtctccgtgccgccggtggcgccgccgccgccgccgccccactaccgtgtcaacaacagcagcagctacaacgcggcatccatggccgccgcggcgcccgccgccagcgacgccaaccttgtcgcccagcagccgccgccggagcagggaggccggaagatgacccgcctggagatgctcagcctcaagaagatgaccggcatctacggcgactggctcgagggggcgagagagatgcggatctggtgttctttagtgcaggtgaagaggaggagaccggaggaggggaagagggggaggaggatgggatctgggattggagccgtgctggtgcttgttgcagcatggctaacatttgcgccgcctggtgctctggcttcttcgcgcagtataaaactttggatgaatcgcttcgattatcgtgggttgatgcaaccatttggtggcatatgtgagattcctattataaaactgagtccataccaattaaatgattacaatcaagaggcagtggagaaggggcaacatagatgggggaaatggtttgatctgagtattgcacaagaaaagttagtgaactccacaggtggttcaactgcttcaagctcacaccttgtttttgatccttcaaaatcaaagagactctcatggcatccaaggatcttcttgtatgaaggttttctttctgacatggagtgtgaccatttagtatctatgggacgtggtaatatggagtcatctttagcatttactgatggtgatagaaatagttcgtataacaacattgaggatatagttgtttccaagattgaggacaggatatcgctatggagctttcttccaaaagaaaatggagagagcattcaggtcttgaagtatggagtgaacagaagtggcagtatcaaggaggaacctaaatcaagcagtggtgcccataggcttgcgaccattttgatgtatctttctgatgtcaagcaaggtggtgaaactgttttccccagatctgagatgaaggatgctcaagctaaggagggggcaccatctcaatgttctggttatgcagtgcgaccagccaagggcaatgcaatactgctgttcaatttaaggcctgatggagaaacagataaggatagccaatatgaagaatgtcctgtcctcgaaggagagaaatggctagccataaaacatataaatttgagaaaatttgattatccaaaatcatcacttgcatccgaggatgagtgcacagatgaagatgataggtgtgtgagttgggctgctagtggtgagtgtgacaggaatccggtgtttatgataggaagctcagactactatggctcttgccgaaagagctgtcgagtgtgctga

SEQ ID NO: 13701 - DNA, 1437 bp, Oryza sativa
  Clone ID: TFbOSC400481j.C1.o19.fg
atggcggcgggagcaggagcgggcggcgggggcggggagggcgacagcaacgggggaggcacctccccgggtggcgtgtcggcggcggcgccggcgatcgggccccaccacctcggggttgccgccgcggaaggtgggggaggggttatttgctccgttctcttgtatttgaacctttgggggaagagagtgtctggtgtgagagaagcaatgtggcaaatgactttaggaggaggagagtctatggagtccactccataccctgagcggataggagagccagactgcagttattatatgaggactggactatgtaggtttgggatgacctgcaaattcaatcaccccccaaatagaaaactggctgttgctgctgcaaggatgaatggagagtatccttatagagttggtcaacctgagtgtcaatactacttgaaaactggaacgtgcaagtttggtgcaacatgcaagtttcatcaccccagggagaaggctgcacttgcaaaccgtgtacagttaaatgttctaggctacccgatgcgtccgaatgagaaggaatgtgcttactacttaagaacagggcagtgtaaatttgcaagcacatgtaagtttcatcatccacagccctctaatacaatggttgctgtacggaactctatgtattcacctggacagtctgcaacctctcctggtcaacatacttatcctggggccgtaacaaactggaccttgtcaagatctgcatcatttattgcaagccccaggtggcctggccattcaggctatgcacaagtaatcgttccccagggccttgttcaagttccagggtggaatccttatgctgcacaaatgggctcttcgtctccagatgaccagcaacgaacacctgtaaccactcaatactatggctcacgtcagagtgaaacaggtggtatgggagatcatggaatgtatcagtcataccaaggaggctctgttccagtcggtgtttacacagtacaaggggaaaatatatttcctgagagacctgatcaaccagagtgtcaattctacatgaaaactggagactgtaagtttggtgctgtttgcaagtttcatcaccccaaggagcgactggtacctgctccaaactgtgcattgaattcacttggtcttccactacgcccgggagaacctgtctgcacattctattctcgttacgggatctgcaagtttggtcctaattgcaaatttgaccatcctatgggaacccttatgtatggaagtgcaacatcaccaagaggtgatgtgtcatctatgcattatcagttgtcaccctcaccagggcatccaggaatattgcttgatggaggctctggaaggtctcaccgggttcctcagtctgattcccagcaaataccctctggcgatgggaatgccgagagagaggcatcataa

SEQ ID NO: 13702 - DNA, 915 bp, Oryza sativa
  Clone ID: TFbOSC413563j.C1.o4.fg
atggcggagcatttggcttcaatatttgggactgagaaggatagggttaactgccccttttacttcaagattggggcttgccgtcatggggatcgttgctcccgtctgcacaacaggccaactgtgtcgccgacaattgtgcttgctaacatgtatcagcgccctgatatgatcacaccaggagtcgatgctcaaggccaacctattgatcctgaaaagatgcaggagcactttgaggatttctatgaggatatctatgaggagctgagcaagtttggtgaggttgagaccctcaatgtctgtgataaccttgctgaccacatgataggcaatgtgtatgtccagttcagggaggaagaacaggcagtcgctgcgcataatgcccttcaaggtcgcttctactcagggcgcccaataattgttgagtattcccctgtgactgatttccgtgaggcgacctgtaggcagtttgaggagaacagctgcaaccgtgggggctactgtaattttatgcatgtaaagcagattggcagggagctcaggaggaagctttatggggggcgatccaggaggagccatgggagaagccgcagcccaagcccacgccacaggaggggcaatcgtgaccgtgatgatttccgccgtgaacgtgatggttatcgtggtggtggtgatggttaccgtggcggcggcggtggcggtggtggtgacggttaccgcggcggtgatagttaccgtggtggtggtggtggtggacgcaggggtgggggcagcaggtatgacaggtatgatgatggaggaaggcgcaggcatggcagccccccaaggcgtgcaaggagcccagtcagggaaagcagcgaggaacgcagggcgaagattgaacagtggaaccgtgaacgggaggaaaagccttga

SEQ ID NO: 13703 - DNA, 1680 bp, Oryza sativa
  Clone ID: TFbOSC401249j.C1.o75.fg
atgtcaagtgcgtacacagttcatcgctccatctctctcttgtctgttatccagctgaacaattctagtcagtggcgtgcagaaagaatcaaacaacagattaaggtccatttttgtgccaacaggcttgctcacagaaagttgttcgtcgcttctctttcctttgagaaggacatgactggaaacaaaagcttcatggagccaaggttttttggccccaaagtcttgagacaggcaaagcatccgatgaggcatgcagtgcatcatttttttacttttctttttgactacaagtattcagtaatcagagttttacagaacgaaaacgacgtcggccatgtcttccgtgccctcgccaagttcaagtcgctgctcctcgacgtcgtccgcaagaagagggcgccgacgagaggcggcggcggcaagaagtacgccatcggctaccgctcgagaccggagaagagcaagaagaggatcgccagcttcatgaagctgctgcgcttcaactgggccgccgccgccgccgtcacgccggctcgcgccaaggatctcgagctgcactaccacccgtactactacgactacgacgactcgacgtggaacgtggtggttccggccgacggcgcggcggaggagctgcgcggcggcggcggcgacgacggggaggactgcgggtacctgtgctggctggaggaggagacgtcggccggtgcattgccggctgccggagaaggagaagacggcggcaacggcaacggcgacggcgacggcaatggtgcggtgaacgagatcgacaggctcgcggagaggttcatcgcgaggtgccatgccaagttcttgctggagaagcaggagtcgtaccggaggtaccaggagatgatggccaggagcatcactatcggatgcccttttggcgagggttgtcatttctcgcactttgtccctggtgggtatcaagcagtagcaaaaacactcaatctaggcaacccagctgtgcctgcaccggcaagagctcctatggatcatgctgctggtggtaattctcatccagcttcttctggcaagacacgcatgtgcaccaagtataacactgcagaaggctgcaaatttggtgacaagtgccatttcgcccatggtgagagggaacttggcaagccagcttacatgtcccatgagagtgccatggctcctcctatgggtggtcgatatggaggccgacctgaaccacctccaccagccgctatgggtcctccagcaggaaactttggtgcatctgctactgccaagatcagcgttgatgcctcgcttgctggtggcataattgggaagggtggagtcaacacgaagcagatatgccgagtaactggggtcaagctctcaatacgtgaccatgaatcagattcaaacctgaagaacattgagctcgaaggcaatttcgaccagataaagcaggcaagcaacatggtgggtgagctcattgcaacaatcagcccgagcacaccagccaagaaacccgctggttcagcagcaggagcagcaccagcaggccgaggcggccccgggggcaggagcaactacaagaccaagctgtgcgagaacttcgtgaagggaacctgcacgttcggcgaccgatgccacttcgctcatggcgagaacgagcagcggaagggcgctgcttga

SEQ ID NO: 13704 - DNA, 1002 bp, Oryza sativa
  Clone ID: TFbOSC401329j.C1.o67.fg
atgcaggaagcgcttgtctccccggtgcgctcggcattggagctcaagccgttcaacttcggagaccagcggctcgcgtcctcgccgcgctacctccccagcggcgacgacgccctgtaccgctgctcctcccccttcagccccagcttcgggttctcctcgccgtcgccgctagccacctccgtctcgctctcgccgtcctcctccgcctccctcgtcgatgacggcgacgacggaggagcggccgccgacgccacggggcagcggctccagctcgcgcgcctcgcgctgcagtaccaggaggtggccgaccgctacgagctttgcctctcccacctcgccgaggccgccgaagaggcggcggcgctccgtcttgagaacgccgagctccgcgtcaccaacagcgacctcgccctccgtctcgcgctgctcagcgggaagcataccgccgccgtcgccgtcgccgacgagatccgtcggctccgcctcggcgagcagaaggtcgcggccgccaccaaggagcgcacgcccgagaagctcgccgtgctgccgaagagcatctccgtgcggtccacaagctacctcaagctgaaccagcaatcccaggccgccaccgccacttcggcggcccccaaccgcaagccccgcacgtcgtcgaacccaaccaaccccccgaactcgcagcgcgcgtacgacggcggcaagaaaggcgacgagcagaaggcgcaacccgcggacagcggcgcggagctggaggtgtacaaccagggcatgttcaagacggagctgtgcaacaagtgggaggagacgggagactgcccctacggcgaccagtgccagttcgcgcacggcgtcaccgagctccgccccgtcatccgccaccctcgctacaagaccgcggtgtgccgcatggtgctcgccggcgacgtctgcccctacggccaccgttgccacttccgccactcgctcacccccgccgaacgcctcctcctccgatcctag

SEQ ID NO: 13705 - DNA, 1124 bp, Oryza sativa
  Clone ID: TFbOSC401327j.C1.o1.fg
atggagcagccgcacgccgccgccgccgcagctggtggaggggagggggagggcggggctagccccgacaccggcctggaagggccgatgtggaggatggggctgggaggaggaggcgggggaggtggaggtggaggaggaggggatggggacgcggcggggaggctgccggagcggcccggggaggaggactgtgtctactacctccgcaccggcgcgtgcggcttcggtgaccgctgccgctacaaccacccgcgcgatcgcggcggcactgagtttggtggaggtgcaaggaatgcagcagcattggattatccagaaagggcgggtcaacctatatgcgagtattacatgaagactgggacttgcaaatttggtaccaattgcaaatatcaccatcctaagcaagatggagctgtgctacctgttatgttaaacaacagtggattccctatacgcctgggtgagaaggagtgctcctactacatgaaaactgggcaatgtaaatttggaactacatgtaaattccatcatccggaattcggtggtgttccgatgacccctggaatatacccaccattacagtctccatctatagcttcccctcatccatatgcttctcttgcaaattggcaaatggggagaccacctgtagttcctggatcatatataccaggctcatacaccccaatgatgctctcatctggaatgatcccattgcaaggatggagcccttatccggcttcggtaaaccctgtagtgtcaggtggagctcaacaaaatgttcaagctggacctgtgtacggcatggggcaccatggatcttcctctacaattgcttatggtggtccttacgttccatatgcttcctcaactggacaatcaagcaacaatcaacaagaacatggattccctgagcggccagggcagcctgattgtcaatattatatgagaacaggagattgcaaatttggagctacatgtaaatatcatcacccccgagagttgagtgcacctaaatcaggctatatggtcaactccctttgtcttccacttcgtccgggggctcagccttgtgcatactatgcccaaaatgggtattgcagatatggagttgcatgcaa

SEQ ID NO: 13706 - DNA, 5946 bp, Oryza sativa
  Clone ID: TFbOSC33100j.C1.o1.fg
atggcggcgcggcgatgcgggagcaggaggcgtcggcgccgtgcagcggcgactcgtgtcgggctcattagccgattggctgataccccatgcatcaaaagaggactagaatctccttcagcatggaagtccccttggttcgtagatatgcaatttcagggttcatacttcgtcagcccagctgatagaacctacaatgcgctaggatttgtgaagcagataaatgtgcagactgctgctgctttggcagaagcccgtgaggtgctggtaagtggcggacaatctgagaacataaattctgggaaggaaaacctggagagtccaaatgctaagaaggaaccaggagcaacaaccaaattgcaagcaaaaatcaagattggcaaaggcttgctaccacctttgccaatggccgcgacggagcacaagccggccggaaggaagacagcggagaaggtggaagaaaagccatctcctccgccattactcctgcttctgctcggtgtctgtttcctgtggggggaaagcccaaggaagcaagcaagactaaaatcagctattgttgttccggagacgagaaagttaagtgtgtttaatcgattgagtaaaggcgaacctggagctccttcatcaatctggcaagaggtgaaaccgagattttggtggcgccagggcagggcacctcttccggccacggcgtccaggcgcccaaccaccggagtaattccagcctggcgtcccttcaatccagcaactttaggccgttgcttgcgttgcctcgctcaagaccacaaaattgcagactgcagagaccctcccagatgctacatttgcaagcgcagtggccacatatcttctggttgcccttcaaaatacaagaacaaaccctcaatattttcctgtatctactccactcatccagcaccaccctccaagcaagaaatccccaatccccttgccttccctccactgactggccacaaagcaccagtgcgcgaaaggcttggccccaaaatggattacatacctgggttgccggagaaccatcctgcttgtggttatgcggtggttgtcgctgacgctgcaatggagcacgaagctatgcggttgtacaaccatggggccgtcatcaaggcccggctgcccaactacgacgtcagcgccaaggagatggcgcaggcgttgcagcagcaagtgggaactcccaactacgacgtcagaaggtgctcgaagatgtctgcatcgtcgaccaaccccaatctccttcctcgggtgtcggtcttcactcttttcccggccggggtagggcaggtgctggagacgggtggcatgcccacgcccagccaggaggtcgcctcggcacctctgggtcgtgtccgccatctgctcattcatcttgacatggtggaggactggaggccattgccggcgaggtcctcaaactccagcggctccacagactccgatgatccaccgaggcggcgcgtgcaccgctttgactggcatttgggctatgaggacggtgtttcgccgccgccgctgcagcctccgcagccgccactgcctgtacggagacttcacgaggagcgcgggcgaccggaacagcggggcattgacttgcgtaaccggctgtcgcagcgagggagccccaaggcggaaacgacggccggtaccgcagccgcaccccccgtggcggcaatcgccacttcgccggccatcgggtgggtcgctccccagccaggcgcccatccaggccgccttctcgccgccggcgctcttgccggtcgcgctcgccaagcaaggggcgtcgtgcggtctcggagagtcgctgtcttcgcgggtgcgcttcccaaggtggtgggggcgacacgggagggggaggacccgatgtttctcgagctggcggtggcggcagcgttccacgcggagaagtcagcgaacgcatctaccctagaagctggggcgtcggttcctattgggtcagcggctcctcttgggccggtggcgcctattgggccagtttctcctgggccggtggcgcctcttgggccggatgggtcagctgcgtcccctggcttgatagcttctcctgggcttgggcttctcgagctggtgggggagcaaatggaaggcacggcgacccagcccatgcaaggaggagttgagccgttttttgctcctctgccaccgccgcttgtggcaacaccgccagtgcgtcgtcgcgggaggccacgcaagaaagttctgcttcccagtcgtcatagcaagcgtctcgaggcacggccatctccggttctaatctcgatgcgagctcaggttcgcattatgaaagagatgagggtccttaagccgggagaaccggtaggtgatgaggcagtggctgagtacatcaagcgcttccaggaccccttgccgacggtcgtggtgcaagggattcgcgcgcttactgggttggacagcggcaagcctctgccgccggatgtgacagaggaggctgatggtgccacgccggaatggtgcacatctctaggagttacttatggttcaagaatgattgaaggcctcaaaattctgaattggaatgtcagagggttgaacaacccggcaaggagagaggctatctgtgaggttgcgaataatgcagatgcgagcatactttgcatccaggaaactaaattagctaacatagaccagtttttagggcgggaaataggtggttcccgactgaggcgttttgaatttctccctgctgatggtgtaagaggtggtgtagcaattttctgggatgacacaaaggtgcaggtcgacaacacacaaattcataccttttccgtttcaattagggcccaagtgataggaggaaatgtcccttttattctcacctccgtatgtgggccttcggaggatgaacataaatcagacttccttgcagaactagaatcgttagtgccgcagccattgctgccctgggttgttttgggagactttaacttgatttgtgaagcaagtgataaaaataatctgaatttagataggagaaggatggggcaatttaggagcactctaaatagatgttgtctcaaggagttcaagctccaaaataggaaattcacatggagcaatgagcaggaagcgcctactctggaaagaattgacaaagttttttgtaatattgatggtgacatcctgttctccaaccacacactgcaagccctctcctcatcctgttcagaccattgccctttgcttcttgctttcactgtaagcccacccaaaagggtagtcttccgctttgaaaatttctgggtctgggtgccgggattcatggaggtagtgcaacaagcctggtcatctcacacttttggtggacatccatttacaaaactcagccacaaattgacagccaccgctaaagctctcaggaagtggagtagaagtctgtttggagagatcaaaatgcaatttcacgtggctcaggaggtgattctccgattggatttggcccaggaagataggatccttactgctgatgaacaccagctcaggaaagacctcaagctaagaattttggggctggcagcagtggcaaagtcgaagaaaaggcagagatcgcgattgacatggctaaaagaaggggatgccaacacaaagtttttccacattcacgcaaactcgaggagaaggaaaaaccacattcaccaactccatacaacaagtgctatcctgacagaacatgaggaaaaaagtgaggcgcttttcaaccatttcaactcaatcctaggcaacaaggaggcgcgaaattgcaccttaaattggaacgcgatcgatctaccacaggttaaccccgatgaactagatgaaccttttacagaggaggaagtttgggccgctttaaagcaaatgcaagcagaaaaggccccaggtccagatggctttaatggaggaaactttggagtactcaacagagcagcaattaccttgcttccaaagaggaacgcccctaccttggtgaccgattttaggccaatcagcctcattcactccgtcgccaagctgatatccaaagttctagcaataaggcttgccaggcagatggatggcctgatctcggttgcacagagcgccttcatcaaaaaaagatgcattcaagacaacttcctgtatgttcggaacatgctcaggaacctaaatgccagcaaaaagccaacactttttttcaagctagacattgctagagcttttgattcggtctcctgggaatatttacttgaactgatgcaaaacatgggttttggcccccggtggagaaattggatctgtttgctcttttccaccgccacttccaaggtagtcctaaatggagaccagggggaatgcattgcacacagacgtggcttgaggcaaggggaccccatatccccctatctctttatcctggctatcgaccccctacaaaggcttctacatctggcgaccgaaggtgggcaactaaccaacatcggaagtcgccatgctagattgaggacttcgctttatgcagatgatgcagctgtttttctcaaccctgtacaaagcgaggtggatgttcttattaccatgcttagggactttggcaaggcaacagggctgcacgtcaatcttggaaaaagtctggtggcaccaattcgatgccaggaagtagatctggacgacgtcttgtgtagtttttcgggggcaagagccagcttcccactgacttacctagggctaccactcactcctggccgcctacgtaaggtgcatttccagcctctccaggataagatcaaaggtcggctctcgggatggaagccatcattgttgtacatgggggggcgccgaattatggtgaactcagttctaagtgccatcccaacttacaccctcacggtgctgaaaccgccgaaacaatctcttcaagaaattgacaaagcaagaaggcggttcctgtgggcaggtaacgagaatatgcatggcggaaaatgcaaggtcaattggcttaaagtttgctcacctgtccggacgccagagaagccttggatagggactgaaacaccctgtgatgaattggataaggatcttttcgcggcatcaacgagagtccagattggtgacggacaaaaggcgagcttttgggaatcaaattggattggtggccaaagactaaaaagtcaagcaccgaatctttataggcattcgaagaggaaaacccgcaccgtccaagacgccctgcaacaaggaagatggattaacgacatcctccacagcctcaccattccccttcttgatgaattcttccatgtttgggaaattttagcccgtaacaccccacaactaacagagggggtacaagactcgattgtttggcaatggacaactaatggggaatatagtgcaaaatccgcgtaccaattccaattcaatggaatggtactcttgccatcaacaaagttgtcttgggaggcatgggctccggtaaagtgcaaaatcttcagttggttggttcttcaaaaccgggtgtggacagctgaccggttacagatcaggggatggccaaataattatttctaccagctatgctttcgaaacctcgaaacaatcgaccatcttctgtttgaatgcctggtctcaaagcaaatttggtttgggattctcacatggctgcaccaagggcacatcatcccaaaatggaacacaagtagaaacctcttagattggtggacacaaggaacaagcgacctggaagcaacaaaacagaaaggactcagaactctcttcttgctcattgcttgggaaatctggaaggaacgaaatgcaagaatctttagagcaaaggaggcgacagtacaccagatgattagtcgtatccaagaggaattaggttggtggagtatggccggcgctaaacacattgggagaatgttgccatga

SEQ ID NO: 13707 - DNA, 1389 bp, Oryza sativa
  Clone ID: TFbOSC900317j.C1.o10.fg
atggcacctcaaccaacctgtcagacttgtgtccgcaactaccttggttctaaggaagacccagctttgtcagaaaatccaaatcaactagctgaacaagtcaccaaccaagttgccaagactgataatactgttcctggaccaaacaaggaagttgcaaccagaaatcaacactcctcaatggatatttatcagattctagccaatcagactcagatgctacaagaaatagctcaaaatttggcttctatacaacaacaactgctactaccacagcccaaggtgaatccagacaagagtaagaatgaggccgcagaaatacaaggaacacaatcagtagaaggcactgatacccataaagagaagaacaaagaattcttaaatgtgatgattacagggatgaaaaccccacttcgagctaataattgccccaaccttcagaactcaatcaataaatccgtatcgcgagaaaatagcatgattaaagaaggaagttgtcacaaaagaaagaccttgccatcagaagttgacatgcaagatgtcccacaatgtcagacaatgcaatcttgccaaaacttacccaagtcccccaccctcaaatcaaagaagatcagacacgttcccggattcatatgcttcatttgccacaaaattggccattacatgagacactgcccccaaaaaccctatatggatgcaccactacaagctaatatgagcacctcaaggatgcccttctatccccaaggaagcccaaattcgccaaatgttaatgcagtacgttcaaccttccctgatgacaaaagagcaaaagcatcctgcgacatgtgccaagacatccaagaaaagaaagagatgcaagaatacaagagacgcaaagtaatgtccctagagattcaagcaaaagaagatttgtgtcgaaaaacaaactcgccagcacaatactatcagaaagcatctcagcattcaactagttccggttctacgtctcgttcgactatgtcagaacctggtcagcaagccacaatgatcaacagtaatagccatgaaggaagcaactccgtaccatgccctacaccttcaaaaagacgtggttataaggcaggagtcgaatgtttcatctgccatgagatgggacactattcatggtgctgccctcagaaagtcaagtcaaaacgagtccaaccaacaacaagccttcccaacgtatctggaccaaaaagttcaaagtcaccaaacagtggttctgcctcgttgacctcaccgcccgttggacaaggtcgtctgaaccatgtgcaagtagaaacaaacggaaaagttgggaatctcgagcaagttgaaggagcaggagaagaacaggttccacaggcaagagcagagccacagtaa

SEQ ID NO: 13708 - DNA, 835 bp, Oryza sativa
  Clone ID: TFbOSC28031j.C1.o1.np
ttctatagaagatcctacacatattattacatggatggaatttactacaacttttagagatgcttttatacctacagctgtgatcaggatgaaaaagaatgaatttcgtagattgaggcaaggttttatgacagtacaagaatatttgattaaatttacacaacttgctcgatatgccgcctcggacattcaagatgaaaaagaaaagattgaaagatttatagaaggactacgtgatgaacttcgaggaccaatgattagtcaagatcatgaaaattttcaaagcctagtcaataaagtggttaggctagaaaatgatcgtagaatggtggaaggactccctaagagaagaatgaatttacaatgacaatcactaactagaggttcactacaagttcggaggccttatccatttaaggcatctctacccaatgcaaggccaggcatgccaccaatactaccaagacctggattaaaaatggaagactctccttgttatgtttgtgggaaaattggacattttgcaagactatgccctaatcgtcaaaatatgggaggccaaacttcttatcagaaaccatctactacaggttttataaagaaaaatcctccaataattaagagtggacataatcttggacgtggtcaagtacatcatattaaagcagaagaagctcaacaagatcctaatatattgatgggtatgttcaccataaactctaaaccagttactattctatttgattctggtgcctctcattcctttctatctgccaaagccaattggaatcagtctttaccttaaagataatttagataaggctgtgctaataca

SEQ ID NO: 13709 - DNA, 2022 bp, Oryza sativa
  Clone ID: TFbOSC28041j.C1.o3.fg
atgccaccaatactaccaagacctggattaaaaatggaagactctccttgttatgtttgtgggaaaattggacattttgcaagactatgccctaatcgtcaaaatatgggaggccaaacttcttatcagaaaccatctactacaggttttataaagaaaaatcctccaataattaagagtggacataatcttggacgtggtcaagtacatcatattaaagcagaagaagctcaacaagatcctaatatattgatggatatcattttgggcatggattggttagccaagaataatggactgatcaattgtgcaacaagagaggttatccttactgatgaacaaggaatgaatacaaggataatagttaaatccaatctatctatggaacaacatatgacagacatttgtatgcttaaaccaaaagaagaagttccagtggtgcaagaatatttcgatgtatttcctgaagaactaagttcattacctccagatcgggaaatagaatttattatagaattacttcctggaatggcacctatatcaaaaagaccctataggatgccaattaatgaattggaagaattgaagaaacagatagctaagctgcaagaaaaaggctttattcgaccaagttcttcagcttggggagctcttgtattattcgtaaagaagaaagatggaagtttaagaatgtgtgtagactaccgggctttaaatgaagtagctattaaaaacaaatatcccttaccaagaatcgatgatctatttgatcaattaaaaggagcaagtgtattttctaaaatagatcttcgatcagcatatcatcagttgaaaattaggcaagaagcatttggattaaccaatgcccctgcctatttcatgaatcttatgaacaagatatttatggaatatctggatcaatttgtggttgtatttattgatgacattctgatatattccaaaaataaggaagaacataaacaacacctacgaatgatggatcttaatcttcggcaaagaagatggttagaattaattaaggactacaatttggaaattctataccatccaggaaaagccaacgtagttgctgatgccttaagccgaaaagctaattgcaatctacaacaagaaataatatcagaacaattgcaagcagaaatgcttaaactaaatctgggtattattaagtttgaagaattaaacactttggagttaaaacctaccctaatggatcaaataaaagaacatcagaaggaacattctgaaatacaaacttttaaggaacgaaaggtacaaggaaaggctgcagatattaccgaagacctggaaggaatattttggtacggagatagaattgtcgtaccacaatcaggaaacttgaggaaggtaatactaaaggaagcacatgattcagcctactctttacacccaggtagtacaaaaatgtaccatgatttgaaagacttatactggtggccaaatatgaaacgacatattgcagaatatgttgcactatgtcatgtttgtcaacaagttaaagcagaacaccaaaagcctacaggattattacaacccttacaaatacctgaatggaaatgggatgaaataggaatggattttattactggattacctaaaacttctactggatatgactctatatgggtaatcattgatagacttacaaagactgctcgattcattcctgtgaaaacaacttatactggagcacaagttgctgaactctatatgacaaggataaaattacattatgaattaggaagttatctggatttcagtacagcatttcatccgcaaatcggaggacagacggaaagactaaatcatacattagaagatatgttaacagcctgtggtctagattttgctgctagttgggacaaatgtctaccttatgcagaattttcatataacaataattatcaagccagtttaaaaatgtcaccacatgaagccttatatggaagaaaatgccgaacaccattgatatggacataa

SEQ ID NO: 13710 - DNA, 1179 bp, Oryza sativa
  Clone ID: TFbOSC32878j.C1.o1.fg
atggatgaagtcgggcgtcgatggacattctccagggcaaatgaaggctacacgagctgcggcccgatgtttaacagagaaaaaggaaagaatgtcagcgggtatgccccaagtaactcaagttttcaactcaatccaccactggcctcaagagagttaacaagggcacacccttggtccattccaagcacgctgcttagttcacagctaccattggttggaagtcaagaccaaaatcagtatgtgtttgatcgagcatttgccacccaggtcaatgagcttccaatgccaggagaggatgtccccttttgtcatgattgtagagagcaaggacactatgccctgaattgtccatgggtatatgccaaagaagccccttcctttggtttaacagggcaggcatcgctaaaccagcctcctcacaccaagtcaagcttgcagcctagtgtgcaaagtagagagctcaacggagagaacccattgaatcccgggaaatgctttccccctagcctctcgtaccacgtggggtcgcatactaagcaagccaaaggcaagaagagtaagaatcagaagagaaaagcaccgatgcgaactgaagaagaagtacgtaagatgactattaccagcaccgaatggcctccagcagggataactattcctagacgtcagaaaggaaatactttccgaggtgcacgacagttgacccagcaccttctaagccatggtggcagagtatctgatagtgaagggtcagatcaagtctcctcggatgatgaagatgagtctccccgacatctcggcgaggaagagatggaatcaaaggcatgcacccgttgtggagaaattggacacattgctagcatgtgtctcacactctgcgcttattgcgaagaagaccatccaccaggggagtgtcccacccgcaaggtcatatgttttctgtgcgaaggtacaaaccatgtgcccaaggattgccaactcagtgtgttgttgaccaagaccgcagaaatccaacgaacaactctacgattgtctcatcagctagtcagctccaacagcaacatcgacgatatcatccacaacaccaatgctcctcttgctgcacctgattctgcagtaaatcatagcgataataccttcagcaccaaccattctcggcaccgacagcctcagcaatga

SEQ ID NO: 13711 - DNA, 4848 bp, Oryza sativa
  Clone ID: TFbOSC400152j.C1.o9.fg
atgccctacgtcacgtcggaggcgcaggcccgcgccctcctgcaggtcggcgggtggcccgtcggaactctggtccatgtcgtcatcgtcgacgccgcctgccgtgcccgccgtctcgaccacacgctgcgggcgatggtggcgcgcagggggtgggtcgtggtcaaccgccacgccgtgcttcgagtcatccgcgtcagcgacctggtccacaacatcctcgacatcaccctcccccgcctcctcgacgacgcctacgacgccacgcagctcactcacttccggaggcaggcggcggctcttcgtacgatggcgggtgtgatcggagggaacttccgcaaccgcgcctacgtcgtcgtccgcaagattcgcttcgtcgccagcagcgcccgcaaccactccatggcggcggcgaggctccagcagcgtctgctcgacatcaggcgtcgcctcagtggtctcgtcgaagcacctgatatgaacttacaaaggctttgtgcagactgctcctatctaataaatcagattgctggtgaattgttggctcttcttgctgatgctgcttttgaaacagttagtatcccctttcgtttcatatttgccaaggttattggtgattgttccttggttgccaagcaaagagcgtttattattcatgctgcatgtgcgctagataaagctatgatggtgcggttatgtgaaaagagcggcaacttttattgcacagaacttggtcgaattgcaaaccacttttaccttcagtactccagtgtggagacttacaatgagatgctttggcatcacatgaatgagagtaagataaggaggccgcgagtccgatccgagttcctcgcttctttcccggtgttagtttctccttctccgcgcctgagttgctctcgcttctccgcttctgatctcttgcgcgcacgagagattggaagaagcagtgcctccgaaaccacaccttcgcctgagatgggtgatcaggtttttgggggagtgcctcctgcacgactgctcatcgccatgtctggagttgctgccgccgctattggcggaggtggtgcgccgccgccgacaggagctggtgcgccaggaggaggtgccgtgaacgactacaacaacggaggcaattctgcctcaccatccagcggagggccattctcggggtataatcttctccttctactgctgttagcgttactcctgttcccattgttagcgctatactgtgtgcgctatgttcttgttcctgttctacatgatgcctttagcatgttatcgcattattggtatgttcctgattctgacattcatgatgcgcttagtatgctactggttatgttaagatcaccctacactgcttatgccatgatcatagtttcaatttcttggattaaaatatgccgaataatgactatatttccaacaatccaaaaacctgataggtcattttcggtagttggctttgctgctgcactgaaaccacatgcttttgatggttcaaactataagagatggaaagcacgtgcactattgtggttgacagcgatgcagtgcttctatgtttcacggggcaaacgaagtgaaccacctctttctcctgaggaagaggctaagttcgaggcttcggattgcctgttccgtggagcattgatcagtgtactcgctgacaacatagtggacgtgtacatgcacatgccttctgggaaggacatgtgggatgcactcgaggccaagttcggattctatgactacaagatggtcgatgaccgttctgtagtagaacaagctcatgagattcagatgctggctaaggaacttgagaacaacaactgtgagttgccggacaagtttgtggcgggtggcattattgccaaactaccaccttcttggtcggactttgccacttctctaaagcacaagagacaagagttcagtgttcctgatctcattggctctttgggtgttgaggagaaggcgagggcaaaggacatccggggcaaaaaggttgagggaggttctagtgccaatatggtacagaagaagaaccctcatgcatcccacaacaacaagaaagtcaagcctgatgtcaaacccaaggctgcaaccaattttaagaagaaaggcaagggaaaggcaaaaggagactgctttgtgtgtggcaagtctgggcattgggccaaggactgtcttgagcgcaaagacaggaagtctgccaacatgatcattagcgagggcggaggaacatcggggtacggtcgggagaggttcctccttgttgatgggaaacgggtcgcttgcggttgttcatggtgttgttccaagtgccatacttgtgttcaatcgaaacaacctcgcaagcctcacaaggcatctgaggcgaggaatttggcacctctagaacttgttcattccgatttgtgcgaaatgaacggcgtgttgactaaagggggaaagaaatatttcatgacactgatagatgattgcactagattttgctatgtgtatctattgaaaacaaaggatgaggcattgcattactttaaaatctataaagctgaggtagaaaaccaacttgaaaggaaaatcaaacggttgaggtctgatagaggtggggagtatttttccaatgagtttgcatctttttgcgaagagtttggaattattcatgagatgacgcctccctattcaccccaatcaaatggggtggccgaaagaaagaaccgtactctaactgagatggtgaatgccatgttagacactgcggggctttcgaaggaatggtggggtgaggcagttttgactgcgtgtcatgtcctgaataaaattccaatgaagcataaggaagtaacaccattcgaggaatgggaaaggaagaaattaaatctctcatacctacgaacatggggctgtttggccaaggtaaatgtacctatagtcaaaaagcggaaacttggaccaaaaactgttgattgcgtgtttcttggttatgctatccatagtgtgggttatagattcttaatagtaaactctggagtacccgacatgcatgctggtacaatttttgagtccagagatgctacattctttgagaatgaattttctatgaaatatacacctagcacttctagtaaagaaactgtcatgccccatgagcactttgcaccgatagaacacaatgatgaaacgcctgaggaaaatcctgaggaggacaacattgtagatactcgcaagagtaagagacaaagggttgcaaaatcctttggagatgactacattgtatacctcgtggatgacaccccaagaaccatagaagaggcgtattcatctcctgacgctgactactggaaggaagcagtacgcagtgaaatggactcgattatgtctaatggtacttgggaagtcgttgagcgtccatatgggtgcaagcccgtaggatgcaaatgggttttcaagaaaaagcttaggcctgatggtacaatcgaaaagtacaaggcaaggcttgtggccaagggttatacccaaaaggaaggcgaggatttcttcgacacatattcaccagttgctcgcttgactacgattcgagtactacttgctctggcagcctctcatggtcttctcgtccatcagatggacgttaagacagctttcctaaacggagagctggaggaggagatctatatggatcaaccagacgggtatgtactagaaggtcaggaggaaatggtgtgtaaactattgaaatccttgtatggcctcaagcaagcacctaagcaatggcatgagaagtttgacatcacgcttacatctgcaggctttgttgtgaacgaagctgacaaatgtgtatactatcgctatggtgggggagaaggggtgatcttgtgcttgtatgtcgatgacatactgatctttgggaccagccttaatgtgattgaggaggtcaaagactatctgtctaagaattttgaaatgaaggatttgggagaggctgatgttattcttaacatcaaactacaaagaggagatgagggtgggattacacttgtgcaatcccactatgtggacaaggttttgagtcgctttggatatagtgactgtaagccagctcctactccttatgatcccagcgtgctattaaggaaaaaccgaagaatagcaagggatcaactgagatactctcaaatcattggttcattgatgtacttggctagcgcaacgaggcctgacatctcatttgctgtaagcaagctgagccggtttgtctcaaatccgggagatgatcattggcaggctctggaaagagtaatgcgctatctaaagggcactatgagctatggaattcactataccgggtatccaaaagtactagaaggatatagtgactcaaactggatatctgatgctgatgagataaaagccacaagtggatatgcgttcacacttggaggtggcgctgtttcctggaagtcttgcaagcagaccatcttaacgaggtcaacaatggaagcagaacttacagcactagatactgcgacagttgaggctgagtggcttcgtgaactcctgatggatttgccggtggttgaaaaaccagtgccagcaatcctaatgaactgcgataatcaaacagtgattattaaagtgaacagttcaaaggacaacatgaagtcatctagacacatcaagagaagactgaaatctgtcagaaagcagaaaaactccggagtgatagcattggactatgtccaaacggctagaaatctggcagatcagtttaccaaggggctaccacgtaatgtgatagacagtgcatcgagggaaatgggcttgatacccacctaa

SEQ ID NO: 13712 - DNA, 5246 bp, Oryza sativa
  Clone ID: TFbOSC401418j.C1.o2.np
atgtcggacttagggggaaagaacggggaaaatggaaatgaagatggagcgagcagcaaggaaactccatcacccaagggagctactataccttttgattacagcaaacttaccattccccctcacaactttgtctccgtgccttctgggcgtgctcctcaatttgatgggacacattacgccgcttggaagcacaagatgaagttgcatctaatctctttgcatccaagtatttggaaagttgttttgtataggtgttgatgtacctaatgatgacatggagctcacttcggagcaagagcaactcatccaccgcaatgctcaagcttccaatgcaattctctccgccttgagtctggaggagttcaacaaggttgatgggcttgaggaggccaaggagatatgggatactttgcaattggctcaagagggatcacctaccgttcgtgaggccaagattgaattattggaaggaaggcttggaagatttgtgatggatgacaaggagacaccacaagagatgtatgataggatgatgattcttgtcaacaagatcaaaggacttgggagtggggacatgacaaatcactttgttgtcaagagacttctccgtgcttttggtccaagaaatcccactcttgtatcaatgatacgggaaagaaaagacttcaataggctcaccccaagcgatattcttggaagaattgtgtctcatgagatgcaagaagaggaagctcgtgaagtgaggcaaatggtgaagaatgctgccatgatcaaaaatcaagaagttgctttgaaggcaaaacaagaagaaatggcttttattgtcaagagattcaagcactttcttcgcaagagtggctatggcaaacggaggaaggatgatgacaagggaaagcggcaatcaaagagagcttgcttcaattgtggtgaatatggccacttcattgccgattgttctaagtcaaatgaagctaaggctaagggaggcaagaagaagccggagcgtgctcatgtggcagaggcacacatggcggaggtgtggtactccggagatgaggaagatcccgaggtcaagcccaagcccaagctaaaagacaaggttgaaggagaaggtggtgttgctaccgttgccttcaagtcatcttcttcaagcaaggagcgtctcttcaacaatttgagtgatgacgacgacgactcctaccactactcttgtttcatggcccaaggccgcaaggtgatgactcaaaagccctctcacacctctcttgatgttgattctagtgatgaggaaagtgataatgaattagatgatgtgcttaagagctttagcaaacccgctatgcaacatttggctaagttaatgagagctttggatagtaaagtacaatctctcgaaaggcaagaagaattacttattcttgagaagaaaagaaaccttgccttagaggagagcctagctaaagaatgtgctaaaaatgaacaactagctaatgagcttaatttggctaatggttctctagctagccttagggatgtcaatgaaactcttcaagagaagtttgctagtttagacaaaagtcataaagatcttgaagttcaatttgacactctttggaatagcacttctcaaccaaatgtggtttctaattcttccaacccatctactagcaatggttgtgctaggtgttacaatattgatttgaactctcatgctactaatgttgatgctatgcaagctcttaagaaagagaatgaaaggttgggcacattggtgaaatatggatgcatgaagacataccattcaaaagatgccctttacaagaccatcaccgctcatcctaacaaggatggacacgggctcgggttttctagtggaagtcctgtgtctaagcgtgtgatggtaaatgggaaagaatgcttgatgtttgtaagagaaggaaatgctccacaagcaagtgagatgacttgtcccctcactggtcagacacccggaacttccgggcaaaatgaccggaagttcctgtcctgtaagacaggaagttccggacattttgtcaggaagttctgggcttctgataggccaaaggggctggccggaagttccggttataatgccagaaagttccggccagagggtctttactatgattcatatgcatactcctctggtggctcaagttgggttgtggacagtggctgcaccaatcatatgacgggagagatgagtatgtttataagtcttgatgaggagggtggaagtcgtgaaaatattgtctttggagatgatggtaaaggaaaggtaatgggtctcgcctatataagcattggaggtaacaagtatggtttcgtcattgttgatgatttttcacgcttcacttgggtgtactttctccatgacaaaagcgaagctcaagatgttttcaagcgcttcgcaaagcaagcccaaaacctctatgatctcactatcaagagggtgcgaagcgacaatggaggagaattcaagaacactcaagtggaggaatttcttgatgaagaaggaatcaagcacgagttctccgccccctatgatcctccccaaaacggcattgttgagaggaagaaccgaaccctcattgaagccgcaagggcaatgcttgatgagtacaagacttcggatgtattttgggcggaggccgtgagtaccgcatgtcatgccatcaatcgcttgtacctacacaagatcctaaagaaaacctcatatgagctcttgagtggtaagaagcctaatgtttcatattttcgtgtctttgggagcaaatgttttattttaagtaagaggcctcgctcatctaagttctcacctgaggtggatgagggattcttacttggctatgaatcaaatgcacatgcctatcgtgtctttaacaaaacctccggtattgttgaagtcactagggatgtgacatttgatgaatctaatggctcccaaggagagcaagttgttgtacatgttgtaggggatgtggatccaagtcaagctataggtactaaggctattggagacatacgaccagtcgagacgcaggatgaccaagaagatagggatcaacctccgtcatcgacatccaatagccctacaagtgctgtgtctgctgagccggaagttccgggtcctattgatcggaacctccggacatctccaggcccggaagttccgggttctacagtccggaacctccagaccagtggtagtgaagacgtgtcaacagcacaagtggatgggatcgatgttgagggcactttagagcattctgatcaggctcaggtcccccccagtgcaccatctaaggatacatcacactgtccaaagagatcatcccgtcgacaacatacttggtgacataagaaaaggggtaactactcgctctcgtgtcgcaagtttttgtcaacacttctcgtttgtctcttctttggaaccaaccagggtggaagatgcgcttggtgatccggattgggtgatggctatacaagaggaattgaataacttcgctcgcaatcaagtgtggactttggtggagagacccaagcaaaatgccatcggcaccaagtggatctttcgcaacaagcaagatgaacatggggtggttgtaaggaacaaagcctggttagttgcgcaagggttcatccaagtcgagggtctcgattttggtgaaaccttcgcacctatcactcgccttgagtcaattagaattcttttagcctatgccgctcaccatgatttcaggttattccaaatggatgtcaagagtgcctttctcaatggacctatctcggagttagtctatgtggagcaaccaccggggttaaaggatccaaagttgccaaaccatgtgtacaagctccacaaggcgctctacgggctcaaacaagcccctaaagcttggtatgaatgtctccgagattttcttttgaaaaatagttttgaaattggaaaggcggatactactctcttcactaaaaaatttaagagtgatttattcatttgccaaatttatgtcgatgtcataatatttggttctactaatgtctctttttgtgaagaattagtagtatcatgactaaaaggttcgagatgtctatgatgggcgagttgaccttcttcctcgggctacaagtgaagcaagcacaagagggcaccttcatctctcaaaccaagtacgtgaaagacatactcaagaagtttgggatggagggtgccaaacctatcaagacgcccatgcctactaatggccacctagacctcgacgataatggtaaatgtgtggaccaaaagggttgtgactttaagcttttgggctattccgattcggattatgccgggtgtaaggttgatagaaaaagcacaaccgggacttgccaatttcttgggcggtcccttgtttcttggtcctccaagaagcaaaattccattgcattatccaccgctgaagccgaatatgtcgccgccggttcttgttgtgcccaactcctttggatgaaacaaactctaaaagactttggctacaacttcaccaagatcccactcctatgtgacaatgagagtgccatcaaaatagccattaatcccgttcaacactctcgaaccaaacacatagacattcgccaccacttcttgagggatcatgagactaaaggagacatatgccttacccataagagacagaagctttctcaagatgttcctggtgactcgagccccccggttcgtggtcctagggggagattgggcaaagaaaaagttggagatttttacaatgggagtcagattctgatccattccaggagggctggtagcattgtcattcgtgatgcaccccgctctccctctccagctgcatctgagtcagatgatggtggcaatgaggatgagcctggttctgaaagcaatcctttgaggctgtacaagacaagggctgttgatcctgatcctaaacgcccaagagtgaactatctgaaaaatctactcaagtgtggaaaggacatgatcatgggaagatctcatccagtggtagagatgaagtggctagattggcagtacatgtcctcaaagaacaacatagtcttcaatgaggtacgcaaggtgtgtgagcgcaagcacgtggcagatttgttggccttgcagtattcctagaatgaggaagtgattggatagttctactccactgctttctttggcaccaccaagaaaaggcttgatttctgat

SEQ ID NO: 13713 - DNA, 2568 bp, Oryza sativa
  Clone ID: TFbOSC417975j.C1.o4.fg
atggaggcgctcgtcggcaagtatactccgtgccttgccaaaggtcggcaagctgttggaatccatctagcttttggagatgcttttatacctacagctgtaatcaggatgaaaaagaatgaatttcgaagattgaggcaaggttttatgacagtacaagaatatttgaataaatttacacaacttgctcgatatgctgcctcggacattcaagatgaaaaagaaaagattgaaagatttattgaaggattacgtgatgaacttcgaggcccaatgattagtcaagatcataaaaattttcaaagcctagtcaataaagtggttaggctagaaaatgatcgtagaatggtggaaggactccgtaagagaagaatgaatttacaacgacaatcgccaactagaagttcactacaagttcggaggccttatccatttaaaccatttctacccaatgcaaggccaggcatgccaccaatactaccaagacctggattaaaaatggaagactccccatgttatgtttgtgggaaaattggacatttcgcaagactctgtcctaatcgtcaaaatatgggtggccaaacttcttatcagaaaccatctactacaggttttataaagaaaaatcctccaattattaagagtggacctaatcttggacgtggtcaagtacatcatattaaagcagaagaagctcaacaagatcctaatatattaatgggtgcctctcattcctttttatctgcaaaagccagttggaatcagtctttacctaaagataatttagataaggctatgctaatacactcacctggaggaaccatattagtatcatctatttgtagaaatgtaccaattaaattaggagatcaaatatttttaattgacttgatggtactacctacccaaactatcgatattactttgggcatggattggttagccaagaataatggactaatcaactgtgcaacaagagaggttatccttactgatgaacaaggaataaatacaaggataatagttaaacccaatctatccatggaacattatatgacagacatctgtatgcttataccaaaagaagaagttccagtagtgcaggaatatttggatatatttcctgaagaactaagttcattacctccagatcaggaaatagaatttattatagagttacttcctggaacggcacctatatcaaaaagaccctataggatgccaattaatgaattggaagaattgaggaaacagatagctgagctacaagaaaaaggagcaagtatattttctaaaatagatcttcgatcaggatatcatcagttgaaaattagacaagaggacataccaaagactgcttttgtgacaaggtatggattatatgagtttacagtaatggcatttggattaaccaacgcccctgcttacttcatgaatcttatgaacaagatatttatggattatctagatcaatttgtggttgtatttattgatgacattctgatatactccaagaatgaggaagaacataaacaacacctacgattggtattggagaaattaaggcaacatcagttatatgccaaattcagtaaatgtgaattttggctagatcaagttgcatttctaggacatataataactaaggaaggagttgtcgtggatccagaaaagattaaagtggtaatggaatggagaacacaaacctcagtacctgagataagaagtttcttaggacttgctggatattatcggagatttattaaagatttctccgctattgcaaaacctatgaccagattacttaaaaaggacagaaaatttgaatggacaccagaatgtcagagtagttttcaaagattaaaacataagcttactactacgccggtattaatcttgccagacatccaaaaagattttgagatctattgcgatgcctctcgacaaggattaggatgtgttcttatgcaagaaggtaaagtagtagcttatgcgtcaagacaactaagaccccatgaagataattacccaactcatgatttggagttagcagcagtcgtacatgcgttgaagatttggcgacactacttaattgggaatcattgcaagatctataccgatcataagagtttgaaatatatttttacccagacggatcttaatcttcggcaaaggagatggttagaattaattaaggactacaatttggaaattctataccatccaggaaaagctaacgtagttgctgatgccttaagccgaaaagcttattgcaatctacaacaagaaataatattagaacaattgcaagcaaaaatgcttaaactaaatttgggtattattaagtttggagaattaaacactttggagttaaaacctaccttgatggatcaaataaaagaacatcagaaagaagattctaaaatacaaacttttaaggaacggaaggtgcaaggaaaggctgcatatattaccgaagacatggaagaaatattatggtacggaaatttgaatcatcgtaccacaatcaggaaacttaaggaagataatactaaaggaagcacatga

SEQ ID NO: 13714 - DNA, 2814 bp, Oryza sativa
  Clone ID: TFbOSC101063j.C1.o15.gm
atgtcgggccaagcaggggatgggatcgatggtgataagggagctaagatcccttatgactatccccctacatctacatcttataatcccgaagatcccaccaaggaggacgacgagaacgagcacaagaacgctcaagccgctaatgcaatacttagcgccttgagtggaagtgagttcaaccgtgtggatggcattgagagtgccaaagtgatttgggacacgcttcggaacttgcatgaaggcacggatagtgttcgtgagtccaaggtggagatcctcaaggggcaatttgagagatttgtgatgttggatggtgagagcccaagcgacatgtacgaccagttgagcaagatcgtcaatgagatcaagggacttggctccaaggacatgaccaatgatgttgtggtcaagatgatggttcgagcaatcactccaaggaactctaccttggtgatcatcattcgtgagcgtccggactacaagactctcacacctcgtgattttctcggacgcatccttgcccatgacatgctcgtgcaagagtccaaggatgtcatccaatacatcaaccaaagctcaaccgcaagcatcaagaaggaagacttggctttgaaggcaaaggaagaagaagaagagaaccgcaagagcaagagcaaggcggagatcgatgatgaagagatggctctcttcgtcaagaagttcggcaagttcatgagacgaagcggcttcttcaagggaggttcttccaagcactactccaacaagtcaagtggaagacactccgcaagagtgtgctacgtgtgcaaagagcccgggcacttcattgcggattgcccccacctcaaggatggttcccacatcaaggaagataagaagaagggtgagaagaaggatgagaagaaggagaagcacaagcataggaagcgggaacattatggccaagctcaccttgtgatgatcttcggctccgactccgagtcaagctcaagtgatgaagaaggagtcgtcgcgttcgccgtcaagccttcatcaccaccaagactcttcgacaactcaagtgatgaggatgctcccatttgcctcatggcaaaggagcctaaggtaccttctcctctcaagtcatttaatgttgatcttgttagtgatgaggaggatgaggccaaaagtatccttactaatgattatgcttcacatggttcttttgatgcatcttatgttcttaggaagaatgctagtggttatgttgttgctaagtatgtaggcctaaggggcaagaatatttctatcaagagagaatatgtctccggtggaagaagttgggtgattgatagtggatgccccaatcacatgaccagagaagaatcaatgttttcaactcttgatccaaatggcacttcacaagataacatagtcttcggggacgatgaaaagggaaaggttatgggattgggtaagattgcaatctctgatctttccatggccaacgttctctttgggtgttctcaagggagagctttaccttgtggatttttcctcaacgcgtgtcaagccggcaaacaaattggagcacatcaccccgtcaagaatgtgatgaccactacaagaccattagagcttctccacatggacctcttcgggccaattgcttatctaagcattggaggtaacaaatatggtcttgttattgttgatgacttttcacgcttcaccgacaacggcaaggagttcaagaacacgtgcatcgagagtttccatgatgaagaaggcatcaagcacgagttctcggctccatattcacctcaacaaaatggagtagcggagaggaagaataggactctcattgagatggcgaagatcatgttggatgagtacaagacatcggaccgtttttgggccgaagccgtcaacaccgcatgccacgccatcaaccgcctttatcttcaccgccttcttaagaagactccctatgagcttcttaccgtgaatgagggattcttgcttgggtatgggtcaaatgaatgcacataccgcgttttcaacaaaacctccagtattgttgagatcgcgcgtgatggagccacaacaaggagcctcttcctcaacacaagtagaaccacctacatcaacccaagccgacgatccctctacctcaagcttgaatcaagggtggaagaagctcttaatgatccggattgggtaatggcgatgcaagaggagttgaacaatttcacctggaatgaagtgtggactttggtggagcgacctcggcaaaatgtgattggcacaaagtggatcttccgcaacaagcaagacgaggccggggtcgtaataaggaacaaggtgaggcctatcaacgagttggtatatgtggagcaatcaccgggcttcgaggatccaaaatatcccaaccacgtgtccaagctccataaggcactctacgggcttaagcaagcccctagagcttgtagaatgatgaccaagcgttttgagatgtccatgatgggtgaattgaagttcttcctcggccttcaaatcaagcaactcaaggaaggaactttcatttgccaaataaagtatttgaaggacatgctcaagaagtttggaatggagaatgcgaagccaatccacactcccatgccatcaaatggccacctcgacctcaatgagcaaggtaaagacgtcgaccaaaagggagcgaggtttgatctcattggctacgccgatgcggattatgccggatttgtgagcacttgcatcatctctgggagttctttgcatcatcttttactcttggaggttgaggactcctag

SEQ ID NO: 13715 - DNA, 1119 bp, Oryza sativa
  Clone ID: TFbOSC101552j.C1.o1.fg
atgaaatgcttctgggtgagtactggcaaacctgaaggaattcttactgctgatcagcagaagcaattcgaggaagccactactctctttgtgggatgcattcttagcgttcttggcgaacgtctggtcgaggtgtatatgcacatgactgacgctaaggagttgtgggatgcactgaatactaaattcgttgctactaatgctagcaatgatctatacatcatggagcagtttcatgactataggatagctgacaaccgttctatagtcgaacaggctcatgagatacaaaccatagctaaggaactcgaactccttaagtgtgtcttacccgacaaatttgtggccgggtgcattattgcgaaactacctccatcttcgagaagtttcggtactgcactcaaacacaagagacaggaatactccgttgaggggttggtagcatctcttaatggtgaggagaaagctcggaaaaagacgccgcgtctaagggcgatgaacaagagcaaggggaaatacaaagctcaacagaacaccaacttcaagaagcagaagaagaacaacaacaatcctaatcaggatgagaggacttgctttgtgtgtggccaacctggtcatctggctaggaagtatccacagcgcaagggtatgaaggcacctgcagggcagacttctaagtctgctaatgtgaccattggcaacactggagatggaagcgggtatagtaatttacctactgttttttcagttaatcaatctactaattggtgggttgatactgcggccaatgtcgcacggagttccaccgtcctaatggggaatgggtcacatgcttctgttcatggtgttggcacagtagatctgaagtttactttgggaaagatcgtgcagctgaagaacgtgcagcatgtcccttctatcgataggaatcttgttagtggctcccgtctaactagagacggatttaagttggtttttgagtctaataaagtagtcgtgtctaaacatggatattttattggtaaaggttatgagtgcggaggcctgttccgcttttccctttctgatttctgcaataagtctgtcaaccatatttgtggcagtgtggatgatgactaa

SEQ ID NO: 13716 - DNA, 5208 bp, Oryza sativa
  Clone ID: TFbOSC102249j.C1.o19.fg
atgtcgggccaagcgggggatgggaacgatggtgataagggagctaagatcccttatgactatccctctacatctacatcttatgtgagtacctatagcggcaaagctccgtacttcaatggtacggactatgccgcttggaagcataagatgaagatgcatttgaagtctattaacccatctatttggagaatagtcaaaaaaggctatgttttgcagaatcccgaagatcccaccaaggaggacgacgagaacgagcacaagaacgctcaagccgctaatgcaatacttagcgccttgagtggaagtgagttcaaccgtgtggatggcattgagagtgccaaagtgatttgggacacgcttcggaacttgcatgaaggcacggatagtgttcgtgagtccaaggtggagatcctcaaggggcaatttgagagatctgtgatgttagatggtgagagcccaagcgacatgtacgaccggttgagcaagatcatcaatgagatcaagggacttggctccaaggacatgaccgatgaggttgtggtcaagaagatgactctcacacctcatgatttgctcggatgcatccttgcccttgacatgctcgtgcaagagtccaaggatgtcatccaatacatcaaccaaagctcaaccgcaagcatcaagaaggaagacttagctttgaaggcaaaggaagaagaagaagagaatcgcaagagcaagagcaaggcggagatcgatgatgaagagatggctcccttcgtcaagaagttcggcaagttcatgaggcgaagcggcttcttcaagggaggatcttccaagcactactccaacaagtcaagtggaagacactccgcaagagtgtgctacgtgtgcaaagagcccgggcacttcattgcggattgcccccacctcaaggatggttcccacatcaaggaagataagaagaaggatgagaagaaggagaagcacaagcatagcaagagggaacattatggccaagctcaccttgggatgatcttcggctccgactccgagtcaagctcaagtgatgaagaaggagtcgccacgtttgccgtcaagccctcatcaccaccgagactcttcgactactcaagtgatgaggatgctccggtttgtctcatggcaaaggagcctaaggtaccttctcttcttaagtcatttaatgttgatcttgttagtgatgaggaggatgaggttgaggatgaggttatagatgacgaattgttcaagtccataactaaggaatccctaccacacttgagtgagttgcttgagagaattgaggaccaatatgcaactcttgagaggcaagagactttgctcattcgtgagaaagagcggtctcatgaactcaagagtgagcttgctaaggagagagagaaaaatgaggcattggaatatgtctccggtggaagaagttgggtaattgatagtggatgcacaaatcacatgaccagagaagaatcaatgttttcaactcttgatccaaatggcacttcacaagataacatagttttcggggacgatggaaagggaaaggttatgggattgggtaagattgcaatttctaatgatctttccattgccaacattctcttggtaaaatctctaaactacaatcttttgtccgtttctcaattatgttctatgggttataattgtctttttaccgatgttgatgtgaccgtctatagaaggaatgattcctcggtagtctttaagggtgtcctcaagggaaagctttaccttgtggatttttcctcaagtaaagccaaacatgagacatgcttagtggctaagtccaacacggggtggctttggcatcagaggctagcccatgttggtatgaggaatcttcacaagcttctaaagcacgatcacatccttggactaacaaatgttcaatttgagaaagatagggtgtgtagcgcatgtcaagccggcaaacaaattggagcacatcaccccgtcaagaatgtgatgaccactacaagaccattggtgcttctccacatggacctcttcggaccaattgcttatctaagcattggaggtaacaaatatggtcttgttattgttgatgacttttcacgcttcacgtgggtgttctttttgcatgacaagagtgagacacaagctatcttcaagaagtttgcaagaagagcacaaaacgagttcgacctcaagatcaagaacattcgaagtgacaacagcaaggagtttaagaacacgtgcatcgagagtttccttgatgaagaaggcatcaagcacgagttctcggctgcatattcacctcaacaaaatggagtagctgagaggaagaataggactctcaatgagatggcgaggaccatgttggatgagtacaagacatcggacaatttttgggccgaagccgtcaacaccgcatgccataccatcaactgcctttatcttcaccgccttcttaagaagactccctatgagcttcttaccggtaataaaccaaatgtctcttactttcgtgttttcggtagtaagtgttacattcttaataagaaggctagatcctctaagttcgctcctaaagtggatgagggattcttgcttgggtatgggtcaaatgaatgcgcataccgcgttttcaacaaaacctctagtattgttgagattgcgcgtgatgtgacatttgacaaaattaatggctctcaagtatccgagcgaagcaatcaaaagattggctcttggggacgtgaagaaggcgagcaagtgccaccctcaccgatcaacttagctcgcccaagaatccaccaaagtatccaaagagatcatcctaccgacaacatcttaggagacatcaacaagggagtatccactcgttctcgtattgcaaatttttgtgagcattactcgtttgtgtcttctcttgaacctctaagggtggaagaagctcttaatgatccggattgggtgatagcgatgcaagaggagttgaacaatttcacccggaatgaagtgtggactttggtggagcgacctcggcaaaatgtgattggcacaaagtggatcttctgcaacaagcaagacgaggccggggtcgtaataaggaacaaggcgaggttagtggcgcaagggttcacccaaatcgaaggattagatttcggtcaaacttttgcgccggtggctagacttgagtcgattcgcatattgcttgcttttgctactaacctcaattttaagctatatcaaatggatgtcaaaagcgccttcctcaacgggcctatcaacgagttggtatacgtggagcaaccaccgggcttcgaggatccgaagtatcccaaccacgtgtacaagctccacaaggcactatacgggcttaagcaagcccctagagcttggtatgagtgtcttcgcaattttcttgtgaaaagaggctttaaaatcgggaaagccgattcaaccctttttactaaaagacataataatgatatttttgtgtgccaaatatatgtcgatgacattatatttggttctactaacaagtcttttagtgaagagtttagtaggatgatgaccaaacgttttgagatgtccatgatgggtgaattgaagttcttcctcggccttcaaattaagcaactcaaggaaggaactttcatttgccaatcaaagtatttgaagaacatgcttaagaagtttgggatggagaacgccaagccaatccacactcccatgccatcaaatggccacctcgacctcaacgagcaaggtaaagacgtcgatcaaaaggtataccgttccatcattggctcacttctttacctttgtgcatctaagcctgatattatacttagtgtgtgcatgtgtgcaagatttcaagtcgctctgaaggagtgtcaccttgtggccgtgaagagaattcttagatatttagtgcacacacctaaccttggtctttggtatcctaagggagcgaggtttgatctcattggttatgccgatgaggattatgccgggtgcaaagtggataagaaaagcacattgggtacttgccaattcttgggtaggtcccttgtttcttggtcttccaagaagcaaaactccgtcgccctatccaccgccgaagcggaatatgtttcgatcaattgggaggagttgcaggcacacaacgatccggtgattgactctatgattgccaattgtgatctcatgggtatccgctccttcatgacgttgcagcaaaattggtgcaacgaggtcattgctcagttttatgccaccgtctactttgatcgttatcgtgccatgcactgcatgactcaggggtcctggtattctgtttcttatcagcagttggctgagatctggggcttccgtcttcgttctttgctcaaccttgatgaccttcataatcttcaaattcctgccaacacagaattgcttcccctttacactccaaatgatccaaatgtggtgttgggcaaggtcgacggcctcaagccgtactttgcctacttgaaccggatgtttcgccggtcttttgtgtctatggatagtgatgctaacagcattaaccacctctctaggaccgtgcttctccgttttgatccccctcctcatcgcttccatgtctatcactttgtgtgggaggagatccgcatggcttcaattcagtacaagaaggggttggtctatgcccttcacattatgcggatgatcgagactgtgactcagctccagtttcgccatgatgtgactcattctcagcttcacttgcgccttcttaaggccccccgctcctcggctgcttgggacataccctcctcttccactctgccgcctcctgctcctgagcgccctgcctctgtggctcgtcgtgagccgtctcccttattccacaatttacggagtctttttggtctttgctccacggaggccaaaaagaaccgccgattgcggaattcggcgaagaaaacggctcgtgatgtcaagttcctcaaggcaaggtattatgaggaccaccacattgatatccctccttctcctccgggtttcgaggccgagcccgatgagccacaggatgaagcgattgaggatccttttgctgggttgccttacgacttcgacttctttggatatggccatggctatggctatcctcctccaccacctccagaggatccttctcaggcgcccttcgcttga

SEQ ID NO: 13717 - DNA, 375 bp, Oryza sativa
  Clone ID: TFbOSC11196j.C1.o1.fg
atggacaatcgtaagagaggaaggattgttttccaggaggcacaaggtcaagaacagtcacaacagttgggcatcagtggtgagatcaactcagagactaatgcaagcaatgaagacaacgatgagcaagctactcaatcagtgtcatttcagcaggatcagtctcaagaagataacagtaatggaagggagcagcgggtgtgtttcaattgttatgagccaggtcacttcgtaaaagagtgtccgaagccgaagcgtcaacagccacaaggccaagtcaacaaccttgtccttacagaagcaaatgcagtgccggttgcgtctcaagggatacagctcagccaccagtttcaaagcggcattagttttctttaa

SEQ ID NO: 13718 - DNA, 3210 bp, Oryza sativa
  Clone ID: TFbOSC22995j.C1.o3.fg
atggctcaatttaatgagttgaggcgtaacatggaggcaagacaagatcgaatggcacaagatgttcaaaatattttgggtcattttgaaaatattaatccttttggtggagatgcaagtgtgcacagtggagaagatgaagaggatgataatgatgatttgccctatcgttttggtcgcataccacggcggagaaataatgatgaagagaggcttggtaagctgaaattcaccattccaaagtttgatggtggatctgatctagaggcttatcttatgtgggagttgaaggttgataaaatatttcacatccataattattccgaagagaagaaattggcaatggcttcacttgagtttgaggattatgctctaatttggagtcgagatatccaatgcttcaagtgtggaggccgtgggcatgttgttagagaatgtccaaacaatcgtgccattattgtgattgaacatggagagtttgattcagctagtgaggatgctgaaaatggacaaagaaacaatctttttcagacccgagctaaagtgggaggaaaggtgtgcaaggtcatcgttgatggaggtagctgccataatcttgcaagtaaggatatgtgtgacaagcttggtctgaagttgttgcgacacccacatccatatcatgtccaatggctaaatgatagtggagatatcaagattgggcatcgggtgaaagtttcttttaagattggtgaatatgaagatgaggttttgtgtgatgttgtgcctatgacagtgtgtcacttgctgctgggaaggccatggcaatttgatcgatcatcacggcattgtggtcgaacaaatcaattctctatcaagtggaaaggaaggaattttgtgcttaagcccatgacacctcaacaaatcatggctgagcatatgcaaaagagttctgaagttaggatagaaagtgagaaagaaagagagcaaaataaatttagtgacatccacaaatcggtgagcaagagccacaagccaaatatgagtgataaaaagaaaagagagggtgagaactttgtgatgttagccaccaaatcagaaatgagagatgagtatgaagatgtttttccaatggaaacacctgctggacttcctccattgcgtggcatagaacatcaaattgatctcattcctggggctgcactacccaaccgagcaccataccgcaccaacccacaagaaacaaacgaaatacaaaggcaagtacaagagcttttagataaaggttatgtgcgtgaaagtttaagtccttgtgttgtccctgtgattttggtgcccaagaaagatggatcttggaggatgtgtgttgattgtagagccctcaataatatcactgttcgatatcgccatcccattccaaggatagatgatatgcttgatgagttgagtggttctatgatattttctaaaattgatttgagaagtgggtatcatcaaataagaatgaaaattggagatgaatggaaagctgtttttaaaacaaaattcggtttatatgaatggttagttatgccttttggtttgactagtgaaccaagtactttcatgagattgatgaaccatgttttgagaacattcattggaaaatttgttgtggtttactttgatgatattctgatttactccaagtctttgagtgaacatgctagtcacataaaacaagttttggatgtgctaagaaaggagaaattatttgctaacattgagaagtgcacattttgtacagagaaggttgtctttcttggttttgtcatttcaggacagggagttgaagttgatgaatcgaaagtggaggcaatcaaggattggccaacccctgtgaatgtaagtcaggtgagaacttttcatggtcttgctggtttttatagaagatttgtgaaagatttcagcaccatagctgcacccttgaacgagttgacaaaaaaaggtattgagtttcattggggtgaatcacaaaaggatgctttccaaaaattaaaaagatgtttgactgaagctcctttgttggtttggcctgatttcactaaaacttttgaaattgaatgtgatgctaatggaattggtataggagctgttttaatgcaagataaaaagcatgttgcttactttagtgagaaattgggaggagctcaattgaattattctgtttctgacaaagaattatatgttttggtgagagttcttgaaacttggcaacattatttatggccaaaagaatttgtcattcactctgatcatgaagctttgaagtacttgaaaggacaagccaagctgaaccgtcgccaagccaaatgggtagaatttattgaaacatttccctatgttgttaagtataagaaagatggtcaaactgaagttgtgaaccgtacactatcaacgttgctgcgtatgatgatcaagaaaaatttaaaagagtgggaggattgcttgccacttgtggagtttgcatacaacagggcagaaagaactaacatggatgcttcgaagcgtgctgcatatgtgaagaagattcatgaaaagaccaaggaagaaattgaaaagaaggcgcgcagtaatactgcaaaggtgaacaagcatagaaagaaagtggtctacgaaacaggagatcttgtttgggttcatctacagttcaggacgactccttttcaagagggggaggatgatgtgccccaacccctgtcacatgatgatgagcacatcccagctacacctgacgtaaacaagggtgatgtaaacaatggtgatggttcacatcataagtcacatgaggaaaatgaagatgacgtaaatcatgttgatggattatgtctcaacaagaacgatcaagcatatcatggtccaattacgcgcagccgtgctaggaaaatacaacaagaggtgaactcgctctttgctcaacttaatccaaatttttgtgagaattttatactacctaaatgctctacatttttattgctcaggtttacacccgaggagatcatcactacaccaagaaggatgggttacattgaggatgataagggttacgttgaggacgataaaggttacgacgaggaagaaccagcccatcccaaaccagtagctgtctacgccaacaagaagatggtttactctgcaaaagactcaacttccaaggcttgtgtgacccaaccagtcaactttctccatgcttaa

SEQ ID NO: 13719 - DNA, 250 bp, Oryza sativa
  Clone ID: TFbOSC25748j.C1.o1.hg
gcaagctactcaatcagtgtcatttcagcaggatcagtctcaagaagataacagtaatggaagggagcatcgggtgtgtttcaattgttatgagccaggtcacttcgtaaaagagtgtccgaagccgaagcgtcaacagccacaaggccaagtcaacaacattgtcctcacaggagcaaatgcagtgccggttgcgtctcaagggatacagctcagccatcagttccaaagcagcagtagctttctttaa

SEQ ID NO: 13720 - DNA, 162 bp, Oryza sativa
  Clone ID: TFbOSC28706j.C1.o5.gm
atgacgacgaccgagacggcggcggcgcacggctggagcgacggctacgacggcggcgctaggttgcacggcgctagagctcttccggcgacgagaggcgaaggcgaaggtggcgacggcgctgcggtgactgcactagctatgacaagggttagaggttag

SEQ ID NO: 13721 - DNA, 771 bp, Oryza sativa
  Clone ID: TFbOSC28815j.C1.o1.fg
atgaacagagcagaacgacaaccaatcacttgggaagagtttaccgaaggattcaagaagacacacgtacctgtaggagttgttgctttgaagaagcgtgagtttagggctttgaagcaaaaggatcgtaccgtggcagagtatcttcatgagttcaatcgtctggctcgctatgctccagaagatgtgcgtactgacgaggaaaggcaagagaaattcttggaaggtccgaaggatgaactgtcagttatgttgatctctcatgactatgaggattttcaggagttggttgataaagcaattcgactggaagacaagaagaacaagatggataaccgtaaaaggaaaatgactgtatcccaggaggcacaaggtagtagccagaggcagcgtatcaagccactccaaattggtgaatctttttctgcaggtcaagaacagtcacaacaacagtcacaacagttgggcatcagtggtgagatcaactcagagactaatgcaagcaatgaagacaatgatgagcaagctactcaatcagtgtcatttcagcaggatcagtctcaagaagataacagtaatggaagggagcatcgggtgtgtttcaattgttatgagccaggtcacttcgtaaaagagtgtccgaagccgaagcgtcaacagccacaaggccaagtcaacaacattgtcctcacaggagcaaatgcagtgccggttgcgtctcaagggatacagctcagccatcagttccaaagcagcagtagctttctttaa

SEQ ID NO: 13722 - DNA, 5976 bp, Oryza sativa
  Clone ID: TFbOSC400269j.C1.o2.fg
atgtcgggccaagcgggggatgggaacgatggtggtaagggagctaatatcccttatgactatccctctacatctatatcttataatcccgaagatcccaccaaggaggacgacgagaacaagcacaagaacgctcaagccgctaatgcaatacttagcgccttgagtggaagcacggatagtgttcgtgagtccaagatggagatcctcaaggggcaatttgagagatttgtgatgttagatggtgagagcccaagcgacatgtacgaccggttgagcaagatcgtcaatgagatcaagggacttggctccaaggacatgaccgatgaggttgtggtcaagaagatggttcgagcaatcactccaaggaactttaccttggtgaccatcattcgtgagcgtccggactacaagactctcacacctcatgatttgctcggacgcatccttgcccatgacatgctcgtgcaagagtccaaggatgtcattcaatacatcaaccaaagctcaaccgcaagcatcaagaaggaagacttggctttgaaggcaaaggaagaagaagaagagaaccgcaagagcaagagcaaggcggagatcgatgatgaagagatggctctcttcgtcaagaagttcggcaaattcatgaggcgaagcggcttcttcaagggaggatcttccaagcactactctaacaagtcaagtggaagacactctgcaagagtgtgctacgtgtgcaaagagcccgggcacttcattgcggattgcccccacctcaaggatggttcccacatcaaggaagataagaagaaggatgagaagaaggagaagcacaagcatagcaagagcgaacattatggccaagctcaccttgggatgatctttggctccgactccaagtcaagctcaagtgatgaagaaggagttgccacgttcgccgtcaagccctcatcaccaccgagactcttcaactactcaagtgatgagaatgctaaggtaccttctcctcttaagtcatttaatgttgatcttgttagtgatgaggaggatgaggttgaggatgaggttatggatgacgaattgttcaagtccataactaaggaatccctaccacacttgagtgagttgcttgggagaattgaggaccaatatgtaactcttgagaggcaagagactttgctcattcatgagaaagagcggtctcatgaactcaagagtgagcttgctaaggagagagagaaaaatgaggcattggtacggctttacaagcaaaccaaagagtctcatgctaatcttgaggtggcgaacgctcaacttcaagagagagtggatggcttggacaaagcatacctcactcttgaagagaagttcaaaaccttaaagaatagtgtctctctccctagcgagccatcttgttctaaaattgtcccaagcaatgaaccatgtgtgagatgcaaagatattgatattgaagcttgtgctactaactctatttccttgagtgctttgcaaaagcaaaatgagaagcttatgggactccttcacaatggcttacttaagtgccatatggatagtaaggccctaaaggagtacctaggctatcaaagggacaacttctaccatcagggtcttgggtatgttcctccaccaaaagaaaaggtggacaagagtgtgctgatcaggaggccccaaggtcttagcaattttgttaaggccaaaagtatccttcctaatgattatgcttcacattgttcttttgatgcatcttatgttcttaggaagaatgctagttgtcgtgttgttgctaagtatgtaggcccaaggggcaagaatatttctatcaagagagtactttgggtgcctaagacacttgttactaacatgagaggacccaagcaaggaaaggttatgggattgggtaagattgcaatctctaatgatctttccattgccaacgttctcttggtaaaatctctaaactacaatcttttgtccgtttctcaattatgttctatgggttacaattgtctttttaccgatgttgatgtgaccgtctatagaaggaatgattcctcggtagtctttaaggatgtcctcaagggaaagctttaccttgtagatttttcctcaagtaaagccaaacatgagacatgcttagtggctaagtccaatacggggtggctttggcatcggaggctagcccatgttggtatgaggaatcttcacaagcttctaaagcacgatcacatccttggacaaacaaatgttcaatttgagaaagatagggtgtgtagcgcatatcaagccggcaaacaaattggagcacatcaccccgtcaagaatgtgatgaccactacaagaccattggagcttctccacatggacctcttcggaccaattgcttatctaagcattggaggtaacaaatatggtcttgttattgttgatgacttttcacgcttcacgtgggtgttctttttgcatgacaagagtgagacacaagctatcttcaagaagtttgcaagaagagcacaaaacgagttcgacctcaagatcaagaacattcgaagcgacaacggcaaggaatttaagaacactaagtgttacattcttaataagaaggctagatcctctaagttcgctcctaaagtggatgagggattcttgcttgggtatgggtcaaatgaatgcgcttaccgcgttttcaacaaaacctccggtattgttgagatcgcgcgtgatgtgacatttgaagaaactaatggctctcaagtagagcaagttgattctcatgtgttaggtgaagaggaggatccgagcgaagcaatcaaaagattggctcttggggacgtacgtcctagggagccacaacaaggagtctcttcctcaacacaagtggagccacctacatcaacccaagccaacgatccctctatctcaagcttggatcaaggtgaagaaggtgagcaagtgccaccctcaccgatcaacttagctcgcccaagaatccaccaaagtatccaaagagatcatcccaccgacaacatcttaggagacatcaacaagggagtatccactcgttctcgtattgcaaatttttgtgagcattactcgtttgtgtcttctcttgaacctctaagggtggaagaagctcttaatgatccggattgggtgatggcgatgcaagaggagttgaataatttcacccagaatgaagtgtggaatttggtggagcgagctcggcaaaatgtgattggcacaaagtggatcttccgcaacaagcaagacgaggccggggtcgtaataaggaacaaggcgaggttagtggcgcaagggttcacccaaatcgaaggattagatttcggtgaaacttttgcaccggtagctagacttgagtcgattcgcatattgcttgcttttgttactaacctcaattttaagctatatcaaatggatgtcaaaagcaccttcctcaacgggcctatgaacgagttggtatacgtggagcaaccaccgggcttcgaggatccgaagtatcctaaccgcgtgtacaagctccacaaggcactctacgggcttaagcaagcccctagagcttgtgaagagtttagtaggatgatgaccaaacgttttgagatgtccatgatgggtgaattgaagttcttcctcgtccttcaaatcaagcaactcaaggaaggaacttttatttgccaaacaaagtatttgaaggacatgcttaagaagtttggaatggagaacgccaagccaatccacactcccatgccatcaaatggccacctcgacttcaacgagcaaggtaaagacgtcgatcaaaaagtataccgttccatcattggctcacttctttacctttgtgcatctaggcccgatattatgcttagtgtgtgcatgtgtgcaagatttcaagccgctccgaaggagtgtcaccttgtggccatgaagagaattcttagatatttagtgcacacacctaaccttggtctttggtatcctaagggagcgaggtttgatctcattggctatgccaatgtggattatgccggatgcaaagtggataggaaaagcacatcgggtacttgccaattcttgggtaggtcccttgtttcttggtcttccaagaagcaaaactccgtcgtcctatccaccaccgaagcggaatatgtttcggcggggagttgttgtgctcaacttctttggatgaagcaaacattgagagactatggcctcaatgtatccaaaatcccactcctatgtgacaatgagagtgccattaagatagccaacaaccccattcaacactctcgaaccaaacatatcgatattcgccaccatttcttgagagatcattccataagaggcgacatagacatccaacatgtgagaaccgacaaacaattggcggatatctttaccaagcctctagatgaagctaggatgcctccccgcaagcaaacctcccacaagtccaagcgcccgagggatcgctctcccactccatcctctcatgatgattcggacagtgattggtccggtggagaagatgcggttcctcaggttgcgtgggtggctcggcggtctactcaagctcatggtggtggtggcgatggtgagggctcctctcgtcaaccgcaaacgccgccgcaccaacccaatgtccccattgggcctctccgcattcatacccccgagagggatccggcggtgattcaccaagtgtatgattggtggcgcaagtctgaggttgttgctcctcgtcgggatgaggatctgcgctcctttcgccgcaccgccacggatctgcggttttggaccctttttcagcaagacttttatgagtctgtgattaagtccaaaactcatcccactgttcccatgcaatggatcaattgggaggagttgcaggcacacaatgatccagtgattgactctgtgattgccaattgtgatctcatgggtatccgctccttcatgacgttgcagcaaaattggtgcaacgaggtcattgctcagttttatgccaccgtctactttgatcgttatcgtgccatgcactggatgactcaggggtcctggtattctgtttcttatcagcagttggctgagatctggggcttccgtcttcgttctttgctcaaccttgatgaccttcataatcttcaaattcttgccaacacagaattgcttcccctttatactccaaatgatccaaatgtggtgttgggcaaggtcgacggcctcaagccgtactttgcctacttgaaccggatgtttcgccggtcttttgtgcctaaggatggtgatgccagcagcattaaccacctctctaggaccgtgcttctccggtttgatccccctcctcatcgcttccatgtctatcactttgtgtgggaggagatccgcatggcttcaattcagtacaagaaggggttggtctatgcccctcacattatgtggatgatcgagactgtgactcagctccagtttcgccatgatgtgactcattctcagcttcagttgcgccttcttaaggccccccgctcctcagctgctcgggacataccctcctcttccactcagccgcctcctgctcctgagcgccctgcctctgtggctcgtcgtgagccgtctcccttattccgcattttgcggagtctttttggtctttgctccacggaggccaaaaagaaccaccgattgcggaattcggcaaagaaaacggctcgtgatgtcaagttcctcaaggcaaggtattatgaggaccaccacattgatatccctccttctcctccaggtttcgaggccgagcccgatgagccagaggatgaagagattgaggatccttttgccgggttgccttccgacttcgacttctttggatatggccatggctatggctatcctcctccacgcccttcgcttgagtcgtcatctcatcgtcctctctttttggtgtcttga

SEQ ID NO: 13723 - DNA, 5092 bp, Oryza sativa
  Clone ID: TFbOSC400615j.C1.o3.np
atgtcgaacgaggtgaaccacgtagggaaggctcccatgtttaatggcacaaactattccacttggaaaattaaaatgtctactcacctcaaagctatgagcttccatatttggagtattgtggatgtaggctttgcaatcaccggcacgcccttgacggagattgatcaccgcaacctccaactcaatgcccaagccatgaatgctttgttcaactctttgagccaagaggagtttgatagagtgagcaaccttgagaccgcatatgagatttggaacaagttggcggagatccatgagggcacaagtgagtacaaggatgccaagcttcacttcctcaagatccaatatgagacattctccatgttgcctcatgagagtgtgaatgacatgtatgggaggctcaatgtcattgtgaatgatctcaaggggcttggggcaaactacaccgatctcgaggttgcccaaaagatgcttagggctctaccggagaagtatgagacccttgtcaccatgctcatcaactccgacatgtcaaggatgacaccggcaagcctcttggggaagatcaacaccaatgacatgtataagttgaagaaaaaggaaatggaggaagcctcaccttccaagaagtgcattgctctccaagccgaagttgaagacaagggcaagggcaaggtgaatgaagtcaatgagaacttggaagaagagattgcccttcttgctagaaggttcaatgatttcttgggaaggagaaaggagagaggaaagggctccaactcaaataggagaagaaatagaagacccaacaagactctctccaacttgaggtgctttgagtgtggtgagaagggatactttgcttccaagtgcccttccaaggatgatgatggagacaagtcatctaagaagaagagtggaggctacaagctcatgaagaagctcaagaaggaaggcaagaagattgaggccttcatcggggaatgggactcaaatgaggagagctccgcctcatccgggtccgaggaagaagatagtgataatgcaagctccaagaagaagaagatggccgttgttgccatcaaggaggctccatcactcttcgctccactttgtctcatggcaaagggctcctctaaggtaacatctcttagtgatagtgagagtgatgatgattgtgatgatgtttcctatgatgagcttgtgagtatgtttgaggagctccatgcttatagtgagaaggagattgtcaagttcaaggccctaaagaaggatcatgcttttttggaggtcttgtatgaggagctaaagacttctcatgagagactcaccatttctcatgagaagcttaaggaagctcatgacaacctcctttccactactcaacatggagctctcattgatgttggcatatcttgtgatttgcttgatgatagtactacttgccatattgctcatgttgcatcatctagcatttctacctcttgtgatgatcttgtggatatgtctagctctagctctagctcttgtgtatctatttgtgatgcctcacttgttgttgagaacaatgagcttaaggagcaagtggctaagctcaacaagagcttggagaggtgcttcaagggtaagaacactcttgacaagattttgagtgagcaacggtgcatccttaacaaggagggacttggatttattccaaagaagggtaagaaaccttctcaccgtgccactcgttttgtcaagagcaatggtaagtattgctccaagtgtcgtgaggttgggcatttggtgaatgattgccccggtggtaagcctcctaagacatgcatgtttgattctcattatatgcttaggaaggctcatgatggtagcattgttgctagatatgtgggttcccctatactcggtggtaaaaagaataccatttgggtgcccaaagctttggtctctaacctccaaggacccaaacaagtttggattattctcactatacttgggtattctttttgcatgataagtctattgttgccgaacttttcaaaaagtttgcaaaaagggcccaaaatgaatttagttgcactcttgtgaaaattagaagtgacaatggttccgaatttaagaattccaatatcgaggactattgtgatgatcttggtatcaaacacgagctttccgctacctactcacctcaacaaaatggtgtagtggaaaggaaaaatcgtacattgattgagatggcaaggactatgctagatgaatatggtgtttccgattccttttgggcggaagccataaacatcgcttgccatgcaaccaataggctttatttgtatcgtctcttgaaaaagacttcctatgagctaattgttgggaggaagccaaatgttgcctattttcgagtttttggttgcaagtgctatatttaccgaaagggtgttagactaaccaaatttgaaagtcggtgtgatgaagggtttcttctaggttatgcctcaaatagcaaggcataccgggtctacaacaagaacaaaggtgatgaaggcttgatgagagctatgaagaacatgtctattggagatgtcaagcctattgaagtggaagacaagccatccacctccactcaagatgagccatctacttccgcttcgccaagtcaagctcaagttgaagtggaggaggagaaggcacaagatccacctatacctccaagaatacacaccgctctttccaaggatcacccaattgaccaagtgttgggtgacattagtaagggtgttcaaactcgatctcgtgtcgcttcgatttgtgaacattactcgtttgtttcttgtcttgagccaaaacatgtagatgaagctctttgtgatccggattggatgaatgctatgcatgaagagctcaacaactttgcaagaaacaaggtgtggactttggttgaaagacctagagaccacaatgtcatagggacaaagtggatctttaggaacaaacaagatgagaacggattggtggtgagaaacaaggcaaggttggtggcgcaaggtttcacacaagttgaaggtttagactttggtgaaacttttgcccccgtggcaagacttgaggctattcgcatccttcttgcatttgcatcatactttgatataaaactatttcaaatggatgtgaaaagtgcttttctaaatggtgaaattgccgaacttgtctttgttgaacaacctcccggttttgaagatcctgaaaatcctaaccatgtttacaaactctcaaaagctctttatggtttaaaacaagctcctagggcttggtatgaaagattgagagattttcttttgtcaaaggatttcaaaattggaaaagttgacaccactcttttcacaaaaatcattggtgatgatttctttgtgtgtcaaatttatgttgatgacatcatattcggttctactaatgaggtattttgcaaggaatttggtgatatgatgtctagggaatttgagatgtccatgattggagaattgagcttcttccttggacttcaaatcaagcaactcaaggatgggacgttcgtgagccaaaccaagtacatcaaggatctactcaagaggtttggcttggaggatgcgaagcccatcaagacacctatggcaaccaacgggcatctcgaccttgatgagggaggtaaaccggtagatttaaaactttatcgttctatgattggtagcttgctttaccttaccgcatctaggccggatatcatgtttagtgtttgcatgtgtgcacggtttcaagccgctcctaaggagtgtcacttagtggcttacccaaaaggtgctaaatttaagcttgttggctattccgattcggattatgccggttgcaaagtggatagaaagagcacatccggtagttgccaaatgcttgctatgcctccccacactcggcatggtcgtcgtgagcccacgcccgatcccgttagtaagaatgaggaatcgagcggagatgagtatgttcaaagtgatgaggacaatatggaaaatgttgagggtaatgagttggatgtaagtgatgatggtgatgacaatgggagtggcaatagtgaagatgatgaggcaagtgatgatgggagtcctctcgattccaccatccaatttgtgctaaatttgaggaatgctcaacaatacactatcctccatcatcatgatcaattccggaggcctaacgattgtaatgatccaagatttcatacacggttccaaaagtccgtgtatgaacaagtgtatgccaacaaagccttcgccgaacacaagtggatttcttggaggcacattggtgagacaccggagtttgagaatttgcaagagatgttccggaccgttgggattgataggattgtcaccatgaagcaaccttttgatgaagatctcatccggcaattctatgccactgtatgggtgtccggcgattgtgatgcaatgaagtggatgtcggggaccctccgatgctctatcaaccgccgtgaattcaaggagctcttgcacattcgcttcaataacggggatgaccttcatgatgagcacacccacaaccccttccccattgatcacttttctcagttttatgaagaagggggagggtacacatatggaaaggtggcgggtttgagggctctcccaagtgtgatcaaccgcagagtaagggccaccatcctcccaagatgcggcaacaatgatgacatacgcggagttgcttggcatgttattgatgccattatggatggtcgtcggtttgatgttatcaaccttatgatgaaggagattgccatctcaaaggggactattggacaaggaatctattatgctccctacataatgaggttgccgcctcctagacggcttgtggagaagttgcccggtgacctctccgagaagattgtggaggaggctcggtgccagtttgtgagtggtttggagttcaccaccttcggagtgaaggaagaactaccctagtgatcaaggcttgggtagttctctccgtgggccggctcccgccttgcccaccccttgacgaagggggcgtgcggaggcttcgtggt

SEQ ID NO: 13724 - DNA, 2529 bp, Oryza sativa
  Clone ID: TFbOSC400752j.C1.o2.gm
atgtcgggccaagcaggggatgggatcgatggtgataagggagctaagatcccttatgactatccccctacatctacatcttataatcccgaagatcccaccaaggaggacgacgagaacgagcacaagaacgctcaagccgctaatgcaatacttagcgccttgagtggaagtgagttcaaccgtgtggatggcattgagagtgccaaagtgatttgggacacgcttcggaacttgcatgaaggcacggatagtgttcgtgagtccaaggtggagatcctcaaggggcaatttgagagatttgtgatgttggatggtgagagcccaagcgacatgtacgaccagttgagcaagatcgtcaatgagatcaagggacttggctccaaggacatgaccaatgatgttgtggtcaagatgatggttcgagcaatcactccaaggaactctaccttggtgatcatcattcgtgagcgtccggactacaagactctcacacctcgtgattttctcggacgcatccttgcccatgacatgctcgtgcaagagtccaaggatgtcatccaatacatcaaccaaagctcaaccgcaagcatcaagaaggaagacttggctttgaaggcaaaggaagaagaagaagagaaccgcaagagcaagagcaaggcggagatcgatgatgaagagatggctctcttcgtcaagaagttcggcaagttcatgagacgaagcggcttcttcaagggaggttcttccaagcactactccaacaagtcaagtggaagacactccgcaagagtgtgctacgtgtgcaaagagcccgggcacttcattgcggattgcccccacctcaaggatggttcccacatcaaggaagataagaagaagggtgagaagaaggatgagaagaaggagaagcacaagcataggaagcgggaacattatggccaagctcaccttgtgatgatcttcggctccgactccgagtcaagctcaagtgatgaagaaggagtcgtcgcgttcgccgtcaagccttcatcaccaccaagactcttcgacaactcaagtgatgaggatgctcccatttgcctcatggcaaaggagcctaaggtaccttctcctctcaagtcatttaatgttgatcttgttagtgatgaggaggatgaggccaaaagtatccttactaatgattatgcttcacatggttcttttgatgcatcttatgttcttaggaagaatgctagtggttatgttgttgctaacgcgtgtcaagccggcaaacaaattggagcacatcaccccgtcaagaatgtgatgaccactacaagaccattagagcttctccacatggacctcttcgggccaattgcttatctaagcattggaggtaacaaatatggtcttgttattgttgatgacttttcacgcttcaccgacaacggcaaggagttcaagaacacgtgcatcgagagtttccatgatgaagaaggcatcaagcacgagttctcggctccatattcacctcaacaaaatggagtagcggagaggaagaataggactctcattgagatggcgaagatcatgttggatgagtacaagacatcggaccgtttttgggccgaagccgtcaacaccgcatgccacgccatcaaccgcctttatcttcaccgccttcttaagaagactccctatgagcttcttaccgtgaatgagggattcttgcttgggtatgggtcaaatgaatgcacataccgcgttttcaacaaaacctccagtattgttgagatcgcgcgtgatggagccacaacaaggagcctcttcctcaacacaagtagaaccacctacatcaacccaagccgacgatccctctacctcaagcttgaatcaagggtggaagaagctcttaatgatccggattgggtaatggcgatgcaagaggagttgaacaatttcacctggaatgaagtgtggactttggtggagcgacctcggcaaaatgtgattggcacaaagtggatcttccgcaacaagcaagacgaggccggggtcgtaataaggaacaaggtgaggcctatcaacgagttggtatatgtggagcaatcaccgggcttcgaggatccaaaatatcccaaccacgtgtccaagctccataaggcactctacgggcttaagcaagcccctagagcttgtagaatgatgaccaagcgttttgagatgtccatgatgggtgaattgaagttcttcctcggccttcaaatcaagcaactcaaggaaggaactttcatttgccaaataaagtatttgaaggacatgctcaagaagtttggaatggagaatgcgaagccaatccacactcccatgccatcaaatggccacctcgacctcaatgagcaaggtaaagacgtcgaccaaaagggagcgaggtttgatctcattggctacgccgatgcggattatgccggatttgtgagcacttgcatcatctctgggagttctttgcatcatcttttactcttggaggttgaggactcctag

SEQ ID NO: 13725 - DNA, 759 bp, Oryza sativa
  Clone ID: TFbOSC400773j.C1.o55.fg
atgaacagagcagaaggacaaccaatcacttgggaagagtttatcgaaggattcaagaagacacacatacctgcaggtgttgttgctttgaagaagcgtgagttccgggcacttaagcaaaaggatcgtaccgtgacggaatatcttcatgagttcaatcgtctagctcgctatgctctagaagatgtgcgtactgacgaggaaaggcaggagaagtttttggaaggcttaaaggatgagctgtcagttatgttgatctctcatgactatgaggattttcaggagttggttgacaaagcaattcgacttgaagacaagaagaacaggatggataaccgtaaaaggaaaatgattgtattccaggaggcacaggatagtagccagaggcagcgtatcaagccactccaaattggtgaatctttttctgcaggtcaagaacagtcacaacagttgggcatcagtggtgagatcaactcagagactaatgcaagcaatgaagacaatgatgagcaagctactcaatcagtgtcatttcagcaggatcagtctcaagaagataacagtaatggaagggagcatcgggtgtgtttcaattgttatgagccaggtcacttcgtaaaagagtgtccgaagccgaagcgtcaacagccacaaggccaagtcaacaacattgtcctcacaggagcaaatgcagtgccggttgcgtctcaagggatacagctcagccatcagttccaaagcagcagtagctttctttaa

SEQ ID NO: 13726 - DNA, 5148 bp, Oryza sativa
  Clone ID: TFbOSC400988j.C1.o4.fg
atgtcgggccaaacgggggaaggaaaacatggtgataagggagctacgtttccttatgactatccacctacatctacatcttatgtgagtacctatagcggcaaagctccgtacttcaatggtacggactatgccgcttggaagcataatatgaagatgcatttaaagtctattaacccatctatttggagaatagtcgaaaaaggctatgttttgcagaatcccgaaaatcccaccaaggaggacgacgagaacgagcacaagaacgctcaagccgctaatgcaatacttagcgccttgagtggaagtgagttcaaccgtgtggatggcattgagagtgccaaagtgatttgggacacgcttcggaacttgcatgaaggcacggatagtgttcgtgagtccaaggtggagatcctcaaggggcaatttgagagatttgtgatgttggatggtgagagcccaagtgacatgtatgaccggttgagcaagatcgtcaatgagatcaagggacttggctccaagggcatgaccgatgaggttgtggtcaagaagatggttcgagcaatcactccaaggaactctaccttggtgactatcattcgtgagcgtccggacttcaagactctcacacctcatatttgctcggactccaaggatgtcatccaatacatcaatcaaagttcaaccacaaacatcaagaaagaagacttggcgttgaaggcgaaggaagaagaagaagagaatcgcaagagcaagagcaaggcggagatcgatgatgaagagatggctctcttcgtcaagaagttcggcaagttcatgaggcgaagcggcttcttcaagggaggttcttccaagcactactccatcaagtcaagtggaagacactccgcaagagtgtgctacgtgtgcaaagagcccgggcacttcattgcggattgccctcacctcaaggatggttcccacatcaaggaagataagaagaagggtgagaagaaggatgagaagaaggagaagcacaagcatagcaagcgggaacattatggccaagctcaccttgggatgatcttcggctccgactccgagtcaagctcaagtgatgaagaaggagtcgccacatttgccgtcaagccttcatcaccaccgagactcttcgactactcaagtgatgaggatgctcccatttgcctcatggcaaaggagcctaaggaatatgtctccggtggaagaagttgggtgattgatagtggatgcaccaatcacatgaccggagaagaatcaatgttttcatctcttgatccaaatggctcttcacaagataacatagacttcgaggacgatggaaagggaaaggttataggattgggtaagattgcaatctctaatgatctttccattgccaacgttctcttggtaaaatctctaaactacaatcttttgtctgtttctcaattatgttctatgggttacaattgtctttttaccgatgttgatgtgaccgtctatagaaggaatgattcctcgatagtctttaagggtgttctcaagggaaagctttaccttgtggatttttcctcaagtaaagccaaacatgagacatgcttagtggctaagtccaacacggggtggctttggcatcggaggctagcccatgttggtatgaggaatcttcacaagcttctaaagcacgatcacatccttggtctaacaaatgttcaatttgagaaagataatgtgtgtagcgcgtatcaagccggcaaacaaattggagcacatcaccccgtcaagaatgtgatgaccactacaagaccattggagcttctccatatagacctcttcgggccaattgcttatctaagcattggaggtaacaaatatggtcttgttattgttgatgacttttcacgcttcacgtgggtattctttttgcatgacaagagtgagacacaagctatcttcaagaagtttgcaagaagagcacaaaacgagtttgacctcaagatcaagaacattcgaagtgacaatggcaaggagttcaagaacacgtgcatcgagagtttccttgatgaagaaggcatcaagcacaagttctcggctccatattcacctcaacaaaatggagtgaccaagaggaagaataggactctcattgagatggcgaggaccatgttggatgagtacaagacatcggaccgcttttgggccgaagccaagactccctatgagcttcttaccggtaacaaaccaaatgtctcttactttcgtgttttcggtagtaagtgttacattcttaataagaaggctagatcctctaagttcgctcctaaagtggatgagggattcttgcttgggtatgggtcaaatgaatgcgcataccgtgttttcaacaaaacctccggtattgttgagatcgcgcgtgatgtgacatttgacgaaactaatggctctcaagtagagcaagttgactcacatgtgttaggtgaagaggaggatccgagcgaggcaatcaaaacattggctcttggggacgtacgtcctagggagccacaacaaggagcctcttcctcaacacaagtggagccacttacatcaacccaagccgacgatccctctatctcaagcttggatcaaggtgaagaaggcgagcaagtgccaccctcaccgatcatcttagctcgcccaagaatccatcaaagtatccaaagagatcatcccaccgacaacatcttaggagacatcaacaagggagtatccactcgttctcgtattgcaaatttttgtgagcattactcgtttgtgtcttctcttgaacctctaagggtggaagaagctctaaatgatccggattgggtgatggcgatgcaagaggagttgaacaatttcacccggcaaaatgtgattggcacaaagtggatcttccgcaacaagcaagacgaggccggggtcgtaataaggaacaaggcaaggttagtggcgcaagggttcacccaaatcgaaggattagatttcggtgaaacttttgcgccggtagctagacttgagtcgattcgcatattgcttgcttttgctactaacctcaattttaagctatatcaaatggatgtcaaaagcgcctttctcaacgggcccatcaacgagttggtatacgtagagcaaccaccgggcttcgaggatccgaagtatcccaaccacgtgtacaagctccacaaggcactctacgggcttaagcaagcccctagagcttggtatgagtgtcttcgcaactttctcgtgaaaaacggctttgaaatcgggaaagccgattcaaccctctttactaaaagacatgataataatatttttgtgtgccaaatatatgtcgatgacattatatttggttctactaacaagtcttttagtgaagagtttagtaggatgatgaccaaacgttttgagatgtccatgatgggtgaattgaagttcttcctcggccttcaaatcaagcaactcaaggaaggaaccttcatttgccaaacaaagtatttgaaggacatgctcaagaagtttgggatggagaacgccaagccaattcacactcccatgccatcaaatggccacctcgacctcagcgagcaaggtaacaacgtcgatcaaaaggtatactgttccatcattggctcacttctttacctttgtgcatctaggcccaatattatgcttagtgtgtgcatgtgtgcaagatttcaagccgctccgaaggagtgtcaccttgtggccgtgaagagaattcttagatatttagtgcacacccctaaccttggtctttggtatcctaagggagcgaggtttgatctcattggctatgccgatgcggattatgccgggtgcaaagtggataggaaaagcacattgggtacttgccaattcttgggtaggatgcctctccacaagcaaacctcccacaagtccaagcgcccgagggatcgctctcccactccatcttctcatgatgattcggacagtgattggtccggtggagaggatgcggttcctcaggttgcgcgggtggctcgacggtctactcatgctcatgatggtggtggtgatggtgagggctcctctcgtcaaccgcaaacgccgccgcaccaacccaatgtccccattgggcctctccgcattcatacccccgagagggatccggcggtgattcgccaagtgtatgattggcggcgcaagtctgaggttgttgctcctcgtcgggatgaggatccgcgctcccttcgccgcaccgccacggatccgcggttttggactctctttcaacaagacttttatgagtctgtaattaagtccaaagctcatcccactgttcccatgcaatggatcaattgggaggagctgcaggcacataatgatctggtgatcaactctgtgattgccaattgtgatctcatggatatccgctccttcatgacgttgcagcaaaattggtgcaacgagatcattgctcagttttacgccaccgtatactggatgactcaggggtcctggtactctgtttcttatcagcagttgtctgagatctggggcttccgtcttcgttctttgctaaaccttgatgaccttcataatcttcaaattcctgccaacacagacttgcttcccctttacactcaaaatgatccaaatgtggtgttgggcaaggtcgacggcctcaagctgtactttgcctacttgaaccggatgtttcaccggtcttttgtgcctaaggatggtgatgctagcagcattaaccatctctctaggaccgtgcttctccggtttgatccccctcctcatcgcttccatgtctatcactttgtgtgggaggagatccgcatggcttcaattcagtacaagaaggggttggtctatgcccctcacattatgcggatgatcgagactgtgactcagctccagtttcgccatgatgtgactcattctcagcttcacttgcgccttcttaaggccccctgctcctcagctgctcgggacataccctcctcttctacccagccgcctcctgctcctgagcgccctgcctctgtggctcgtcgtgagccgtctcccttattccgcattttgcggagtctttttggtctttgctccgaggaggccaaaaagaaccgctga

SEQ ID NO: 13727 - DNA, 1098 bp, Oryza sativa
  Clone ID: TFbOSC401051j.C1.o10.fg
atggtgaacactcgcgccagtggaagtggaaacaataacaatgaagagaacccaactcttgctcaagtgctggctcaacagacccaattgatcaacatgttagtgcaacaaatgcagaaccagcaagggaacaacaatgtcaatcctccgccgccgcagaacaagttagctgattttcttcgtgtgaggccacctaccttctctagcactaccaacccagtagaagcaggtgattggctgcacgctgttgagaagaagttggaattgctccagtgcacggatcaggagaaagttgttttcgcttcacatcagttgcaaggatctgcttcagaatggtgggatcatttccgaatgaacagagcagaaggacaaccaatcacttgggcggagttcactgaagcattcaagaagacacacatacctgcaggtgttgttgctttgaagaagcgtgagttccgggcgcttaagcaaaaggatcgtaccgtgacggaatatcttcatgagttcaatcgtctagctcgctatgctccagaagatgtgcgtactgacgaggaaaggcaggagaagtttttggaaggcttaaaggatgagctgtcagttatgttgatctctcatgactacgaggattttcaggagttggttgataaagcaattcgactggaagacaagaagaacaggatggacaatcgtaagagaggaaggattgttttccaggaggcacaggatagtagccagaggcagcgtatcaagccactccaaattggtgaaccttcttccgctagtcaagggcagtcgcaacagttgaacatcgctggtgagatcaactcagagactaatgcaagcaataaagacaatgatgagcaagctactcagtcagtgtcagttcagcaggatcagtctcaagtgaataacagtaatggaagggagcagcgggtgtgtttcaattgttatgagccaggtcacttcgtaaaagagtgtccgaagccgaagcgtcaacagccacaaggccaagtcaacaacattgtcttcacaggagcgaatgcagtgccggttgtgtcttcaagtgttacagctcagcgaccagtttcaaagcagtag

SEQ ID NO: 13728 - DNA, 5496 bp, Oryza sativa
  Clone ID: TFbOSC401179j.C1.o25.fg
atgaagatgcatttgaagtctattaacccatctatttggagaatagtcgaaaaaggttatgttttgcagaatcccgaagatcccaccaaggaggacgacgagaatgagcacaagaacgctcaagccgccaatgcaatacttagtgccttgagtggaagtgagttcaaccgtgtggatggcattgagagtgccaaaatcctcaaggggcaatttgagagatttgtgatgttggatggtgagagcccaagtgacatgtatgaccggttgagcaagattgtcaatgagatcaagggacttggctccaaggacatgaccgatgaggttgtggtcaagaagatggaagaagaagaagatagccacaagagcaagagcaaggaggagatcgatgatgaagaaatggctctcttcgtcaagaagtttggcaagttcatgaggcgaagcggcttcttcaagggaaattcttccaagcatcactccaacaagtcaagtggaagacattctgcaagagtgtgctacgtgtgcaaagagcccgggcacttcattgcggattgccctcacctcaaggatggttcccacatcaaggaagataagaagaagggtgagaagaaggatgagaagaaggagaagtataagcatagcaagcgggaacattatggccaagctcaccttgggatgattttcggctccgactccgagtcaagctcaagttatgaagaaggagtcgccacattcgccgtcaagccttcatcaccgccaagactcttcgactactcaagtgatgaggatgctcccatttgcctcatggcaaaggagcctaaggtaccttctcctcccaaatcatttaatgttgatcttgttagtgatgaggaggatgaggttgaggatgaggttatggatgacaaattgttcaagtccataactaaggaatctctaccacacttgagtgagttgcttgggagaattgaggaccaatatgcaactcttgagaggcaagaggctttgctcattcatgagaaagagcgatctcatgaactcaagagtgagcttgctaaggagagagagaaaaatgaggctttggcacggctttacaagcaaaccaaagagtctcatgctaatcttgaggtggcgaacgctcaacttcaagagagagtggatggcttggacaaagcatacctctctcttgaagagaagttcgaaaccttaaagaatagtgtctctctccctagcgaaccgtcttgttccaaaattgttccaagcaatgaatcatgtgtgagatgcaaagatattgatattgaagcttgtgctactaactctatttctttgagtgctttgcaaaagcaaaatgagaagcttatgggacttcttcacaatggcctacttaagtgccatatggatagtaaggccctaaaggagtacctaggctatcaaagggacaacttcaaccatgagggtcttgggtatgttcctccaccaaaaggaaaggtggacaagagtatgatgataaagaggccccaaggttttagcaattttgttaaggcaaaaagtatccttcctaatgattctgcttcacattgttcttttgatgcatcttatgttcttaggaagaatgctagtggtcgtgttgttgctaagtatgtaggaccaagggacaaaaatttttccatcaagagagttctttgggtgcctaaggcacttgtcactaacatgagaggacccaaacaagtgtgggaatatctctccggtggaagaagttgggtgatcgatagtggatgcacaaatcacatgaccggagaagaatcaatgttttgctcccttgatcctaatggctcttcgcaagagaacatagtcttcggggacgatggaaagggaaaagtaatgggattggagaatgtctcttactttcgtgttttcggtagtaagtgctacattcttaataagaaggctagatcctcaaagtttgctcctaaagttgatgaggggttcttgcttgggtatgtgtcaaatgaatgcgcataccgcgttttcaacaaaacctccggtattgttgagatcgcgcgtgatgtgacatttgacgaaactaacggctctcaagtagagcaagttgactcacatgtgttaggtgaagaggaggaccctagcgaagcaatcaaaagattggctcttggagacgtgcgtcctagggagccacaacaaggggtctcttcctcaacacaagtggagccacctacatcaacccaagccgacaatccctccacttcaagcttggatcaaggtgaagaaggcgagcaagtgccactctctccgataaatctagctcacccaaaaatccaccaaagtatccaacgagatcaccccaccgacaacatcttaggagacatcaacaagggagtatccactctttgcaaatttttggtggaagaagctcttaatgatccggattgggtgatggcgatgcaagaggagttgaacaatttcacccggaatgaagtgtggactttggtggagcgacctcggcaaaatgtgattagcacaaagtggatcttccgcaataagcaagacgaggccggggtcgtgataaggaacaaggcgaggttagtggcgcaagggttcacccaaatcgaaggattagatttcagtgaaacatttgcgccgatagctagacttgagtcaattcgcatattgcttgcttttgctactaacctcaattttaagctatatcaaatggatgtcaaaagcgccttcctcaacgggcctatcaacgagttggtatacgtggagcaaccaccgggcttcgaggatccaaaatatcccaaccacgtatacaagcttcacaaggcactctacgggcttaagcaagcccctagagcttggtatgagtgtctttgcaatttttttgtgaaaaatggctttgagatcgggaaagccgattcaactctttttactaaaaggcatgataatgatatttttgtgtaccaaatatatgtcgatgacatcatatttggttctactaacaagtcttttagtgaagagtttagtaggatgatgaccaaacgttttgagatgtccatgatgggtgaattaaagttcttcctcggccttcaaatcaagcaactaaaggaaggaaccttcatttgccaaacaaagtatttgaaggacatgctcaagaaatttggaatggagaatgcgaagcaatccacactcccatgccatcaaatggccacctcgacctcaacgagcaaggtaaagacgtcgaccaaaaggcccaatattatgcttagtgtgtgcatatgtgcaagatttcaagccgctccgaaggagtgtcaccttgtggccgtgaagagaattcttagatatttagtgcacacacctaatcttggtctttggtatcctaagggagcgaggtttgatctcattggttatgccgatgcggattatgccgggtgcaaagtggataggaaaagcacatcgggttcttgcaaattcttgggtaggtcccttgtttcttggtcttccaagaagcaaaactccgtcgccctatccaccgccgaagcggaatacgtttcggcggggagttgttgtgctcaacttctttggatgaagcaaaccttgagagactatggcctaaatgtgtccaaaatcccactcttgtgtgacaatgagagcgccattaagttagccaataaccccgtccaacattcccgaaccaaacatatagatattcgccaccatttcttgagagaccattccacaagaggcgacatagatatccaacatgtgagaaccgacaaacaattggcggatatcttcaccaagtctctagatgaagctaggttttgtgagttgagaaggtggtttccctccctcaactccttccaaatcactggttccccagtgattctcttggtggttcttgagtgtatcctcatgatcaggggtcagttcaagaatcaactttactctcgccgtgggtcaatgagttctcaaggtcgctctccctcttccaaggctcgtcatgctatacggcgtatgtccgaatcccgcaaagatgccattgacgcgcaagctcaagcctctgaccaagcagctcaagtggctaatgtggagtgtggtgctcctcttcctcttcgccgcagccgagtcagtggagaaggatcaagtgcacctgctagcaaagtaaggagaggcaatcctacggattcttctgagccgggtcacggtagtggttctcatgcaccatcctttgaggaagagattcagttagaagaggacattgccgctcagcaagctgctcaggaagaagggcctttctttatcactgctccctctagagatcctaattatcatcgaagagtcgtaaggtggaaccgcaagtggactgaagtggagaaagagtgtaagaaagatccctacaaatttcaacagttgtccactgatcctcggttttggaacctttttcagcaggattactatgagatagtgattgcacctaagaagggggctattcttatgcagtgggttgattggaagtatatggaggagttgcatgatccaattattgatgaagtcattgaagcttgtgctcggcaaaacttgaaggaactcatgggcttgcaatacccatgtgtcatatgccaagtttgctgccattttggggtttccggctccaatcgtgtcaagattcatgatgagaagcccatggacacaaattctcttcacttcttgtaccaagatgtggactatgagttaggcaccatcaaaggtctccttcccttctatgcctatctcaataagctcttgcgcaaaactcttaatcccaaggaaggtgatgctagcaacgtccttgcctatacaagaaatttgctttacaagatgaaggctcacccacagctctttgacgcctttgacttcatctttgaagaaatccggcttatctctatgatgcctaagcgaggacttagctatgggccttacattacgaagatgattgagattgtgtccaagaagaagtttcacaaggaggtggcacataccggttaccaagtccgtcccatcaaggctgctgttgtgccggctggacgaaccactcgtgcttcttctcgtgccggtcactccgctaccgtcaccaagccggactccaactcgtccttgaggttcttcaagtccatcttcaacttatgcaagaccatctcagttcggcaagccaaggaacgcagagcaaggaagaaggacactcgacggctcaagaacctccttcgcaacgcccatttgccgtgttctcccgatggttctgaggttgaggacagtggggaggatgtgattgaggacccttttgcagctgaggcaagctcctctcatgcggatcgtggcaaggctcctatggaggaagaagaagaggagaaggaaggtaatctatctcctttcgtgatggctagtcgaatcttgggcttttgtgtcttgttatgtgcaattatctattatccatgctcaaatgtgtga

SEQ ID NO: 13729 - DNA, 2760 bp, Oryza sativa
  Clone ID: TFbOSC401834j.C1.o29.fg
atgaaatgcttctgggtgagtacaggcaagcctatgggcgttcttaatgttgatcagcagaaagaattcgatgaggccactactctctttgtgggatgcattcttagcgtgcttggcgatcgtctggtcaaggtgtatatgcatatgaccgacgctaaggagttgtgggatgcactgaatactaaattcggtgctacggatgctagcaatgatctgtatatcatggagcagtttcataactacaagatggctgacaaccgttctgtagtcgaacaggctcatgagatacaaaccatggttaaggaactcgaactccttaagtgtgtcttacccgacaaatttgtggtcgggtgcattattgcgaaactacctctatcttggagaggtttcggtactgcactcaaccacaagagacaggaatactctgttgaggggttgatagcgtctcttgatgttgaggagaaagctcgggaaaaagatgccgcgtctaaaggcgatggtggccagtccactgccaatgttgtgcacaaggccctgaacaagagcaaggggaaatacaaagctcaacagaccaccaacttcaagaagaagaacaacaacaacaattctaatcaggatgataggacttgctttgtgtgtggtcaacctggccatctggccaggaagtatccacaacgcaaggggatgaaggcacctgcagggcagacctctaagtctgctaatgtgaccattggcaacactggagatggaagcgggtatggttatgagtgcggaggcctgttccgcttttccctttctgatttctgcaataagtctgtgaaccatatttgtggcagtgtggatgatgaggctaatgtttggcactcacgtttatgtcatattaattttggcttgatgtctcagctttccagcatgtgtttaattcctaagttttccattgtcaaaggttctaagtgccatagttgtgtgcaattgaagcaacctcgcaagcctcacaaggctgccgaggagagaaacttggcaccattagaactcctacattcagatctttgtgaaatgaatggggtgttgacgaagggtggaaaacgatatttcatgacgttgattgatgatgctactagattttgctatgtgaacttgttgaaaacgaaagacgaagctctagactattttaaaatttataaggcagaagttgaaaatcaacttgacagaaagataaaaagggttaggtctgatcgtggtggagagtttttctcaaacgagtttgacttattctatgaggaacatggcatcatacatgagaggacgcctccctattctcccgagtctaatgggattactgaaaggaagaaccgcacactgactgacttggtgaatgccgtgttggacacagtgggactacctaaggcatggtggggggaggcattgttgacctcgaatcatatgctaaatagagttcctaacagaaataagaacaaaacaccatatgagatatggattgggagaaaaccatcactttcttacttgcgcacatgggggtgcttggtgaaagtcaatgtacaaataacgaagaagcgcaaacttggacctaagactgtggactgtgtctttctgggatatgctcatcacagcattgcctatagatttttaatagttaaatctgagtggaaggaggctgtccatagtgaaatggattccattatcgctaacggaacttgggaggtaacagaacgaccctatgggtgtaaacctgtggggtgcaaatgggtgttcaaaaagaagctgaggcctgatggtaccattgaaaagtataaggctcggcttgttgctaagggctatactcagaaagaaggcgaaaatttttttgacacttactcacctgttgctagattgaccacaagtcgtgtgctactttccctagcagcctcacatggtcttctcgttcatcaaatggacgttaagacagcttttcttaatggagagctggatgaggagatctatatggatcagcctgatgggtttgtagttgaaggtcaagaaggcaaggtgtgcaaattgttgaagtctttgtatggtctgaaacaaactcctaagaaatggcatgagaaatttgacaaaacattgacatctgcaggctttgcagtcaatgaggcaaataaatgtgtgtactatcgccatggtgggggtgagggagttattctgtgcttgtatgttgatgacatactgatatttgggacaaaccttgaggtgataaatgaggttaaatcattcttgtctcaaaattttgatatgaaggatttgggagtagctgatgttatcctaaacattaagctaattagaggtgagaatgggattactctcttgcagtcccattatgtggagaagatcttgaatcgctttggctacattgatataatggaaggatatagtgattctaactggatctctgatgtggatgagatcaaagccactagtggatatgtcttcacactaggtggtggtgctgtctcatggaggtcttgcaaacagaccattttgacgaggtcaaccatggaagcagagttgacggcactggatactgctaatgttgaggcagaatggctgcgtgatctattaatggatctccctattgttgaaaaaccagtgccggctatccttatgaacagtgacaatcaaacgacatgtgaaaagacgattgaagtctgtcaggaaattgagaaactccggagttataacattgggttacatccaaacagctag

SEQ ID NO: 13730 - DNA, 2073 bp, Oryza sativa
  Clone ID: TFbOSC401856j.C1.o1.fg
atggctggttttgccgatgcactgaggttggataaattcaccggtgtgcactttaagagatggcagatcagggtcactctgtggctgacggctatgaaatgcttctgggtgagtaatggcaaacctgaaggaattcttactgctgatcagcagaagcaattcgaggaagccactactctctttgtgggatgcattcttagcgttcttggcgatcgtctggtcgaggtgtatatgcatatgaccgacgctaaggagttgtgggatgcactgaatactaaattcggtgctactgatgctagcaatgatctgtatatcatggagcagtttcatgactacaagatggctgacaaccgttctgtagtcgaacaggctcatgagatacaaaccatggctaacgaactcgaactccttaagtgtgtcttacccgataaatttgtggccgggtgcattattgcgaaactacctccatcatggagaagtttcggtactgcactcaaacacaagagaccggaatactccgttgaggggttgatagcgtctcttgatgttgaggagaaagctcgggaaaaagacgccgcgtctcagggcgatggtgggcagtccagtgccaatgttgtgcacaaggcccagaacaagagcaaggggaaatacaaagctcaacagaccaccaacttcaagaagcagaagaagaacaacatcaatcctaaccaggatgagaggacttgctttgtgtgtgggcaacctggtcatctggctaggaagtatccacagcgcaaggggatgaaggcacctgcagggcagacttctaagtctgctaatgtgaccattggcaatactggagatggaagcgggtatggttatgagtgcggaggcctgttccgcttttccctttctgatttctgcaataagtctgtgaaccatatttgtggcagtgtggatgatgaggctaatgtttggcactcacgtttatgtcatattaattttggcttgatgtctcggctttccagcatgtgtttaattcctaagttttccattttcaaaggttctaagtgccatagttgtgtgcaatcgaagcaacctcgcatgcctcacaaggctgccgaggagagaaacttggcaccactagaactcctacattcagatctttgtgaaatgaatggggtgttgacgaagggtggaaaacgatatttcatgacgttgattgatgatgctactagattttgctatgtgtacttgttgaaaacgaaagacgaggctctagactattttaaaatttataaggcagaagttgaaaatcaacttgacagaaagataaaatggcttaagtctgatcgtggtggagagtttttctcaaatgagtttgacttattctatgaggaacatggcatcatacatgagaggacgcctccctattctcccgagtctaatgggattgctgaaaggaagaaccgcacattgactgacttggtgaatgccatgttggacacggcgggactacctaaggcatggtggggggaggcattgttgacttcgaatcatgtgttaaacagagttcctaacagaaataaggacaaaacaccatatgagatatggattgggagaaaaccatcactttcttatttgcgcacatgggggtgcttggcgaaagtcaatgtaccaataacgaagaagcgcaaacttggacctaagactgtggactgtgtctttctgggatatgctcatcacagcattgcctatagatttttaatagttaaatccgaggtacctgacatgcatgttggtacaattatggagtctcgtgatgctaccttctttgagagctttttcccaatgaaggatacacatagtagttcgagccaaccctctgaagtaattcccagttcaatcacaccaccagaacaaactgaacatacacatgaacatgtcactgaggaggatgtcagtgaagctcctcgaaggagtaagagacaaagaacggctaagtcctttggtgatgatttcactatgtacctcgtggatgacactcctaagtcaatttcagaagcatatgcatctcctgatgcagactactag

SEQ ID NO: 13731 - DNA, 1314 bp, Oryza sativa
  Clone ID: TFbOSC413011j.C1.o2.fg
atggggaggaagccgagaatagtcgaaaaaggctatgttttgcagaatctcgaagatcccaccaaggaggacgatgagaacgagcacaagaacgctcaagccgctaatgcaatacttagcgccctgagtggaagtgagttcaaccgtgtggatggcattgagagtgcaaaagtgatttgggacacgcttcggaacttgcatgaaggcacggatagtgttcgtgagtccaaggtggagatcctcaaggggcaatttgagagatttgtgatgttggatggtgagagcccaagcggcatgtacgaccggttgagcaagatcgtcaatgagatcaagagacttggctccaaggacatgatcgatgaggttgtggtcaagaagatggttcgagcaatcactccaaggaactctaccttggtgaccatcattcgtgagcgtccggactacaagactctcacacctcatgatttgctcggatgcatccttgcccatgacatgctcgtgcaagagtccaaggatgtcatccaatacatcaaccaaagctcaaccgcaagcatcaagaaggaagacttggctttgaaggcaaaggaagaagaagaagagaaccgcaagagcaagagcaagagcaaggcggagatcgatgatgaagagatggctctcttcgtcaagaagttcggcaagttcatgaggcgaagcggcttcttcaagggacattcttccaagcactactccaacaagtcaagtggaaaacactccacaagagtgtgctacgtgtgcaaagagcccgggcacttcattgcggattgcccccacctcaaggatggttcccacatcaaggaagataagaagaagggtgagaggaaggatgagaagaaggagaagcacaagcatagcaagcaggaacattatggccaagctcaccttgggatgatcttcggctccgactccgagtcaagctcaagtgatgaagaaagagtcgccacgtttgccgtcaagccttcatcaccaccgagactcttcgactactcaagtgatgaggatgctcccatttgcctcatggcaaaggagcctaagatacattctcctctcaagtcatttaatgttgatcttgttagtgatgaggaggatgaggttatggatgacgaattgttcaagtccataactaaggaatccctaccacacttgagtgaattgcttgggagaattgaggaccaatatgcaactcttgagaggcaagaggctttgctcattcgtgagaaagagtgtaggatcgagatgtcgactagagggggggtgaataggcgatttaaaaattaa

SEQ ID NO: 13732 - DNA, 1299 bp, Oryza sativa
  Clone ID: TFbOSC413746j.C1.o6.gm
atggtagtgaggtcttcggggaacacttctggatactcgcagactatggggatatcttccaatttcctcaaattcttctccacggtgaccactggatttccgcctaatctgattcaaggagaccccttgctttgcgctgccgccacgtgctccaccccgccgtcgtcgccggccgagctccatccgcgtcgcgccgccgcctccgtcgtcgccgccggtcgccgtcaccgccgtaaggtgcgccgaggtgtggagaagcccggccgctctctccccgctgtcgccggtcaccggagtcccgtcgccgccgtcgaccgaagccgtgccgccgctagacctcgtcgccggccgtcgtcgttcgtcgtttggttcgagggtgagtaccgttgggttcgtctcgtcgtcctctacgtgtacatgtcctccaaagtcgcagccgaccatccaatctccggcgaggtcgccatcttggtccggccattgatgagtctcacacctctcacaataattatggatgttataactggtaacaatttgcttagctcctggtttggagttagatctgtacagccgggtatggttgcattcccatcattggagaagttcattgatgagtgtgttgttgctttgaagaagcgtgagttccgggcacttaagcaaaaggatcgtaccgtgacggaatatcttcatgagttcaatcgtctagctcgctatgctctagaagatgtgcgtactgacgaggaaaggcaggagaagtttttggaaggcttaaaggatgagctgtcagttatgttgatctcccatgactatgttgattttcagcagctggttgacaaagcaattcgacttgaagacaagaataacaggatggataaccgtaaaaggaaaatgattgtattccaggaggcacaggatagtagccagaggcagcgtatcaagccactccaaattggtgaatctttttctgcaggtcaagaacagtcacaacagttgggcatcagtggtgagatcaactcagagactaatgcaagcaatgaagacaatgatgagcaagctactcaatcagtgtcatttcagcaggatcagtctcaagaagataacagtaatggaagggagcatcgggtgtgtttcaattgttatgagccaggtcacttcgtaaaagagtgtccgaagccgaagcgtcaacagccacaaggccaagtcaacaacattgtcctcacaggagcaaatgcagtgccggttgcgtctcaagggatacagctcagccatcagttccaaagcagcagtagctttctttaa

SEQ ID NO: 13733 - DNA, 4671 bp, Oryza sativa
  Clone ID: TFbOSC414191j.C1.o11.fg
atggctagccgcccccgccgtgcagcccgtgcaccagcccgctttggttttgaagatggtagagttgagccagaagaaaatcatgagtcggctaatgagcagtcacaccacagcaaccgttcgcaccgtactgtttcccgcaacgcagaggttgggcaaccccgccgcagcaaccgctcgcatcgcacagtttcccatgatgcagagatgggacagtctcaccgctctcaccgcactgccagtcacaattctggagaagaacgcctcccttccccacctcatgtggaaaacaacatgcaacacataatggcagttcggaaacaaatcttgcaaggactaaccacagccatagccagttttcagcataatgcgcatggaaatggccaccctcacgtgggcaacaatagatccaagctgacagattttctgaggtcatgtccgccagagttctctcagaccgtcgagcccgtcgaggctgacgattggttgaaagatgttgatagaaaactcaactttgtgcagtgtactcctgttgagaagacactctacgcctctcaccagctaagaggacctgctgcagattggtgggagaattactgcaatgcacaccctgaacccactaacattgcttgggatgagtttgctacggctttccgtgcagctcatgtgcctgaaagcactattgacatgaagaaagaagaattcaacagacttaagcaaggcaacagcagtgtcaatgagtacctaagtcagttcaacaagttagctcggtacgcccctgaagaagtggacacagataagaagaagatcaggaaattcttgaaagggatcgcagttggaatgagactccagttgcttgctcatgatttccccacttttcaacatatgatcaacaaggcacttctacttgaggatgccagaaaagaggctaccgaagaatacaagaaacgcaagtctaaccatcagggaaattcttcccgaggcgcacctcgccctcgctacggtcaacccatgcaatatcaccagtcggtaactcaggctaaccaccagccaggctacgcccctcgtcctcagatgaaccgtccggcacctcagccacagcagcgtgcccctagtggcaatactgcgccaaacagtgttacctctttcaagtcaccacagggaccgtcagcagttcagtgtttccggtgcaacaggatgggacactatgccagacagtgtcctcggaatcctaccaacaccaactcagggcatgctaatggcagcactgccagaactcctgctccagcggcagctcagtctcttcctagctctcaggcaagtggacaaggttctcgtgcgtccaaccactttggtcgaggacgtgtgaatcacattcaagctgaaaccgctcaggatgctccagacgttgtgatgggtatgttctctgtcaactccgtacccgcaatagttctgtttgattcaggagcttctcattctttcatatcgcaagcttttgtgaaaagaaatggttggaaaacccaaaatttgcgtgtaccgatgatagtacattcccctggaaggaatataagggcaactcaaatatgcccggaagttaaccttagaattgaggaagttgacttcctagccaaaccgatagtcctagactcgcaaagcttggacatcattctagggatggattggttggctaagcacaaaggacagatagattgtgccgaaaagtccatcaccttgcaaggacctggaggaaagcaagtccgctttacccctaacacccctaccgcaagtcggtctatcctaacttgtttacaagtcacctccttggagtcggtgcccatagtctgtgaatatcccgacgtatttccggaagaattaacaagaatgccaccagaccgagagatcgagttcgccatagaactggcaccaggcacagctccaattgcaaaaagaccctaccgaatggcagctaatgagttagcagaagttaaaagacaaatcgaagaactggaaagtaaaggttatgtgcgacctagctcatccccttggggagccccagtgcttctggttaagaaaaaggatggctctgagagaatggtaatcgactatagagccctaaatgaagtaactataaagaacaagtacccgttgccacggattgacgatttattcgatcaacttaaaggagcaagagttttctcaaaaattgacttgaggtcaggttaccaccaactgaaaatcagatctgaagatatcccgaagaccgctttctcaacgcgttatggtctatatgagttcacagttatgtccttcggactcaccaatgctccagcattcttcatgaacttaatgaacaaaatctttatggaatgtctggaccagtttgtcgtggtattcatcgatgacatcctgatatactctaagaacgaggaagaacatgctgaacacctgaggttgataatggaaaagctcagggaccatcaactattcgcaaaattctcaaaatgcgaattctggttagaccgagtagcatttcttggacacgtgatctcccccaacggtgtcgaagtagatcccagcaaggttgaagctgtacttgcttggaacccgcccaagaatgtgtcagagattcgcagtttccttggcttagctggatattatcgaagattcattgaaggattctctaagctagccagacctatgaccgagctgttaaagaaggaaaagaaattccaatggtctgtagcctgtgaagacagctttcaagaaatgaagaaaaggttgaccactgccccagttctcaccttgccagatatccgaaaagatttcgagatcttctgtgatgcatcaagacaaggcttaggatgtgtcctaatgcaagaacgaaaggttgtggcctatgcatccaggcagctcaggcctcatgaagttaattatcccacccatgatctcgagttggcagccgtggttcatgctcttaagatctggaggcattatttaatcgggaacagatgtgaagtatacaccgatcacaaaagtcttaagtatatcttcactcagaccgagttaaatatgagacagagaagatggttggaactaatcaaggattacgatcttggaatccactatcatcctggtaaagccaacgtggtcgctgatgcgctaagtcgcaaggcctattgcaatgtagctcaaatacggcctgaccaagatcacctgtgcagagaattggagaagttaagactgaccgtggtacagtcaggtgtccctgccagcttgacagtacaacctaccctagagtcgcaaatccgggaggctcagaaagacgacgaagggataaaagaattaataaaaagaatacaggagaagaaagacacaaatttctccatagacgatcaaggcacagtttggtgcggaccacgcatctgtgtaccggccaagaaggagttaagagatctcatcttaaaggaagctcatgagtccgcctactccattcacccaggaagtacgaagatgtaccaagatatcaaggcatacttctggtgggctagaatgaagcgagacgtcgcagaatacgtagccctgtgtgacatttgccaaagagtcaaggcggaacatcagaggccagctggtctgctgcaacccctaccgattcccgagtggaaatgggaagagatcggaatggatttcatcaccggtttgccaagaacccccagcgggtacgactccatctgggtaatcgtggaccgactcacgaagtcagctcatttcgtgccagtgaaaaccacctatgatggaaagaaactagcagaactctacatgactcatgtcgtatgtagatttggctgtcccaagaaaatagtgtcggaccgaggcactcagttcacctcaagtacagcctaccatccgcagaccgatggtcagaccgaaagggtaaaccaaatcctagaagacatgctacgtgcgtgtgccttggatttcgaaggcacttgggatcgttgtttgccgtatgctgagttctcatacaacaacagttatcaggccagcattcagatgtcgccgaatgaggcaatgttcggaagaaagtgccgcacccccttgtgctgggatgaggtgggcgaagccctggtattcggtcctgacatactcaagtcagcagaagaacaagttaagctgatccgagaacgtttaaagacagcgcagaaccgtcagaaaaattacgctgacaatcggagacgtgaccttgagttcgaaaagggagatcatgtgtacctgcgagtatcacccctccgtggtatgagaaggtttgggatgtccggcaagttagcaccccgctacatcggcccctacctcataaccgccagacgtggcgaagtggcttatcagcttgagctacctgaaggtctcgcagacgtgcacaacgtgttccacgtatcccagttaaagaaatgtcttcgagttccagaagagcaagttcccctgggtaatatcgagctggaaaagaatctgacctacaaggaaagaccgatcaaggttcttgaagaggcagaacgtcagactcgaaggaagaccatcaagttctacaaagtccaatggagcaatcattccgaagacgaggcaacctgggagcgagaagatcttctccgcgccgagttcccggacctactcccttag

SEQ ID NO: 13734 - DNA, 779 bp, Oryza sativa
  Clone ID: TFbOSC8289j.C1.o1.fg
aatggtgggatcatttccggatgaacagagcagaacgacaaccaatcacttgggaagagtttaccgaaggattcaagaagacacacgtacctgtaggagttgttgctttgaagaagcgtgagtttagggctttgaagcaaaaggatcgtaccgtggcagagtatcttcatgagttcaatcgtctggctcgctatgctccagaagatgtgcgtactgacgaggaaaggcaagagaaattcttggaaggtccgaaggatgaactgtcagttatgttgatctctcatgactatgaggattttcaggagttggttgataaagcaattcgactggaagacaagaagaacaagatggataaccgtaaaaggaaaatgactgtatcccaggaggcacaaggtagtagccagaggcagcgtatcaagccactccaaattggtgaatctttttctgcaggtcaagaacagtcacaacagttgggcatcagtggtgagatcaactcagagactaatgcaagcaatgaagacaatgatgagcaagctactcaatcagtgtcatttcagcaggatcagtctcaagaagataacagtaatggaagggagcatcgggtgtgtttcaattgttatgagccaggtcacttcgtaaaagagtgtccgaagccgaagcgtcaacagccacaaggccaagtcaacaacattgtcctcacaggagcaaatgcagtgccggttgcgtctcaagggatacagctcagccatcagttccaaagcagcagtagctttctttaa

SEQ ID NO: 13735 - DNA, 4923 bp, Oryza sativa
  Clone ID: TFbOSC900097j.C1.o17.fg
atgaagatgcatttgaagtctattaacccatatatttggagaatagtcgaaaaaggctatgttttgcaaaatcccgaagatcccaccaaggaggacgacgagaacgagcacaagaacgctcaagccgctaatgcaatacttagcgccttgagtggaagtgagttcaaccgtgtggatggcattgagagtgccaaagtgatttgggacacgcttcggaacttgcatgaaggcacggatagtgttcgtgagtccaaggggcaatttgagagatttgtgatgttagatggtgagagcccaagcgacatgtatgaccggttgagcaagatcgtcaatgagatcaagggacttggctccaaggacatgaccgatgaggttgtggtcaagaagatgcgtccggactacaagactctcacacctcatgatttgcttggacgcatccttgcctatgacatgctcgtgcaagagtccaaggatgtcatccaatacatcaaccaaagctcaaccgcaagcatcaagaaggaagacttggctttgaaggcaaaggaagaagaagaagagaaccgcaagagcaagagcaaggcggagattgatgatgaagagatggctctcttcgtcaagaagttcggcaagttcaagaggcgaagcggcttcttcaagggaggatcttccaagcactactccaacaagtcaagtggaagacactccgcaagagtgtgctacgtttgcaaagagcctgggcacttcattgcggattgcccccacctcaaggatggttcccacatcaaggaagataagaagaagagtgagaagaaggatgagaagaaggagaagcacaagcatagcaagagggaacattatggccaagctcaccttgggatgatcttcggcttcaactccgagtcaagctcaagtgatgaagaaggagtcgccacgtttgccgtcaagccttcatcaccaccgagactcttcgactactcaagtgatgaggatgctcccgtttgcctcatggcaaaggagcctaaggtaccttctcctcacaagtcatttaatgttgatcttgttagtgatgaggaggatgaggttgaggatgaggttatggatgatgaattgttcaagtccataactaaggaatccctaccacacttgagtgagttgcttgggagaattgaggaccaatatgcaactcttaagaggcaagagactttgctcattcgtgagaaagagcggtctcataaactcaagagtgagcttgctaaggagagagagaaaaatgaggcattggtacggctttacaagcaaaccaaagagtctcatgctaatcttgaggtggcgaacgctcaacttcaagagagagtggatggcttggacaaagcatacctcactcttgaagagaagttcgaaaccttaaaaaatagtgtctctctccctagcgagccatcttgttccaaaattgtcccaagcaatgaaccatgtgtgagatgcaaagatattgatattgaagcttgtgctactaactctatttccttgagtactttgcaaaagcaaaatgagaagcttatgggactccttcacaatggcctacttaagtgccatatgggtagtaaggccctaaaggactacctaggctatcaaagggacaacttcaaccatgagggtcttgggtatattcctccaccaaaaggaaaggtggacaaaagtgtgatgatcaagaggccccaaggtcttagcaattttgttaaggccaaaagtatccttcctaatgattatgcttcacattgttcttttgatgcatcttatattcttaggaagaatactagtggtcgtgttgttgctaagtatgtaggcccaaggggcaagaatatttctatcaagagagtactttgggtgcctaaggcacttgttactaacatgagaggacccaagcaagaatatgtctccggtggaagaagttgggtgattgatagtggatgcacaaatcacatgaccggagaagaatcaatgttttcaactcttgatccaaatggcacttcacaagataacatagttttcggggacgatggaaagggaaaggttatgggattgggtaagattgcaatctctaatgatctttccattgccaatgttctcttggtaaaatctctaaactacaatcttttgtccgtttctcaattatgttctatgggttacaattgtctttttaccgatgttggtgtgaccgtctatagaaggaatgattcctcggtagtctttgagggtgtcctcaagggaaagctttaccttgtggatttttcctcaagtacagccaaacatgagacatgcatagtggctaagtccaacacggggtggctttggcatcggaggctagcccatgttggtatgaggaatcttcacaagattctaaagcacgatcacatccttggactaacaaatgttcaatttgagaaagatagggtgtgtagcgcatgtcaagccggcaaacaaattggagcacatcaccccgtcaagaatgtgatgaccactacaagaccattggagcttctccacatggacatcttcagaccaattgcttatctaagcattggaggtaacaaatatggtcttgttattgttgatgacttttcacgcttcacgtgggtgttctttttgcatgacaagagtgagatacaagctatcttcaagaagtttgcaagaagagcacaaaacgagttcgacctcaagatcatgaacattcgaagcgacaacggcaaggagtttaagaacacgtgcatcgagagtttccttgatgaagaaggtatcaagcacgagttctcggctccatattcacctcaacaaaatggagtagccgagaggaagaataggactctcattaagatggcgaggaccatgttggatgagtacaagacatcggaccgtttttgggccgaagccgtcaacaccgcatgccatgccatcaaccgcctttatcttcaccgccttcttaagaagattccctatgagctttttactggtaacaaaccaaatgtctcttactttcatgttttcggtagtaagtgttacattcttaataggaaggctagatcctctaagttcgctcctaaagtggatgagggattcttgcttgggtatgggtcaaatgaatgcgcataccgcgttttcaacaaatcctccggtattgttgagatcgcgcgtgatgtgacatttgacgaaactaatggttctcaagtagagcaagttgactcacatgtgttaggtgaagaggaggatccgagcgaagcaatcaaaagattggctcttggggacgtacgtcctagggagccacaacaaggagcctcttcctcaacacaagtggagccacctacatcaacccaaaccgacgatccctctatctcaagcttggatcaaggtgaagaaggcgagcaagtgccaccctcaccgatcaagttagctcgcccaagaatccaccaaagtatccaaagagatcatcccaccgacaacatcttagagacatcaacaagggtggaacaagctcttaatgatccggattgggtgatggcgatgcaagaggagttgaacaatttcacccggaatgaagtgtggactttggtggagcgacctcggcaaaatgtgattggcacaaagtggatcttccgcaacaagcaagacgaggccggggtcataataaggaacaaggtgaggttagtggcgcaagggttcacccaaatcgaaggattagatttcggtgaaacttttgcgccggtagctagacttgagtcgattcgcatattgcttgcttttgctactaacctcaattttaagctatatcaaatggatgtcaaaagcgccttcctcaacgggcctatcaacgagttggtatacgtggaggaaccaccgggcttcgaggatccgaagtatcccaaccacgtgtacaagctccacgaggcactctacgggcttaagcaagcccctagagcttggtatgagtgtcttcgcaattttcttgtgaaaaacggctttgaaatcgggaaagccgattcaaccctttttactaaaagacatgataatgatatttttgtgtgccaaatatatgtcgatgacattatatttggttctactaacaagtcttttagtgaagagtttagtaggatgatgaccaaacgttttgagatgttcatgatgggtgaattgaagttcttcctcggccttcaaatcaagcaactcaaggaaggaactttcatttgccaaacaaagtatttgaaggacatgcttaagaagtttgggatggagaacgccaagccaatccacactcccatgccatcaaatagccacctcaacctcaacgcgcaaggtaaagacgtcgatcaaaaggtataccgttctatcattggctcacttctttacctttgtgcatctaggcccgatattatgcttagtgtgtgcatgtgtgcaagatttcaagccgctccgaaggagtgtcaccttgtggccgtgaagagaattcttagatatttagtgcacacacctaaccttggtctttggtatcctaagggagcgaggtttgatctcattggctatgccgatgcggattatgccgggtgcaaagtggataggaaaagcacatcgggtacttgccaattcttgggtaggtcccttgtttcttggtcttccaagaagcaaaactctgtcgccctatccaccgccgaagtggaatatgttttggcggggagttgttgtgctcaacttctttggatgaagcaaaccttgagagactatggcctcaatgtatccaaaatcccactcctatgtgacaatgagagcgccattaagatagccaacaaccccgttcaacactcccgaaccaaacatatcgatattcgccaccattttttgagagatcattccacaagaggcgacatagacatctaa

SEQ ID NO: 13736 - DNA, 1002 bp, Oryza sativa
  Clone ID: TFbOSC900176j.C1.o10.fg
atggtgaacactcgcactagtggaagtggaaacaataacaatgaagagaacccaacccttgctcaagtgctggctcaacagacccaattgatcaacatgttagtgcaacaaatgcagaaccagcaagggaacaacaatgtcaatcctccgccgccgcagaacaagttagctgattttcttcgtgtgaagccacctactttttctagcactaccaacccagtggaagcaggtgattggctgcacgctgttgagaagaagttggaactgctccagtgtacggatcaggagaaagttgttttcgcttcacatcagttgcaaggacgtgcttcagaatggtgggatcatttccggatgaacagagcagaaggacaaccaatcacttgggcggagttcactgaagcattcaagaagacgcacatacctacaggagttgtttctttgaagaagcgtgagttccgggcacttaagcaaaaggatcgtacagtgacggaatatcttcatgagttcaatcgtctagctcgctatgctccagaagatgtgcgtactgacgaggaaaggcaggagaagtttttggaaggcttaaaggatgagctgtcagttatgttgatctctcatgactatgaggattttcaggagttggttgataaagcaattcgactggaagacaagaagaacaggatggacaatcgacagtcacaacagttgggcatcagtggtgagattaactcagagactaatgcaagcaatgaaggcaatgatgagcaagctactcaatcagtgtcatttcagcaggatcagtctcaagaagataacagtaatggaagggagcagcgggtgtgtttcaattgttatgagccaggtcacttcgtaaaagagtgtccgaagccgaagcgtcaacagccacaaggccaagtcaacaacattgtcctcacaggagcaaatgcagtgccggttgtgtcttcaagtgttacaactcagccactagtatcaaagcagcagtag

SEQ ID NO: 13737 - DNA, 2700 bp, Oryza sativa
  Clone ID: TFbOSC900258j.C1.o16.fg
atggctggttttgccgatgcactgaggttggataaattcaccggtgtgcactttaagagatggcagatcagggtcactctgtggctgacggctatgaaatgcttctgggtgagtaatggcaaacctgaaggaattcttactgctgatcagcagaagcaattcgaggaagccactactctctttgtgggatgcattcttagcgttcttggcgatcgtctggtcgaggtgtatatgcatatgaccgacgctaaggagttgtgggatgcactgaatactaaattcggtgctactgatgctagcaatgatctgtatatcatggagcagtttcatgactacaagatggctgacaaccgttctgtagtcgaacaggctcatgagatacaaaccatggctaacgaactcgaactccttaagtgtgtcttacccgataaatttgtggccgggtgcattattgcgaaactacctccatcatggagaagtttcggtactgcactcaaacacaagagaccggaatactccgttgaggggttgatagcgtctcttgatgttgaggagaaagctcgggaaaaagacgccgcgtctcagggcgatggtgggcagtccagtgccaatgttgtgcacaaggcccagaacaagagcaaggggaaatacaaagctcaacagaccaccaacttcaagaagcagaagaagaacaacatcaatcctaaccaggatgagaggacttgctttgtgtgtgggcaacctggtcatctggctaggaagtatccacagcgcaaggggatgaaggcacctgcagggcagacttctaagtctgctaatgtgaccattggcaatactggagatggaagcgggtatggttctaagtgccatagttgtgtgcaatcgaagcaacctcgcatgcctcacaaggctgccgaggagagaaacttggcaccactagaactcctacattcagatctttgtgaaatgaatggggtgttgacgaagggtggaaaacgatatttcatgacgttgattgatgatgctactagattttgctatgtgtacttgttgaaaacgaaagacgaggctctagactattttaaaatttataaggcagaagttgaaaatcaacttgacagaaagataaaatggcttaagtctgatcgtggtggagagtttttctcaaatgagtttgacttattctatgaggaacatggcatcatacatgagaggacgcctccctattctcccgagtctaatgggattgctgaaaggaagaaccgcacattgactgacttggtgaatgccatgttggacacggcgggactacctaaggcatggtggggggaggcattgttgacttcgaatcatgtgttaaacagagttcctaacagaaataaggacaaaacaccatatgagatatggattgggagaaaaccatcactttcttatttgcgcacatgggggtgcttggcgaaagtcaatgtaccaataacgaagaagcgcaaacttggacctaagactgtggactgtgtctttctgggatatgctcatcacagcattgcctatagatttttaatagttaaatccgaggtacctgacatgcatgttggtacaattatggagtctcgtgatgctaccttctttgagagctttttcccaatgaaggatacacatagtagttcgagccaaccctctgaagtaattcccagttcaatcacaccaccagaacaaactgaacatacacatgaacatgtcactgaggaggatgtcagtgaagctcctcgaaggacctcacatggtcttctcgttcatcaaatggacgttaagacagcttttcttaatggagagctggatgaggagatctatatgcatcaacctgatgggtttgtagttgaaggtcaagaagacaaagtgtgcaaattgttgaagtctttgtatggtctgaaacaagctcctaagcaatggcatgagaaatttgacaaaacattgacatctgcaggctttgcagtcaatgaggcagataaatgtgtgtactatcgccatggtgggggtgagggagttattctgtgcttgtatgttgatgacatactgatatttaggacaaaccttgaggtgataaatgaagttaagtcattcttgtctcaaaattttgatatgaaggatttgggagtagctgatgttatcttaaacattaagctaattagaggagatgatcactggcgtgcgcttgagcgagtaatgcgctatctgaaaggtagtatggaattggggcttcactatactgggtatcctgcggtgctggagggttatagtgattctaactggatctctgatgtggatgagatcaaagagaccattttgatgaggtcaaccatggaagcaaaactaacggcactggatactactactgttgaggcagaatggctgcgtgatctattaatggatctgcctattgttgaaaagccggtgccggctatccttatgaactgtgacaatcaaacggtaattgtcaaagtgaatagttctaaggataatatgaaatcgtctagacatgtgaaaagacgattgaagtctatcaggaaattgagaaactccggaattataacgttggattacatccaaacagctagaaacctggcagatcccttcacgaagggactatcacgaaatgtgatagataatgcatcgaaggagatgggtttgagacccatgtga

SEQ ID NO: 13738 - DNA, 1689 bp, Oryza sativa
  Clone ID: TFbOSC900363j.C1.o1.fg
atgaagatgcatttgaagtctattaacccatctatttggagaatagtcgaaaaaggctatgttttgcagaatcccgaagatcccaccaaggaggacgacgagaacgagcacaagaacgttcaagccgctaatgcaatacttagcgccttgagtggaagtgagttcaaccgtgtggatggcattgagagtgccaaagtgatttgggacacgcttcggaacttgcatgaaggcacggatagtgttcgtgagtccaaggtggagatcctcaagggcccaagcgacatgtacgaccggttgagcaagatcgtcaatgagatcaagggacttggctccaaggacatgaccgatgaggttgtggtcaagaagatggttcgagcaatcactccaaggaactctaacttggtgaccatcattcgtgagcgtccggactacaagactctcacacctcacgatttgctcggacgcatctttgcccatgacatgctcgtacaagagtccaaggatgtcatccaatacatcaaccaaagctcaaccgcaagcatcaagaaggaagacttggctttgaaggcaaaggaagaagaagaagagaaccgcaagagcaagagcaaggcggagatcgatgatgaagagatggctctcttcgtcaagaaattcggcaagttcatgaggcgaagcggcttcttcaagggaggattttccaagcactactccaacaagtcaagtggaagacactctgcaagagtgtgctacgtgtgcaaagagcccgggcacttcatcgcggattgcccccacctcaaggatggttcccacatcaaggaagataagaagaagagtgagaagaaggatgagaagaaggagaagcacaagcatagcaagagggaacattatggccaatctcaccttgggatgatctttggctccgactccgagtcaagctcaagtgatgaagaaggagtcgccacgttcgccgtcaagccttcatcaccaccgagactctttgactactcaagtgatgaggatgctccggtttgcctcatggcaaaggagcctaaggtaccttctcctcttaagtcatttaatgttgatcttgttagtgatgaggaggatgaggttgaggatgagattatggatgacgaattgttcaagtccataactaaggaatccctaccacacttgagtgagttgcttgggagaattgaggaccaatatgcaattcttgagaggcaagagactttgctcattcgtgagaaagagcggtctcatgaactcaagagtgagcttgttaaggagagagagaaaaatgaggcattggtacggctttacaagcaaaccaaagagtctcatgctaatcttgatgtggcgaacgctcaacttcaagagagagtggatggcttggacaaagcatacctcactcttgaagaaaagttcgaaaccttaaagaatagtgtctctctccctagcgagccatcttgttccaaaattgtcccaagcaatgaaccatgtgtgagatgcaaagatattgatattaacgcttgtgctactaactctattgccttgagtggtttgcaaaagcaaaatgagaagcttacgggactccttcacaatggcctacttaagtgctatatgggtagtaaggccctaaatgtcgcgaccgggaaaattgcattttcccgaacgctagtgtattaa

SEQ ID NO: 13739 - DNA, 3810 bp, Oryza sativa
  Clone ID: TFbOSC900412j.C1.o1.fg
atgtcgggccaagcgggggatgggaacgatggtgataagggagctaagatcccttatgactatccctctacatctacatcttatgtgagtacctatagcggcaaagctccgtacttcaatggtacggactatgccgcttggaagcataagatgaagatgcatttgaagtctattaacccatctatttggagaatagtcaaaaaaggctatgttttgcagaatcccgaagatcccaccaaggaggacgacgagaacgagcacaagaacgctcaagccgctaatgcaatacttagcgccttgagtggaagtgagttcaaccgtgtggatggcattgagagtgccaaagtgatttgggacacgcttcggaacttgcatgaaggcacggatagtgttcgtgagtccaaggtggagatcctcaaggggcaatttgagagatctgtgatgttagatggtgagagcccaagcgacatgtacgaccggttgagcaagatcatcaatgagatcaagggacttggctccaaggacatgaccgatgaggttgtggaactctaccttgagcgtccggactacaagactctcacacctcatgatttgctcggatgcatccttgcccttgacatgctcgtgcaagagtccaaggatgtcatccaatacatcaaccaaagctcaaccgcaagcatcaagaaggaagacttagctttgaaggcaaaggaagaagaagaagagaatcgcaagagcaagagcaaggcggagatcgatgatgaagagatggctcccttcgtcaagaagttcggcaagttcatgaggcgaagcggcttcttcaagggaggatcttccaagcactactccaacaagtcaagtggaagacactccgcaagagtgtgctacgtgtgcaaagagcccgggcacttcattgcggattgcccccacctcaaggatggttcccacatcaaggaagataagaagaaggatgagaagaaggagaagcacaagcatagcaagagggaacattatggccaagctcaccttgggatgatcttcggctccgactccgagtcaagctcaagtgatgaagaaggagtcgccacgtttgccgtcaagccctcatcaccaccgagactcttcgactactcaagtgatgaggatgctccggtttgtctcatggcaaaggagcctaaggtaccttctcttcttaagtcatttaatgttgatcttgttagtgatgaggaggatgaggttgaggatgaggttatagatgacgaattgttcaagtccataactaaggaatccctaccacacttgagtgagttgcttgagagaattgaggaccaatatgcaactcttgagaggcaagagactttgctcattcgtgagaaagagcggtctcatgaactcaagagtgagcttgctaaggagagagagaaaaatgaggcattggaatatgtctccggtggaagaagttgggtaattgatagtggatgcacaaatcacatgaccagagaagaatcaatgttttcaactcttgatccaaatggcacttcacaagataacatagttttcggggacgatggaaagggaaaggttatgggattgggtaagattgcaatttctaatgatctttccattgccaacattctcttggtaaaatctctaaactacaatcttttgtccgtttctcaattatgttctatgggttataattgtctttttaccgatgttgatgtgaccgtctatagaaggaatgattcctcggtagtctttaagggtgtcctcaagggaaagctttaccttgtggatttttcctcaagtaaagccaaacatgagacatgcttagtggctaagtccaacacggggtggctttggcatcagaggctagcccatgttggtatgaggaatcttcacaagcttctaaagcacgatcacatccttggactaacaaatgttcaatttgagaaagatagggtgtgtagcgcatgtcaagccggcaaacaaattggagcacatcaccccgtcaagaatgtgatgaccactacaagaccattggtgcttctccacatggacctcttcggaccaattgcttatctaagcattggaggtaacaaatatggtcttgttattgttgatgacttttcacgcttcacgtgggtgttctttttgcatgacaagagtgagacacaagctatcttcaagaagtttgcaagaagagcacaaaacgagttcgacctcaagatcaagaacattcgaagtgacaacagcaaggagtttaagaacacgtgcatcgagagtttccttgatgaagaaggcatcaagcacgagttctcggctgcatattcacctcaacaaaatggagtagctgagaggaagaataggactctcaatgagatggcgaggaccatgttggatgagtacaagacatcggacaatttttgggccgaagccgtcaacaccgcatgccataccatcaactgcctttatcttcaccgccttcttaagaagactccctatgagcttcttaccggtaataaaccaaatgtctcttactttcgtgttttcggtagtaagtgttacattcttaataagaaggctagatcctctaagttcgctcctaaagtggatgagggattcttgcttgggtatgggtcaaatgaatgcgcataccgcgttttcaacaaaacctctagtattgttgagattgcgcgtgatgtgacatttgacaaaattaatggctctcaagtatccgagcgaagcaatcaaaagattggctcttggggacgtgaagaaggcgagcaagtgccaccctcaccgatcaacttagctcgcccaagaatccaccaaagtatccaaagagatcatcctaccgacaacatcttaggagacatcaacaagggagtatccactcgttctcgtattgcaaatttttgtgagcattactcgtttgtgtcttctcttgaacctctaagggtggaagaagctcttaatgatccggattgggtgatagcgatgcaagaggagttgaacaatttcacccggaatgaagtgtggactttggtggagcgacctcggcaaaatgtgattggcacaaagtggatcttctgcaacaagcaagacgaggccggggtcgtaataaggaacaaggcgaggttagtggcgcaagggttcacccaaatcgaaggattagatttcggtcaaacttttgcgccggtggctagacttgagtcgattcgcatattgcttgcttttgctactaacctcaattttaagctatatcaaatggatgtcaaaagcgccttcctcaacgggcctatcaacgagttggtatacgtggagcaaccaccgggcttcgaggatccgaagtatcccaaccacgtgtacaagctccacaaggcactatacgggcttaagcaagcccctagagcttggtatgagtgtcttcgcaattttcttgtgaaaagaggctttaaaatcgggaaagccgattcaaccctttttactaaaagacataataatgatatttttgtgtgccaaatatatgtcgatgacattatatttggttctactaacaagtcttttagtgaagagtttagtaggatgatgaccaaacgttttgagatgtccatgatgggtgaattgaagttcttcctcggccttcaaattaagcaactcaaggaaggaactttcatttgccaatcaaagtatttgaagaacatgcttaagaagtttgggatggagaacgccaagccaatccacactcccatgccatcaaatggccacctcgacctcaacgagcaaggtaaagacgtcgatcaaaag

SEQ ID NO: 13740 - DNA, 2434 bp, Oryza sativa
  Clone ID: TFbOSC400171j.C1.o2.np
atggctgatttcccccctattcaccgtgctgagctcgcaaatatgacattggttgccggctacattgaagcttcagagtacacagttattgagcccctcagtggagagttgctgcatagagttcgcttggaagttcatggtagtttgggcacccctctggttaatatggtggttgagacttctagaggaacaatagagcatgcttgccaggaagccgtatatttggtgatgaccaggatttgagagaagtttgttttcatcttcgatggaattgcttaccgttatcatccaagctgttcagcaggaggcattgctagtagtttcagttcagcttcaagtgagaatgatactacttttggtcgcatgaggactgtgatgagagcgcttgacaagatgcaccaggatcttcaccgagcctcagagacgttgaacgacaagaagcttattcaaatagctcgtttgcaagatgaggttgatcgtctcaaggtcgagagcgcaatgctccaaggtcgtccagcaccaagaagagccaaaatccggacaatgtcgaggaagaggtctacagctcccattcgcatgcagttggcgtcccgccccagtcgatgtcctagccgtcgatcccgttcccgtcccagttcgcgcgtcttcgcagttgccgatgctctccgccgccaaagccgcaacagttagtgatgcagtgaagtggatcgtgtcaatctctagtagcagcagttcgagtggtgatggtaactgtttttctccttccctatttctcttctcgtcttctgcttcagatggtgaacacaaggactacccgttctggaaacaatgtcaatgaggaacagctgttaggaaatggttcaggagatatatcagagaatcctccgcttgcctagacaatagcaagacagactcagataatgacaaccatgataaatcagatgcaacaacagtatcatcagatgatgcaacatatgatgcagcaacagtagcagaaccagcagcacaatggtccccctcagtccaagttgccaaagttttgatgtgtccgtccgctgactttctcgagcacaagtaacccaatggaggcttacgattggttgtacgccattgagaagaaacttaatctacttaagtgcactgatcaggagaaggttgcgtttgccacacatcagttgcaaggtctagctttagcttggtgggataattaaatgattacctattcagccggaatagaagttacttggatgagttttgtcgtgttttcaggaaagcccaggttcccgatggaattgttgcatagaagaagcgagagtttaggtctctacatcaaggaaacatgactgttactgagtatctgcatgagtttaatcgtctagcacgttatgcccctgaggatgtgcgaaccgatgctgagagatgggaaaagttcttggcaggtttgtatgatgagttgactaacgagttgatttctagagattatgctgattttcagagaattgtggacaaagccattcgtcaggaagactagcgtaacaaaatggatcgcaagaggaaagctatacagttcaggagtcagcaagatggacaatagaagctccgctacggtccttgacagcacaatggtccaactactatgattgttcgacagcacaggccgtatcagccaggaaatttcagccaaggcaatagtggaaatcagaacaaccgtaatcccgttccgcgcccgccaatgaaacagtctcaagcttcgcagccccaacagccgaaggagttaggaggaaagcccctcacatgtttcaactgcggagatcccggacattttgcaggtaagtgtcctaaacgaaagcgcaatggacccaagattgttcaagctcgtgttaatcacgtgtctacggaagaagctcaagcagcgctggaagtggttttgggtacgttccctgcgaactcaattcctgctatagtttttttttttctggtgctacgtattcatttatatccaagagatttgttggggtacacgggttaagaaaagtggaacttagttctcccatgaaagttaatacaccgggaaatagctcaacattagttagtttttgtccctctacgatgatagaaatccaagtgtcaccttttctagccaatcttatccttgtggagtgcaaagacctagatgtcatactgggaatggattggttgacaaaacacaacggagtcattgattgtgcaagccgcacagttacgttagttaatggaaaaggagaagtggtagtgatgcagtctccattaactcagaagaaaggagtaagtttgaatcaagtggaaagtgaacaccaggtccctttattaactaaaaatgttcaaattttacactacaaaccttatggcactaagtactatcatacatgtaccatttccttacccatgccccact

SEQ ID NO: 13741 - DNA, 1980 bp, Oryza sativa
  Clone ID: TFbOSC400368j.C1.o20.gm
atgagaccagactactccatcccgctcgccagcgtgcaccggcgatcgggagagcaggtctccggaacctctgccttcgacgtcctgcaccgggagaaggcggcaataaggcactgtgattttactatggctggttttgccgatgcactgaggctggataaattcaccggtgtgcattttaagagatggcagatcagggtcactctgtggctgatagctatgaaatgcttctgggtgagtactggcaaacctgaaggagttcttactgctgaacagcagaagcaattcgaggaagccactactctctttgtgcgatgcattcttagcgttcttggcgatcgtctggtcgaggtgtatatgcatatgaccgacactaaggagttgtggaatgcactgaatactaaattcggtgctactgatgctagcaatgatctgtatatcatggagcagtttcatgactacaagatggctgacaaccgttctgtagtcgaacagactcatgagatacaaacaatggctaaggaactcgaactccttaagtgtgtcttacccgacaaatttgtagccgggtgcattattgcgaaactacctacatcttggagaagtttcggtactgcactcaaacacaagagacaggaatactctgttgaggggttgatagtgtctcttgatgttgaggagaaagctcgggaaaaagatgccgcgtctaagggcgatggtgggcagtccagtgctaatgttgtgcacaaggcccagaacaagagtaaggggaaatacaaagctcagcagaccaccaacttcaagaatcagaagaagaacaacaacaatcttaatcaggatgagaggacttgctttgtgtgtggccaagttagtcatctggctaggaagtgtccacagcgcaaggggatgaaggcatctgcagggcagacttctaagtctgctaatgtgaccattggcaacactagagatggaagcgggtatggtaatttacctactgtcgcacggggttccaccgtcctaatggggaatgggtcacatgcttctgttcatggtgttggcacggtagatctgaagtttacttcgagaaagatcgtgcagctgaagaacgtgcagcatgtcccttctatcgacaggaatcttgttagtggctcccgtctgactagagacggatttaagttggtttttgagtctaataaagtagtcgtgtctaaacatggatattttattggtaaaggttatgagtgcggaggcctgttccgcttttccctttctgatttctgcaataagtctgtgaaccatatttgtggcagtgtggatgatgaggctaatgtttggcactcacactactggaaggaggctgtccgtagtgaaatggattccattatcgctaacgggacttgggaggtgacagagcgaccctatgggtgtaaacctgtggggtgcaagtgggtgttcaagaagaagcttaggcctgacgactactccatcccgctcaccggcgtgcaccggcgatcgggagagcaggtctccggaacctctgccttcgacgtcttgcaccgggagaaggcggcaataagagtaggaggtgagcggcaagagatgatggggatggaggggatcggcgaagggattggcacagcggcggatgaggaggacgtcggcgccggtggcggcggaaagtcagctccggccatggcggatggggccgaggtcggaaccggccgcggcggctccggcggcggggaagaagcagcggctccggcgtcggggatgcgacggcagtccacgtggggaagaagcaccagctccggcggcagggcagaatcagcagctccggcggcggcaatccacgcggggaggatctctagcgaggatgcggcggcacgacggcagaacatgcgaggaggaggaggagaagcaaaataccaactcgatctggatcttgtgttcataaccggccactgggagtgggaacagtga

SEQ ID NO: 13742 - DNA, 375 bp, Oryza sativa
  Clone ID: TFbOSC400628j.C1.o2.np
tgtaaaaaagttatggtttgttacaactgcaaagaaccacgacattactccagggactgtccctaaccaaggaaaaaaaatcggcctccacattttcgccaatttacaagaagcagacatgccaatcgccaagtgttcactggagcaaatgcagtacctgtttctctgaaaggcagtaggcccaaggacctcattgccccagaagcacccacaacatccggagtgaagagtacttggttgagaaagttgacaccaagggtatgaattatgagaagtcctcgaactgaaaccccgtcttcaagtaccgcaccccagtcgaagtcagctcaaggtgcaaccaaggataagtcaggtgaaaagaagattccatctgca

SEQ ID NO: 13743 - DNA, 2970 bp, Oryza sativa
  Clone ID: TFbOSC401122j.C1.o81.fg
atgtatgccgctgccgcacctggagatggcacgctgggagccggatatggcgctgcgaacgacaacaccaacggaggcagttctgcctcacaatccagcggagggacattcacagggtataacttctcatttggatatgaaagtaaaaatgataagagtcacatttatattgagaacatggagatcatgaagagccgccagagccgcaaccggtcagaccgagccgacggcggtctgaccgagccgtggacgctagtgtggcacttgatcatcctcggcaagcatcctagacttgttactcttggaggttgccgcctcctagacggcttgtgtaggtgttgcccggtgacctctccgaggagattgtggtggaagcccggcgccgtttggaaggacatgtgggatgcacttgaggccaagttcggagttcccgacgccggcaatgagctgtatgtcatggaacagtactatgactacaagatggtcaatgaccgttctgtagtagaacaagctcatgagattcagatgctggctaaggaacttgagaacaacaactgtgagttgccggacaagtttgtggcgggtggcattattgccaaattgccaccttcttggtcggactttggcacttctctaaagcacaagagacaagagttcagtgtttctgatctcattggctctttgggtgttgaagagaaggcgagggcaaaggacattgggggcataaaggttgagagaggttctagtgccaatatggtacagaagaagaaccctcatgcatcccacaacaacaagaaagtcaagcctgatgtcaaagccaaggctacagccaattttaagaagaaaggtaaggaaaaggcaaatggagactgttttgtgtgtggcaagtttgggcattgggccaaggattgtcttgagcacaaagacaggaagtttgccaacatggtcattagcgagggcggaggaacatcggggtacgataaattattacctacagttctctctgtttttcattcacctgattggtgggttgatactggtgctaatattcatgtcgggagaggttcctccttgttgatgggaaacgagtcacttgcggttgttcatggtgttggactttccaaggaatggtggggtgaggcagttttgactgcgtgtcatgtcctgaataaaattccaatgaagcataaagaagtaacaccattcgaggaatgggaaaggaagaaattaaatctctcatacctacgaacatggggctgtttggcaaaggtaaatgtacctatagccaaaaagcgtaaacttggaccgaatactgttgattgtgtgttccttggttatgctgctattcacagcgtgggttatagattcttaatagtaaactctagagtactcgacatgcgtgttagtacaattattgagtctagagatgctacattctttgagaatgaatttcccatgaaaaatacacctagcacttctagtcaagaaactgtcataccccataagcactttgcactgatagaacacaatgatcaaacgcctgagggaaatcctgaggaggataacattgtagatactcataagagtaagaaactaagggttgtaaaatcctttgtagatgactacattgtatacctcgtggatgacactccaagaaccatagaagaggcatattcacctcctgacactgactactggaaggaagcagtacgcagtgagatggactcaattatgtctaatggtacttgggaagtcgttgagcgtccatatgggtgcaagcctgtaggatgcaaatgggttttcaagaaaaagcttaggcctgatggtacaattgaaaagtacaaggcaagccttgtggccaagggttatacccaaaaagaaggcgaggattttttcgacacctactcaccagttgcccgtttgaccacgattcgagtactacttgctctggcagcctctcatggtcttctcgtccatcagatggacgttaagacagctttcctaaacggagagttggaggaggagatctatatggatcaaccagacggcctcaatgtgattgaggaggtcaaggactttttgtccaagagttttgaaatgaaggatttgggagaggctgatgttattcttaacattaagctattgagaggagatgagggtgggattacacttgtgcaatcccactatgtggacaaggttttgagtcgctttggatatagtgactgcaagccagctcctactccttatgatcccagcgtgctattaaggaaaaaccgaagaatagcaagggatcaactgagatactcccaaatcattggttcattgatgtacttggtaagtgcaacgaggcctgacatctcatttgctgtaagcaagctgagccggtttgtctcaaatccgggagatgatcattggcaggctctggaaagaataatgcgctatctaaagggcactatgagctatggaattcactataccgggtacccaaaagtactggaaaggtatagtgactcaaactggatatctgatgctgatgagataaaagccataagtggatatatgttcacacttggaggtggcgctggttcctggaagtcttgcaagcagaccatcttaacgaggtcaacaatggaagcagaacttacagcactagatattgcaacagttgaggccgagtggcttcgtgaactcctgatggatttgccggtggttgaaaaaccagtgccagctatcctaatgaactgtgataatcaaacagtgattattaaagtgaacagttcaaaggacaacatgaagtcatctaggcatatcaagagaagactgaaatctgtcagaaagcagaaaaactccggagtgatagcattggactatgtccaaacggctaaaaatctggcagatcagtttaccaaggggctaccacgtaatgtgatagacagtgcatcgagggaaatgggcttgataccgacctaa

SEQ ID NO: 13744 - DNA, 1272 bp, Oryza sativa
  Clone ID: TFbOSC401126j.C1.o53.fg
atgtcaggtgaagaaggtgcaggtgccactgctcatcgacaccaaagatatgacgataaagacgaagagcaatctgttgctgatgatgaggaggaagatgagagtgttggaaatagaagacgacgtcgaattagggacaaagatgatcctttatctaaggtaaaatttactatgccttcttttgatgaaacatactatcaagagatgatgattgctttgtcacgatgtaatttgcaagaaactgaggatgctagaatttctaggttctatggaggtcttaatagagagattcgggatattcttgaatataaagaatacaataccatgaatagattattccattttgcttgcaaagctgaaagagaagtgcagggacgcaacaagcataggagttcttttgcaggtgctacttccacacgacagtcaacaccacgtcaatctactactgctgttcgtccacctacctccacgccatcccatgctcaagaaacaagcaaaaacgcttcagttcagactccagccaagagtgcaacttcagtagattccactagacgtacacgtgatattacatgtcataggtgccatggcattggacacattgcccgcgactgtccaaatcggcgagctctatttgtgaatgctgatggtgagtatacttctgctagcgattatgatgatgaatatgctttagctgccactgaccacgcaggtggacaagataatgatgacatcgaggaagtccaattgcatccagagtcgctagatcagtatcctagcctaattgtcaagctagcacttagtgctaaagagaagtgtgaagagcaaaaccaacgtcacaatttgttccaaagcaaagttcttgtgaaaggccataccgtcaaaatgattattgatagcgggagttgcaacaatttagcaagtgaagagatggtcaagaagcttggcttgactacccatccacatccacatccgtatcatattcagtggtttaatacatgtggtaagatgaaggaatatgaggatgtttttcacgatgagatacctccaaggatggccaatggacgagagagtgcacacaatcaagaagatgggattgagtcgaggacgactccaattctagaagaggaggatgatgaggacatcacttcgttggatacgctcataacttcacacactccaatgataattccaagtccaagtccagttcggcctccagagacagcactgacttcaaacggacctagcgccttcatgccaactcgatttgggtga

SEQ ID NO: 13745 - DNA, 5070 bp, Oryza sativa
  Clone ID: TFbOSC401435j.C1.o51.gm
atgacgaagatcggagatagctcgccaccgaagatcggagaaggctcgagctcgggtgccgccgagcgcgtcatggccaactccagcgtcgtggagctcccgctattgacaaggaccaactaccacgagtggtctttggtgatgcaggtgagcttggaggcgttggagcagtgggacgcggtggaggcggtgagcaaggaccggggcaaggatcggcgcgcgctggccacgatcatccgcgccgttccaagggagatgaaggccgggctcgccgtgaagaagtcggcgaaggaggcgtgggacgtagtgaagaagatgcacgctggcgacgaccgcgtgaaggctacgagtgtccaacgtctcatgaagcagttcgagaacatggcgttccgtgacggagagaacgtcggcgacttcgcaatgcgcatcaacgggctcgtcgccagcctgcgcgagcttggtgaggagatggaggacagtcgcgtcgtgaagaaagttctgcgcgtggtccccaagaggctgaagcaagtcgcggtggcgattgagatgctcgccgacatcgacaccatggagatcgaggagctcgtcggccggttgcaggtggcagaggacgcggacgctgaggatcaagcggcgtctagcgcggagcacgctgggcaactcctgctcacggaggagcaatgggaggcgaggcggcgtcaacgccgtggcaaggaacatgcccacggcggcgttggcgagaagggcggcggccacgacgacgacgacgacgatggcagtagcacaagctcggggcgcggtaagaaacgctaccgaggcaagtgcttcgactgcggcgtgcgcggtcacatggcgcgggactgcccgaagaagaagaaggagagagcgctgctcgtcgacgtcgacgacgagccgacactgctggggagattgttaggaataaacgcgttgtcatggccgtgcctgcgttttgccacggcgcggcagtggcgcatggcgtcaggccaagtcctggcggttgagcgcatgcaggagcacgccatgcgagaaggatggaggcccgttcatgtggaggagtatgtggctcacgaacgcgtgaaaccaggtcgtccaggctgccatgcgtacgtgcgcgtgaagctcgctaagtgggtgcgtgggcgctgcgtcgccgtgggagcgataggctccgcggcgttcgtcgccgaaactccactgttcatcttcaacctccagccattcttgcatgggatggaagcgccggcgaacgtaggtgtcgccatgccaccaccgaagcaggtcatggcggagccgttgcccttgacgacgccacagaggaagtcgtggccgagggcgatgcgggagaagtcgaggcccttgagcaagctcagccccggccactcccagcacgtcgggtcgtgggcgtcggagaggccgcaaacgaccacccagcgcatggcggcgtggctgccgttgggcgccatgaggccgcacaagatgttggtgccagcggcgatggccgcgcgctcgtccaccgccgccgccgcgctccactcctgctctgccgcagccgacgccctgctccactctgccagcctccttcctcgccatctccgccgcgaccgacaccgccccgctaaggagcatgctttgagggagaatatgacaaagatcttttgtctgtgccgtcattgcaagaatcagaaattgttggtagatcctggtgaaatattgggtcacataatggagtacggattcaccgccaactacaaggtttggacctatcacggggaattcgccaatccggaagatgacgatgaagagttaagtttcgagatgagtgaggcagagaattttataatcgaagacatgtcgcgtgaaagaatggttgtcgatgtttccaccgatagtgatgatttcgatggtggttttgatttagaggatatgctacgccatgttgaaccagagggtaagcgcgggaagattccttcaatggtgatgtggtacctaccaattaaggaccgcctgaagcgtctgtactcaaacccgactgatgctgagttgatgagatggcatcaagagagccggaaaatagatggtatgattcgacatcccgccgacgctcgccagtggaagacatttgatgcaaaacacccagaatttgctaaggatcctaggaatgtaaggtttgcgttgagcactgatggaatgaacccgtttgtggagaatgacactgccccagtagcaagaggtggtacatacgtgtatgagataacaaagaagattaaggttgtatatggaaagggaaagaagaagacagtaaagaggaagaaagctgatggtgacaacggtactgcgtcgcctttcaagaagcactcaattttctttaaatacttagattactggaaggacctagagattcgacatgcaattgatgttatgcacctcgagaagaacgtgtttgatagcaccgttggcacattgctggacatcccgagtccgcttcagacatttgccgtcgagactgtatgccagcttgagatgtatttcccaccatcatttttagatatgatggagcatttgatcgttcacatcgtccctcagattattgaacttggtccattatacttacatcagatgtgggcctatgagcgttacatgtcgatcctcaaaggctatgtacgcaatcgcgctcacccggaaggatcaatgatagagggatacacaactgaagaggcagtcgagtgttgtatggactacataaaggatgctaatgccattggcattcctgttcatcgacatgaaggtagattgtctggaaggggtactgttggtaggaagcagttcttcgataatgattacaaaaaggtgtccgcggcacacaacagcgttcttcaacagctcgctatcgttgagccattcattgagcgacacctagaagaaatcaaagcctgcttcccagggcggtccaatgattggatatcaagagagcacaagcgtcgctttcctctgtggttgaaagatctaaacttgccagttggtgattctgtggaggaacttactttacaaagattggcatgtgggccttcaagtattgtcaattcatggcaaggttacgacatcaatggatttaccttgagtacgactacgaaggacatgaaaagcaccacacaaaacagtgggatccgtgtcgaagcgattgacacgagtggagaaaagaggtcgtattatgggaccattcaagaaatatgggaactggactatggcctaaacatccagatccctgtgctccgttgtgaatgggttaaagacacaataggggtttccgttgatgactacgggctaacgatagtcaatcacagtaaaacaagccacaaggatgatccatgggttttagcagagcgtgtggctcaagtgttttatgtgaaggacccttcagatgaaagaaaaactattgtcatatccggaaagcaacagatcgtcggcatcgacaacatcgaagaccccaatgattacaaccagttcgacgatgtaccattgtttactgatcttcctatgcgaattaagaaggttgagagaacaatcgatgaagcaaatatgtcgtacgttcgagcagatggtgttgccaaggctgccaaaatttcccaagtcgccgtcgccgtcgtccccgccaccgccggctcctccccaaagtcgccccgccaccgccggctcctccccgaagtcgccccgcccctcgccgtcgccgacgccactgccaggaccgttgccctcgccgtcgccgtcgccgccgccaggtggccgtcgccgccgcacggacctctcccccctcgccgttgccatcgccgccgccaggtcgtcgccgccgccaggtcgtccccgccgtcgctaggcgggagtgggaaaaaaagacgtggtgagagaagcaagaataaattacccaaggaaacttacaacgtgattgctctcgatcaggatgggaagcccatcgagccaccgatagtgcggtccaagttcagcaacgcctgtggcactctagtcaggacgcgttgtcccattaatgtcaagttgtgggaaacagtggacgacaacatcaagacacttctctggaatgagttgcagaagtattttgtgttccctcctggatcagaggctgactgggacacgtttgttgcggatcgtacaacagctgaagcattggctttgaggaaaaaaatgtccgagctcgcgaagaagaacagatatccccatagattggggtcgagcggatacgctggtcatgtcgatcaatggcgggagatcgagcaaagatttgccgcggccggtaagcccctgctggtagaccccatggttgaacgtagcaagaactgggtcgccaaggtccatagcgaccacgtttccttggaactagacatacctgcacctgaggggattgaacttctcggtgatgcagtgaatcagtttatcttgtggcaccgcagagacataatcctgagcgcggccgttcttgcagcaggatctttaaccccatcctcatcgcaggcaatgactgctgccgctcctgcaccaccgtcgcctcctgaaccaccgtcacctcgacatctgccgtcaccaccaccgcttaggaattctgagaagagaaaagaacttgctcacgtcttgtcagactcccagaagtcagtactagcggcccaagatgaagtgcaatcctggttatctgccgatgtgcctaaaacttatgagtatggcaagccattcttgccaacttatcttatgaacaagctaccatgggaaatgagggtaatgcacgaatgtatgcaattccacgaagctgatagaactggagcaaaggttggatacgtcgatccaacaagaatatgcaaaacacaacacaccgtagagctgagacaggactgcgagcaattggttggcaagaccccggaagaaaaggaagaatatgtgaagacattgcacaagaggaagaagctagaagtagcaacatacttggcaatagcaatgttggcgcacgccgacaaagatgtcttaatggtcccctaccagttcacgtaa

SEQ ID NO: 13746 - DNA, 2304 bp, Oryza sativa
  Clone ID: TFbOSC419986j.C1.o9.fg
atgtcaggtacaagttccgacgaaccaacactggagaatctagcgcataaactgaagggcatggaaaattggtatgaagagttgatgcgtaatagtaaatcatacaaggaaagcacagataaacatttaaaaaccttaagtgaaagcctggtgaaagtagtggatcaaattgagcaaatgaatcgatcacataaacaattaactgaaaacattcagaatataaatattggacatgaaaatattgtgcgacgcattggtttacttgaggctgtaggtgaagaaggtgtaggtgccactgctcatcgacaccaaagatatgatgatgaagatgaagagcaatctgttgctgatgatgaggaggaagacgagagtgttggaaatagaagacgatgtcgaattagggacaaagatgatcctttatctaaggtaaaatttactatgccttcttttgatggtaagtttgaaccttctgtttatctagactgggagctagctgttgagcaaaaattctcttgctatgattttcctgataataagaaagttaaagctgccagtagtgaatttacctcctttgcatctctatggtggaatgatatatgtggtagaggacttagacctagaacctgggatgatatgaaacgtacaatgaggtctagatttgttccttcttactatgctcgtgacatgttaaataaactgcaacttttaagacaaggttccaattctgtagaaacatactatcaagagatgatgattgctttgtcacgatgtaatttgcaagaaactgaggatgctagaatttctaggttctatggaggtcttaatagagagattcgggatattcttgaatataaagaatacaataccatgaatagattattccattttgcttgcaaagctgaaagagaagtgcagggacgcaacaagcataggagttctcttgcaggtgctacttccacacgacagtcaacaccacgtcaatctactactgttgttcgtccacctacctccacgccatcccatgctcaagaaacaagcaaaaacgcttcagttcagactccagccaagagtgcaacttcagtagattccactggacgtacacgtgatattacatgtcataggtgccatggcattggacatattgcccgcgactgtccaaatcggcgagctctatttgtgaatgctgatggtgagtatacttctgctagtgattgtgatgatgaatatgctttagctgccactgaccacgcaggaggacaagatgatgaggacatcgaggaagtccatttgcatccagagtccctagatcagtatcctagcctaattgtcaagctagcacttagtgctaaagagaagtgtgaagagcaaaaccaacgtcacaatttgttccaaagcaaagttcttgtgaaaggccataccgtcaaaatgattattgatagtgggagttgcaacaatttagcaagtgaagagatggtcaagaagcttggcttgactacccatccacatccacatccgtatcatattcagtggtttcatacatgtggtaagatgaaggtaacccgcttggttaaaatacctttttctataggctcctaccatgatcaaattgaatgtgatgttgtacatatgcaagcttgttctgttattttggggcgaccatggcaatatgatagagaagttgtttttgatggtaggactaatacatataaatttatgttcgatggtaaaagagttgttttgcattctatgactccagccgctgctttgaaagatgatcttgcaagacttgaatgtgaaaagaaagcgaaaagtgaaaatcagattattgctaaacatcctgcttcaactagtaaaatagaaccaagtaccacaaagaatgaaattaagttgaagggtgctttgttggcttctaaatataatatttgtgcactagatgagccagattcttgttgctatgctctattttgcaaagatcctatactcacattggctactgctcctagtactttatattctttgccacccgctattactaaccttttgcaggaatatgaggatgtttttcacgatgagatacctccaaggatggccaatggacgagagagtgcacataatcaagaagatgggattgagtcgaggacgactccaattcaagaaggggaggatgatgaggacatcacttcgtcggatatgctcataacttcacacgctccaatgataattccaagtccaagtccagctcggcctccggagacagcactgacttcaaacggacctagcgccttcatgccaactccgatttga

SEQ ID NO: 13747 - DNA, 380 bp, Oryza sativa
  Clone ID: TFbOSC102121j.C1.o11.np
atgaagagaatagcggaaagtaaactgaacataaagaaagtgaatctgagttgcttgttcgtgggagctattcccagttatgaaccaagtgatatgttcgaagatagtctacagacgggtaacttgtatgaggttgactccaaagatatgaactatgcgaagttctggaactgaagccccatcttcaagtgccgcaacccagtcgaagtcagctaaaggttcaaccctggttcgagtcaggtgaaaagaagattccacctgcaacaggagatcgagccaagcagtccagagtggagaagctttgttaggcaagtttgttatagaaagcggagcggaagaagtcagacaagaagagaagaccgcccaacctatcttcatgc

SEQ ID NO: 13748 - DNA, 168 bp, Oryza sativa
  Clone ID: TFbOSC26158j.C1.o1.np
atggctctgataccagcttgtcgcgaccgggaaaattgccttttcccgaacgctagtgtattaatccccgtcccaggaaaagccggggtacaccatacaaacatgatataaaagacacatctttattatatcgataatatttacattattacaaaggcacttaaggcc

SEQ ID NO: 13749 - DNA, 4626 bp, Oryza sativa
  Clone ID: TFbOSC400455j.C1.o1.fg
atggacattgttagatccaacgatcgaaaacgatttggtatcgtgaggtaccagtacttcgagaaggaaaatcgggtgggttttgagatggctggagtattcgcctccatggctatcgaatgggcgatcgacaagctctattccttgctgccagcatgtctggtatcaacacctgcatcgtcatcgtcttccgcagcgccagctgaaagcgaggaccttgaggttctgaagaggcttgagagaacaatgcacaggatccatgcgacactgcacgatgcagaggaacagtggaacatcagggaggaaacagccaagctgcggctcaaggaactgaagaaggtggcctacgacgcggaggacgtggtggatgagtacgggtacgagatgacacgccataaagtggaggcatttgagcaatctgcaagggctaatcgcagcggcaagcgcaggcgcgaagagatgcagccttcttttgcagttttgttttgctgcaaattcggattcgtttttgttttggaaacgttccgaaaaatccgatctaatgatgcgttcatgctagttttcatctgtaatgtcatgatttatttatggaatagattaaatcattatatgtctataatctcaacaatccaaaaaccttattataggcactgtgattttactatggctggttttgctgatgcactgaggccggataaattcaccggtgtgcattttaagagatggcagatcagggtcactctgtggctgacagctatgaaatgcttctgggtgagtactggcaaacctgtaggagttcttactgctgaacagcagaagcaattcgaggaagccactactctctttgtgggatgcattcttagcgttcttggcgatcgtctggtcgaggtgtatatgcatatgaccgacgctaaggagttgtgggatgcactgaatactaaattcggtgctactgatgctagcaatgatctgtatatcatggagcagtttcatgactacaaaatggctgacaaccgttctgtagtcgaacaggctcatgagatacaaaccatggctaaggaactcgaactccttaagtgtgtcttacccgacaaatttgtggccgggtgcattattgcaaaactacctccatcttggaggagtttcggtactgcattcaaatacaagagacaggaatactccgttgaggggttgattgcgtctcttgatgttgaggagaaagctcgggaaaaagatgccgcgtctaagggcgatggtgggcagtccagtgccaatgttgtgcacaaggcccagaacaagagcaaggggaaatacaaagctcagcagaccaccaacttcaagaagcagaagaagaacaacaacaatcctaatcaggatgagaggacttgctttgtgtgtggccaagttcgtcatctggctaggaagtgtccacagcgcaaggggatgaaggcacctgcagggcagacttctaagtctgctaatgtgaccattggcaacactggagatggaagcgggtatggtaatttacctactgttttttcagttaatcaatctactaatttgtgggttgatactggggccaatgtacatgtttgtgctgacatctcattgttttcttcttatcaggtcgcacggggttccaccgtcctaatggggaatgggtcacatgcttctgttcatggtgttggcacggtagatctgaagtttacttcgggaaagatcgtgcagctgaagaacgtgcagcatgtcccttctatcgacaggaatcttgttagtggctcccgtttgactagagacggatttaagttggtttttgagtctaataaagtagtcgtgtctaaacatggatattttattggtaaaggttatgagtgcggaggcctgttccgcttttccctttctgatttctgcaataagtccgtgaaccatatttgtggcagtgtggatgatgaggctaatgtttggcattcacgtttatgtcatattaattttggcttgatgtctcggctttccagcatgtgtttaattcctaagttttccattgtcaaaggttctaagtgccatagttgtgtgcaattgaagcaacctcgcaagcctcacaaggctgccgaggagagaaacttggcaccactagaactcctacattcagatctttgtgaaatgaatggggtgttgacgaagggtggaaaacgatatttcatgacattgattgatgatgctactagattttgctatgtgtacttgttgaaaacgaaagacgaggctctagactattttaaaatttataaggcagaagttgaaaatcaacttgacagaaagataaaaaggcttaggtctgatcgtggtggagagtttttctcgaacgagtttgacttattctgtgaggaacatggcatcatacatgagaggacgcctccctattctcccgagtctaatgggattgctgaaaggaagaaccgcacactgactgacttggtgaatgccatgttggacaccgcgggactgcctaaggcatggtggggggaggcattgttgacctcaaatcatgtgttaaacagagttcctaacagaaataaagacaaaacaccatatgagatatggattggtagaaaaccatcactttcttatttgcgcacatgggggtgcttggcgaaagtcaatgtaccaataacgaagaagcgcaaacttggacctaagactgtggactgtgtttttctgggatatgctcatcatagcattgcctatagatttttaatagttaaatccgaggtaccggacatgcatgttggtacaattatggagtctcgtgatgctaccttctttgagagctttttcccaatgaaggatacacatagtggttcgaaccaaccctctgaaataattcccagttcaatcacaccaccagaacaaactgaacatacacatgaacttgtctctgaggaggatgtcagtgaagctcctcgaaggagtaagagacaaaggacggttaagtcttttggtgatgatttcactgtgtacctcgtggatgacactcctaagtcaatttcagaagcatatgcatctcctgatgcagactactggaaggaggctgtccgtagtgaaatggattccattatcgctaacgggacttgggaggtgacagagcgaccctatgggtgtaaacctgtggggtgcaagtgggtgttcaagaagaagcttaggcctgacggtactattgaaaagtataaggctcggcttgttgctaagggctatactcagaaagaaggcgaagatttctttgacacttactcacctgttgctagattgaccacaattcgtgtgctactttcccttgcagcctcacatggtcttctcgttcatcaaatggacgttaagacagcttttcttaatggagagctggatgaggagatctatatggatcaacctgatgggtttgtagttgaaggtcaagaaggcaaagtgtgtaaattgttgaagtctttgtatggtctgaaacaagctcctaagcaatggcatgagaaatttgacaaaacattgacatctgcaggctttgcagtcaatgaggcagataaatgtatgtactatcgccatggtgggggtgagggagttattttgtgcttgtatgttgacgacatactgatatttgggacaaaccttgaggtgataaatgaggttaaatcattcttgtctcaaaattttgatatgaaagatttgggagtagctgatgttatcttaaacattaagctaattagaggtgagaatgggattacactcttgcagtcccattatgtggagaagatcttgaatcgctttggctacattgatagtaagccttctccaacatcttatgatcctagcttgttgcttcgcaagaacaagagaattgctaggaatcaactagaatactcccaaatcattggctcgttgatgtacctggctagtgcaactaggcctgatatctcctttgctgtgagcaagttgagccgatttacctctaatccgggagatgatcactggcgtgcgcttgagcgagtaatgcgctatctgaaaggtactgtggaattagggcttcactatactgggtatcctgcggtactggagggttatagtgattctaactggatctctgatgtggatgagatcaaagccactagtggatatgttttcacactgggtggtggtgctgtttcatggaggtcttgcaaacagaccattttgacgaggtcaaccatggaagcagagctaacggcactggatactgctactgttgaggcagaatggctgcgtgatctattaatggatctgcctgttgttgaaaaaccggtgccggctatccttatgaactgtgacaatcaaacgacatgtgaaaagacgattgaagtctgtcaggaaattaagaaactccagagttataacgttggattacatccaaacagcgagaaacctggcagatcccttcacgaagggactatcacgaaatgtgataaacaatgcatcgaaggagatgggtttgagacccatagcattcttgaaagaactaacctttgtgagcttgactgttggtcgcagtctatgaagattttgggtgaatcttctaggaagcttactaaagacctaggagtatga

SEQ ID NO: 13750 - DNA, 4569 bp, Oryza sativa
  Clone ID: TFbOSC401054j.C1.o38.fg
atgtcatggcacagggccggtgtcctgctgctaggggctcagtcctgcctgcctgtcccgggtgtcccggccgtaggtgggattgggtcggtactcttgtctatggctaggatgggttggaaactatgtcacgtcttccgtctgtataccgtggtgccgcgccctcggttatgggcaagccgagcaatgtacccaaattccggcaatggtccgccaccacttcccgagaatccgacccttgcccaagttatggcacatcagactcagatgatggcagccatgatacagcagatgcagcagcagcaccagcagatgcaccagaggatgatgcagcacgtcgaacagcagcaccagcagtttggtccccctccccctcagtccaagttgccagagtttctacgcgtcaggccacccaccttctccagcaccaccaaccccatggaggcgaatgactggctccatgccatagagaagaagctgaatctcctgcagtgcaatgatcaggagaaagtcgctttcgccacacaccagcttcagggtcccgcgtcagcttggtgggacaatcacatggccacccgcccaccaggtactgaagtcacatgggcagagttctgccgtagcttaaggaaggcgcaggtgccagacggggtcgtggcacaaaagaagagggaattccgggcactccatcagggcaacaggactgtgacacagtacctccacgagttcaatcgcctcgcgcgatatgcaccagaggatgtccgcaccgacgccgagaagcaggagaagttcatggcgggtctggatgatgagctgaccaaccaactgatatccggggactacgctgactttgagaggctggttgacaaggcaatccgccaggaggatcaacgcaacaagatggacaggaagaggaaggccgcacagttcagggcacctcagggaagtcaccagaggccgcgcttcgctcctgggcagcagggtggacctaccaccatgatcgttcgtcagcaccgcccgttcaaccctagcaactttccccagggcgccagtggcagtcagaaccaccatggaggtcagtccaaccgcggtgcagcttcacgcccaccaatggcaccggcacagtcaggccagcccgcgcaagccaagaaggagactggagcaaaaccagggtcctgcttcaactgtggcaagcttggccacttcgctgacaaatgcccgaagcctaggcgtgccgggccaaggtttatccaggctcgtgtcaaccacgcatctgcggaggaggcacaagcagcaccagaggtcgtactgggtacgtttcctgttaactcaatccctgcaacagtactttttgattctggtgcaacgcattctttcatttcaaagaaatttgtcgggatgcatgggttaataagagaggaacttagcacaccaatgcgggttcataccccagggaatagctccacttcggttcaattcagcccttctataacaatagaaattcaaagatcaccatttctagccaacctcattcttctcgaatccaaagacctagatgtcattcttgggatggattggctgaccaagtttaagggggtcatcgattgtgcaaatcgcacagtcaccttgaccaacgagaagggagaaaccgtggtgtacaaatctctagtctcgccaaagaaaggggtctctttgaatcagattgaagcggaaatcccagtggacaccgtagagaagaactcgagaaaattggaagatatacccatagtctgcgagtatccagaagtgttccccgaagacctcactaccatgccacccaagagagagattgaattccggattgacttggcaccgggaactgctccaatctataagagaccgtacaggatggcggccaacgaactagcagaggtcaagaagcaggttgataagcagctgcagaaagggtacattcgaccaagtacttcaccttggggtgctccggtcatttttgtggagaaaaaggataagacgaagaggatgtgcgttgattaccgcgcactcaacgagttgagaattcgggaagaggatattccgaagacggccttcaccactcggtacgggctatatgagtgcacggttatgtctttcggacttaccaacgcacccgcattcttcatgaatctgatgaacaaagtgttcatggaatttctggacaagtttgttgtggtgttcatcgacgacattcttatctattcaaagtccgaagaagaacatgaacaacatctccgtctggtactcgagaagttgagggagcaccagctatacgccaagttcagcaagtgtgacttctggttgacggaagtcaaatttctgggccatgtcattacagctcagggtgtggcagtcgacccatcgaacgtggagtcagttaccaaatggaccccaccgaagaccgtgtcgcagattcgaagttttcttggacttgcaggttattaccgtcgattcatcgaaaatttctccagaatcgcccgacccatgactcagttgcttaagaaggatgagaagtttaaatggacagccgagtgcgataagagcttcgaggagctcaagaagaaattagtatccgcaccagttttgattctgcccgacccgatgaaagacttccaagtctattgtgatgcatcccgtcacggacttggatgtgtcctaatgcaagaggacagagtggttgcgtatgcctcgcggcagttgcgtccacacgaagggaattatccaactcatgacttggaattggcagcagtggttcatgctttgaagatctggaggcactatctgattggcaaccgctgcgaagtatatacggaccataagagtctgaaatacatcttcacccaaccggacctaaatctccgacaacgaagatggttggaactaatcaaagactatgacatgagtattcactaccacccgggtaaagccaatgtggtggcagacgctttaagccggaaaagttactgcactgccctatgcatcgagggcatgtgtgaggaattgcggcaggagtttgagcatctcaacgtgggaattgttgaactcgggttcgtagccgctctggaggcacggcctacgctcgtggatcaagtcagagcagctcaagcaaatgattctgaaatagcagagctgaaaaagaacatgagagtcggaaaagcccgggatttccacgaagatgagcatggcacaatctggttgggagaaagattgtgtgtacctgacgacaaggaactgaaggatctgatactcaccgaggctcatcagacccagtactccattcacccaggcagcactaaaatgtatcaagacctcaaagaaaagttttggtgggtcagcatgaggagagaaatagctgaattcgtcgcactctgcgatgtttgccaacgagtgaaggcagagcaccaaagaccagcaggtttactccaacctcttcaaatcccggaatggaaatgggaggagattggaatggactttataacaggactgccccggacatcatcgggtcacgatttgatctgggtagtcgtggatcgactcactaaggttgctcacttcataccagtacataccacatatacgggcaaaaggttggcggagctttacctttcgagaatcatgtgcctacatggagtacccaaaaagattgtatctgaccgagggagtcagttcacctcaaaattctggcagaagctacaggaagaactggggacccgtttaaatttcagcacggcctatcacccgcaaactgatggtcagaccgagcgagtcaatcaaatcttggaagatatgttgagagcttgtgctcttgattttggtggagcttgggacaaaagcttgccatatgcggaattctcgtacaacaacagctaccaggccagtctacagatggcaccgtttgaagctttatacggccggaagtgccgcacacctctcttctgggatcagacaggcgaacgtcaactgttcggaacagaagtattagcggaagcagaagagaaagtcagaatcatcagggaaagattgaggattgctcagtctcgacagaagagctacgcggataaccgtcgaagggagctcacttttgaggcaggagattacgtgtatcttcgtgtcactccgctccggggagtacaccggtttcagacgaaaggcaagttggcaccacgcttcgtgggaccatacaaaatcttggaacgaaggggagaagttgcttatcagttagaacttccatccaatatgatcggcatccatgacgtgttccatgtgtcccaattaaagaagtgcttaagggtacctgaagaacaggctgattcgaagcacattgatatccaggaggacctaacatatgtggagaagccggttcgtatacttgataccagcgaaagaagaactagaaataaggtcaccaggttttgccgagttcagtggagtcatcattcagaagaggaagcaacctgggaaagggaagatgagttgaaagccgcccatccgcacctcttcaccagctcctccgaatctcggggccgagattccgtttaa

SEQ ID NO: 13751 - DNA, 3252 bp, Oryza sativa
  Clone ID: TFbOSC900367j.C1.o21.fg
atggctggttttgccgatgcactgaggccggataaattcaccggtgtgcattttaagagatggcagatcagggtcactctgtggctgacagctatgaaatgcttctgggtgagtactggcaaacctgaaggagttcttactgctgaacagcagaagcaattcgaggaagccactactctctttgtgggatgcattcttagcgttcttggcgatcgtctggtcgagtttcatgactacaagatggctgacaaccgttctgtagtcgaacaggctcatgagatacaaaccatggctaaggaactcgaactccttaaatgtgtcttacccgacaaatttgtggccgggtgcattattgcaaaactacctccatcttggagaagtttcggtactgcactcaaacacaagagacaggaatactccgttgaggggttgatagcgtctcttgatgttgaggagaaagctcgggaaaaagatgccgcgtctaagggcgatggtgggcagtccagtgccaatgttgtgcacaaggcccagaacaagagcaaggggaaatacaaagctcagcagaccaccaacttcaagaagcagaagaagaacaacaacaatcctaatcaggatgagaggacttgctttgtgtgtggccaagttggtcatctggataggaagtgtccacagcgcaaggggatgaaggcacctgcagggcagacttctaagtctgctaatgtgaccattggcaacactggagatggaagcgggtatggtaatttacctactgttttttcagttaatcaatctactaattggtgggttgatactggggccaatgtagcacggggttccaccgtcctaatggggaatgggtcacatgcttctgttcatggtgttagcacggtagatctgaagtttacttcgggaaagatcgtgcagctgaagaacgtgcagcatgtcccttctatcgacaggaatcttgttagtggctcccgtctgactagagacggatttaagttggtttttgagtctaataaagtagtcgtgtctaaacatggatattttattggtaaaggttctaagtgccatagttgtgtgcaatcaaagcaacctcgcaagcctcacaaggctgtcgaggagagaaacttggcaccactagaactcctacattcagatctttgtgaaatgaatggggtgttgacgaagggtggaaaacgatatttcatgacattcattgatgatgctactagattttgctatgtgtacttgttgaaaacgaaagacgaggctctagactattttaaaatttataaggcagaagttgaaaatcaacttgacagaaagataaaaaggcttaggtctgatcgtggtggagagtttttctcgaacgagtttgacttattctgtgaggaacatggcatcatacatgagaggacgcctccctattctcccgagtctaatgggattgctgaaaggaagaatcgcacactgactgacttggtgaatgccatgttggacaccgcgggactgcctaaggcatggtggggggaggcattgttgacctcaaatcatgtgttaaacagagttcctaacagaaataaggacaaaacaccatatgagatatggattggtagaaaaccatcactttcttatttgcgcacatgggggtgcttggcgaaagtcaatgtaccaataacgaagaagcgcaaacttggacctaagactgtggactgtgtttttctgggatatgcttatcatagcattgcctatagatttttaatagttaaatccgaggtaccggacatgaatgttggtacaattatggagtctcgtgatgctatcttctttgagagctttttcccaatgaaggatacacatagtggttcgaaccaaccatctgaaataattcccagttcaatcacaccaccagaacaaactgaacatacacatgaacttgtctctgaggaggatgtcagtgaagctcctcgaaggagtaagagacaaaggacggctaagtcttttggtgatgatttcactgtgtacctcgtggatgatactcctaagtcaatttcagaagcatatgcatctcctgatgcagactactggaaggaggctgtccgtagtgaaatggattccattatcgctaacgggacttgggaggtgacagagcgaccctatgggtgtaaacctgtggggtgcaagtgggtgttcaagaagaagcttaggcctgacggtactattgaaaagtacaaggctcggcttgttgctaagggctatactcagaaagaaggcgaagatttctttgacacttactcacctgttgctagattgaccataattcgtgtgctactttccctagcagcctcacatggtcttctcgttcatcaaatggacgttaagacagcttttcttaatggagagctggatgaggagatctatatggatcaacctgatgggtttgtagttgaaggtcaagaaggcaaagtgtgcaaattgttgaagtctttgtatggtctgaaacaagctcctaagcaatggcatgagaaatttgacaaaacattgacatctgcaggctttgcagtcaatgaggcagataaatgtgtgtactatcgccatggtgggggtgagggagttattttgtgcttgtatgttgacgacatactgatatttgggacaaaccttgaggtgataaatgaggttaaatcattcttgtctcaaaattttgatatgaaggatttgggagtagctgatgttatcttaaacattaagctaattagaggtgagaatgggattacactcttgcagtcccattatgtggagaagatcttgaatcgctttggctacattgatagtaagccttctccaacaccttatgatcctagcttgttgcttcgcaagaacaagagaattgctaggaatcaactggaatactcccaaatcattggctcgttgatgtacctggctagtgcaactaggcctgatatctcctttgctgtgagcaagttgagccgatttacctctaatccgggagatgatcactggcgtgcgcttgagcgagtaatgcgctatctgaaaggtactgtggaattggggcttcactatactgggtatcctgcggtactggagggttatagtgattctaactggatctctgatgtggatgagatcaaagccactagtgcatatgttttcacactgggtggtggtgctgtttcatggaggtcttgcaaacagaccattttgacgaggtcaaccatggaagcatag

SEQ ID NO: 13752 - DNA, 1350 bp, Oryza sativa
  Clone ID: TFbOSC101880j.C1.o3.fg
atgggagtcccggcgttctaccggtggctggcggaccggtacccgcagacggtgtcggacgcggtggaggaggagcccgtggagctcgagcccggcgccttcgtccccgtcgacctccgccgccccaaccccaacggcctcgagttcgacaacctctacctcgacatgaacggcatcatccacccctgcttccaccccgagggccgcccggctccgaccacctacgacgaggtgttcaagtcgatttttgcctacattgaccacctcttcggcctcgtccgcccgaggaagctcatctacatggccatcgatggcgtcgcgccaagggcgaagatgaatcagcagaggtctagacgtttccgggctgctaaggatgcggctgacgcggcagctgaggaggaaaggttgaggaaggaatttgaggctgaaggcaggactttggttgcgaaggagaagtcggaagcgattgactcaaatgtcataactcctgggacaccattcatgtttgtactctcttcggcgcttcaatactacatacagctgagattgaaccacacacctgggtggcaatctgtcaaggtaatgctttctgattcgaacgtccctggggagggagaacacaagattatgtcatacatccgcctgcagcgcaatctcccaggatttgacccaaatacacgccattgtttatatggccttgatgctgatttgatcatgctttctctggctactcatgaggtccacttctccattttaagagaggtgattaccatgccagggcaacatgaaaaatgctttctctgtggtcaagttggtcacttggctgctgaatgcagaggatctggtcaggctgataagaccgtggagctccctcctatccataagaagaagtatcagtttcttaacatctgggttctgcgtgaatacctggagaaggatttggaaattgttgatccccccttcaagataaactttgagcgtgttgtggatgattttgttttcatgtgtttctttgttgggaatgactttctgcctcacatgccaactttggagatccgcgagggtgccattaatcttctcatgaatatatatagaagggagttcacatcaatgggtggttacctcaccgatgggggtgaggttttgttggatcgagtggagcatttcattcaatctgttgctgtccatgaagagcaaattttccagaagcgtgcacgcattcagaaggctatccagaacaatgaggagaggaatagagtgcagacagagaactctgaggataatcaatatgtggacaagagcatgatctactgtcctactgtcactgtcaagtattacaaaaacgactag

SEQ ID NO: 13753 - DNA, 720 bp, Oryza sativa
  Clone ID: TFbOSC16994j.C1.o1.fg
atggaacagaaaaagcgtagtagccagaggccgcgcattgctttgggacctcaagctgcaccatacccacagggaggatcctcttcagttgctcgccctcaacgccagttctacaacaacaacactagtaatcacagcaacgataatcgtaatatggtcactcgtcatgtagcagctccaactcagaatcatcctgtcaggaaggaacagggaagcaagccaggggtgtgcttcaattgtggtgatccaggacattatgctgataagtgtccaatgcctcggcgtgtgaagaatgcacctgttcagaacaactccaatgctccagcaccgaaggctcgtgttaatcatgttgcagccgcagaagcccagaatgcacctgatgtggttttggaatccaatgatcttgatgttatcttagggatggactggctaacccatcacataggagttatagattgtgctaaccgtaatgtgactttaacaagtagcaatgggcaaacagtgtctttctttgtgtcatcccctaaatctcacggtttgacattaaatcaagttgctttgcaagagatcccaatagtacgagactatccagatgtgttccctgaggatttgccaggtatgccacctaagagagacatagagttctggatagacttagtacctggaaccaaccctatccataagagaccatacagaatggcagctaatgagttagcagag

SEQ ID NO: 13754 - DNA, 5452 bp, Oryza sativa
  Clone ID: TFbOSC400433j.C1.o6.np
atggccgaccacccacccaaccaccgcggagaaggcatggatgattttgtggcagagttggcttgcatgaccctggtggtgggctaccccaacgcgccggagtactcgaccgttctgctgctcagtggcgagcttccccaccgtgttcgtctggaggtccatggctatgtgggcacctgcctcgctaacatggtggttgaggcatctggaggcaacagagatcacgcctgtcaggaggcagcatatctgatgatggctaggcttcgtgatcgccacaactacatcttctacaacacggcgtaccgcttccaccctcgccgagcaagtggcgacgacgccagcaccttccgcccgacagtcggcgagaaccacaccaccttcgggcacatgtgcaccgtgatgaggggaatggacaagatgcactctaacctgcacaaggcatccaaggccttgaatgatgggaagcttgtgaggatcatagctctgaaggatgagatagcacgcctgaagaaggagaacgctcagttgaagggtctcccagcggcaggaggagtccggatccgcaccacgccccgcaagtctacgattgctcccgtgtgcattcagcttgcgcccaggaacccagcacccacagctcctcccacagttcccgcagctcctcccgcagctcctccagctccagtcccagctcctgttccagtgttagctcccgtgtccgctctctcctttgctccagcgtcagctgccaggggtccagccagtggcaatggaggttggttgcctgctactcctagtggcagccgcgaccacagcagcagcagttccagtggctcagagccgggcagcggtgagacgtatctgccagactccaggagctgctcagagggacccggcctcttccttccgatggtcaacaccaggaatggcagccgtgcagcaggtgagggcagcaacgacgaagaacgcgccgacggtggatatcccaacagcgcctctggcaacggtccgccaccgctccccgagaactcgactcttgcacaagtgatggcccatcagactcagatgatggcggccatgatgcagcagcagcactagcagatgcaccagaggatgcggtagcaagccgagcagcagcagtagcagtttggtccccctccccctcagtccaagctgccaaagtttccacgagtcaggccacccaccttctctagcaccaccaaccccatggaggcaaatgactggctccatgccatagagaagaagctcaatcttctgcagtgcaatgatcaagagaaggtcgccttcgccacacaacagctccagggtcccgcgtcagcttggtgggacaatcacatggctacccatccgccaggtacggaagtcacttgggcggagttctgtcgcagctttaggaaggtgcaggtgccagacggggtagtggcacaaaagaagagagaattccgagcactccactagggcaacaggacagtaaccgaatacctgcatgagttcaatcacctagcatgatatgcaccggaggatgtccgcactgacgcagagaaacatgagaagttcctagcaggcctggatgacgaactgaccaaccagttgatctacggggattacgctgacttcgagaagctggtagacaaggccatccgtcaggaggatcaacgtaacaaaatggacaggaagagaaaggcagctcaattccgatccaaccaaggaagtcaccagcgaccgcgcttcacttccggacagcagggtggacctaccaccatgattgtttgacagcatcgtccttacaacccaagcaacttccaccccggcagtagtggcaaccatcttggccaagggcagcacaaccgcggcgcagccccacacccgccaatggcgcctgttcagcaaactgcacccgctcccccaaagtacaccggaggcaagccaggagcctgcttcaactgtggtgagtctggtcacttcgccgacaagtgtccaaagctcaggcgcgctggacccaagtttgtccaggctcaggttaaccacgcgtccgcagaagagacgcaagcagcaccagaggtcgtactgggaacgtttcctgttaactcaatccctgcaacagtacttctctattctggtgcaacgcattcattcatttcaaagaagtttgttgggtacatgggttaataagagaggaacttagtacaccaatgcgggttcataccctcgggaatagctccacctcggttcaattcagcccttctgtaacaatagaaatccaaagatcaccatttctagccaacctcatccttctcgaatccaaagacctagatgacattcttgggatggattggctgaccaagttcaagggtgtcattgattgtgcgaatcgcacggtcaccttgaccaatgagaaaggagaaacggtggtgtagaagtcaccagtcgcactaaaacagggaatctccttaaatcagattgaggtggaaaattcggtggtcaccgcggagaagagttcgaggaaattggaagatatccccatagtctgcgagtattcagaggtgttccctgaggacctcactaccatgccacccaagagagagattgaattccggattgatttggcaccggggactgctccaatttacaagagaccgtacaaaatggcagccaacgaactagcagaggtcaagaagcaggtggatgagcaactgtagaaacggtacattcaaccaagtacttcgccttggggtgctccggtcatttttgtggagaagaaggacaagacaaagagaatgtgcatcgattatcgcgcactcaatgaggtcccatcaagaataaataccctttgccgcggattgatgatctgtttgatcagctgaaaggagccagggtgttttccaaaatagacctacgatcgggctaccaccagttgaggattcaggaagaggatattcccaagacagccttcaccactcggtatgggttgtatgagcgcacggttatgtcttttggacttaccaatgcacctgcattcttcatgaacctgatgaacaaagtgttcatggaatttctggataagtttgttgtggtattcattgacgacatacttatatattcaaagtctgaagaagaacatgagcaacatctccgtctggtactcgagaagttgaaggagcaccagttatatgccaagttcagtaagtgtgacttttggttgtcggaagtgaaatttttgggtcacgtcattacggctcaaggtgtggtagtggatccatcgaatgtggagtcagttgccaagtggaccccacctaagacagtatcacagattcggagtttccttggacttgcgggttattaccatcggttcattgaaaatttctccaggattgccagacctatgactcagttgcttaagaaagacgagaaattcaagtggacagccgagtgtgacaagagttttgaggagctcaagaagaaattagtgtctgctccagttttgattctgcccgatcagacgaaagacttccaagtctattgcgacacgttccgtcacgggcttggatgcgttctaatgcaagagggcagagtggtcgcttatgcctcgcggcagttgcgtccgcatgaaggaaactatccaacacatgacctgaaattggcagcggtggttcacgccttgaaaatctggaggcattacctgattggcaactgctgtgaagtatatacggatcacaagagtttgaaatatatcttcacccaacctgatctgaacctccgacagcgaagatggttggagttaatcaaagattatgacatgagcattcactaccatccaggcaaagccaatgtggtggcagatgcattaagcaggaagagctactgcaatgctttgtgcaccgagggcatgtgtaaggaattgcagcaggtgcttgaacatctcaacttgggaatcgtagaacacaggttcatggctactctagaggctcggcctacgctcgtggatcaagtcagagcagctcaagtaaatgatcctgagatagctgaactgaaaaagaatatgagggtcggaaaagcccggggtttccttgaggatgaacatggcacaatctggatgagagaaagattgtgcatgcctgatgacaaagagctgaaagatctgatactcaccgaggctcatcagactcagtactccattcatccaggcagtaccaaaatgtaccaagaccttaaagaaaaattttggtgggccagcatgagaagggaaatagctgaattcgttgcactctgtgatgtttgtcagcgagtcaaagcagaacaccagaggcccgcaggattgttacaacctctccagatcccgaaatggaaatgggaagagattggaatggatttcataacaggtctgcccaggacatcatctagccacgattcaatctgggtagtcgtggattgactcactaaagttgcccatttcatcccagtgcataccacgtatacgggaaagaaattggcagagctatacttagcaaggatcatgtgtctgcatggggtacccaagaagattgtatctgatcgagggagtcagttcacctgaaaattttggcagaagctgcaggaagaattggggacccgtttgaatttcagcacagcctaccacccgcagactgatggccagaccgagagggtcaattagatcttggaggatatgttgcgagcctgtgcgcttgattttggtggagcttgggataaaagtctgccttatgctgaattctcatacaacaacagctatcaggccagtctacaaatggcaccattcgaagcgttgtatggtcggaagtgccgcacacctctcttctgggattaaacaggcgaacgtcaactattcggaatagaagtgctaatagaagcagaggagaaagtcagaaccgtcagagagaggctaagagttgcacagtctcgacagaagagctacgcaaacaaccgccgaagagagctcacttttgaagccggggattatgtgtacctccgtgtcactccgctctagggagtacaccgtttccagacgaaaggcaagttggcaccacgcttcgtgggaccatacaaaatcttggaatgaagaggagaagttgcctattagctagaacttccatccaacatgatcggtatccatgacgtgttccatgtgtcccagttaaagaagtgcttgaggctacccgaagaacaagccgattcggagcacattgacatccaagaagatctgacatatgtggagaagccagttcgcatccttgagaccagtgaaaggaggactagaaacaaggtcaccaggttctacagggttcagtggagccaccactcagaagaagaagcaacctgggaaagggaagatgagttaaaggccacccatccgcacctcttcaccagctcttccgaatctcggggtcgagattccgtt

SEQ ID NO: 13755 - DNA, 4815 bp, Oryza sativa
  Clone ID: TFbOSC400575j.C1.o14.gm
atggcaaaagaggacgaggataagacagcattcatcacgccgttcggggtattctgctacgttaagatgccattcggactaataaccacaggaaacactttccagcgcacggtccaaggtgcacttagtgaccagctcggaaacaatgtcgaggcttacgtcgatgacattgttgtcaagaccaagacaagcgactcattgattgacgatctgcgggaaacgttcgacaacctccgacgatatcgccttatgctcaatccagagaagtgcacgttcggagtaccatcgggcaagaccccccgagctctcctctacccgtcgcccccttcgccttcgcctctcgtcgtcggagaagccctagcgccgtgcgccctagctcagccgtcgccgccgtcgctccagccgtgcgccgccgccgttccagccgtcgccgtcgctcgggaaggccaccgttgggatcgccaagttgccgccgtcctcgtccgttgcttcgccgccgtcggagaccgccggagcaccatcgccgtcgtcgaaccgaagagctccgccgcttcttcttcgtcgccgccgccgtccgttgggtttccgccgtcgttttggtcgccgatgccgcgctacaagcctgagtacttgtttggtgttgagggttttgtccaggagttgcgtacaatgtcctttgtcattggatttgggactgcccctttttatgcccagattcctcatgatcgtcatgaagagaagtgccgagtcaaagtcaccttgaacagtaatagtgaagatatcccctcagtgatgttcgaagctggaggaagaaactacatccatgcaagtcaggaggtggcaaggatcgccataggagagctccgcgatcgttacagtgatcagttggccgatactgagtatcgctatcatcctcgtcaaccccagggaagtgaccgtggcagctaccttgagactgaaggaattgagaatgatgctaccacaaggcatttggttgagatgctgtgggctatggatgaaagtcgtgcggagactgtgttagcggctcaagatcgtgaagatcggaatcgtggtaagatttgcaagctagaagacaaggtggatcgtttggagaaggaactagccgcattgaagggagaagcaccaccgcagaaggccaggattcgtcttaccgcaaggaagagagctctatttgtccctcgctatcaattggcgccaaaggttcgtgtggtggagaaagaagttgccccaactctagcagatcctccggtcaacatcataagtgatgatgaggaagaagaatccaagcgcaaccattccaagattgagtgggtagcaactcaagatgatgaagatgagccgaaagagccttcaatcgacctccgatgctcggaagaactagacaagatggtgaatactcgcagcaatgggaatggccccaacaatcccaataataataacaatgaagggaacccaactcttgcccaagtcctggctcaacaggtgcaacttatgaacatgatgatgcagcaacttcagaatcagcagaaccaaggaaataaccatgcacctccgcagaacaggttaactgattttcttcgtgtgaggccacctaccttttctagcactaccaacccagtggaagcaggtgattggttgcatgccatagagaagaagttggatttgcttcaatgcactgatcaggagaaggtctcatttgcatcgcatcagttgcatggccctgcctctgaatggtgggatcatttccgccttaacagaactactgctgaacctatcacttggcttgaatttaccgctgctttccggaagacgcatataccatcgggagtggtgtctctcaagaagaaggaattcaggtcgctcacccagggatcacgctctgttacggagtatctgcacgagttcaatcgtcttgctcgttatgctccggaagatgtgcgcaatgacgaagagcgtcaggagaagttcttagaaggacttaatgatgagctttcttattcactcatgattggagattatcctgatttccagaagctagtggataaggctattcgccaggagaacaagtacaattgcatggagcagaagaaacgccggattgctcaattcaagacacaacaggggaataatcagaagccgcgtcttactttaggaccccagtccataccacatggaagttcttcgtccgttgttcgtccgcagcgtcagttcttcaacaacaatgctggcaacaacatacgtaatcaagttccgcgtcctgttgcagctccaacacagcaacaacctatcaagagggagcaaggcagcaagcccgcggtgtgtttcaactgtggagatccaggacattatgctgacaagtgtccgaagccccgacgcgtgaaggttgtccctgctcagaacaactctactgtaccagtatcaaaggcccgtgtcaatcatgttgctgctgcagaagctcaagatgctccagatgtgattttggacaagttcgtggtggtctttattgatgacattcttatctactcccgaactgaagaagagcatgaagaacatcttcgccttgcactagagaagctaagagaacatcggttgtatgctaagtttagcaagtgtgaattttggttgtctgaagtgaagttccttggtcacgtcatctcagcaggaggagttgccgtcgatcctagtaatgtggaatccgtaaccaattggaagcaaccaaagacagtttcagagattcgcagtttcctaggcctcgcaggatattatcgaagccgtgcgccgccgccgttccagccgtcaccgtcgctcgggaaggccaccgtcgggatcgccaagtcgccgccgtcctcgtccgttgcttcgccgccgtcggagaccgctggagcaccatcgccgtcgtcgaaccgaagagctccgccgcttcttcttcgtcgccgccgccgtccgttgggtttccgccgtcgttttggtcgccggttgagaagtggcggagataagcccacgggggtcgctggggagtccattacctctggttttgagggggagattatgatccaggaacggtgcactgtagtggattgtgttgtgcgagagaggaatagaagcaaatcccgagaagatcatggtaatcgagaacatgaggtcgcctacaagactcaaggaagtacagaagctaaccggatgcatggcagcactaagcaggaggccgaagaggcattcattgcattcaagcgctacctatcaaatccacatgtacttgttgcccctcaacctaatgaagaattatttctctatattgccgccacgccatattccgttagcactatcattgttgttgagagagagaaggtgcaactaccagtctactatgtcagcgaagctctccacgacgtaatgacaagatatccacagatccaaaaactgctctacgcagtaatcatgacatcaagaaagctatgccagtacttccaagcccacagggtcacagttgtctcctccttccctctcggtgaagtcatgagaaataaagatgttgtcagccgcattgccaaatgggtagtcgagctaagccaatttgatatccacttcgtgccacgaacagccatcaagtcccaggtactcgccgatttcgtagccgattggaccatgcccgataacaggtcagacaaccaaatcgacaatgaaacgtggaccatggcattcgacggcgcactcaacagcaagggagcaggggcaggattcatcttgacatcaccttcgggagatcaattcaagcatgcaattcacctcaacttcagggcaaccaataacacagccgaatatgaaggactactcgcggggataagagttgcagctgcgctcgtagtcaggaagctggagaaaaggttcgatgggatcgaggtccgacatgtataccgcaaagacaacatcgaaccagatgatctagcacgacgtgcgtccaggcgagagccactcgaacctggcacctttctggacgtcctaaccaggccatcagtgaaagaggcaagcggcgaagatagcccggtcgcccccgacatcagctcgggggctatagaggcagagcgcaccgttgccgatatcgagaccacggacgactggcgcaccccactcattaaattcataggcagcgaagagttgcccgaggacgacgcagaagtcgagaaaatatcccgtaaagcaaaagtctactgtatgatcggcaatgatctatacaagaaggcaccaaacggggtactcctaaaatgcatcttgtccgacgacggcagacacctcctcctcgacatacatgaagagatctgtgggtcacatgccgccggtcggacattagtcggaaaagctttccaacaagggtttttctggccaaacgccctcaaagacgcctgcgacatggttcaacagtgtgaagcctgtcaattccacagtaaacacacaaagctgccagcgcaagcactccagactatccctttcacttggccgttatcgtgctgggggctagatatactcaggccattcccacgaggacagggcggctacaggttcctattcgtggcgatcgacaaattcaccaagtggattgaagcgacacccacgggggaaatcaaggccgacaacgccatcaaattcatcaaagggatattctgcaaattcggattgccccaccgtatcataacagacaacggctcccagttcatcagtgccgatttccaggattactgcatcaggctgggagtcaagatctgcttcgcctcggtttctcaccctcagagcaattga

SEQ ID NO: 13756 - DNA, 5461 bp, Oryza sativa
  Clone ID: TFbOSC401921j.C1.o15.np
atggccgaccacccacccaaccaccgtggagaaggcatggatgattttgtggcagagttggctcgcatgaccctggtggtgggctaccccaacgcgccggagtactcgaccgttccgccgctcagtggcgagcttccccaccgtgttcgtctggaggttcatggctttgtgggcacctgcctcgctaacatggtggttgaggcctctggaggcacagtagatcacacttgtcaggaggcagcatacctgatgatggccaggcttcgtgatcgccacagctaaatcttctgcaacacggcgtaccgcttccaccctcgccgagcaagtggcgacgacgtcagcaccttccgcccgacggccagtgagaatgacaccaccttcagccacatgtgtgccgtgatgaggggaatggacacgatgcactctgacctgcacaaggcatccaaggcctcgaatgatgggaagcttgtgaggatcatagctctgaaggatgagatagcacgccagaagaaggagaacgctcagctgaagggtctccccgctcccggaggagtccggatccgcaccacgcctcgcaagtcaacgactgcacccgtgcgcattcagcttgcgcccaggaacccacctcctcccgcagctcctccagcacctcccacagttcccgcagcgcccgcagttccagctccagtcccagcttccgttccagtgtcagctcccgcgtccgctctctccttcgctctagcgtcagccgccaggggtccagccattggcaacggaggttggttgcctgctactcacagtggcagccacgaccacagcagcagcagttccagtggctcagagccgggcaacggcgagacgtatctgccagactccaggagccgctcagagggacctggcctcttccttcagatggtcaacaccaggaatggcagccatgcagcaggtgaaggcagcaacggcgaagaacgcaccgacggtggatatcccaacagcgcctctggcaacagtccaccaccgctccccaagaacccgactcttgcacaagtgatggcccatcagacttagatgatggcggccatgatgcagctgatgcagcaccagccctagcagatgcaccagaggatgcagcagcaagccgagcagcagcagcagcagtttggtccccctccccctcagtccaagctgccggaatttctacgcgtcaggccacccaccttctctagcaccaccaaccccatggaggcaaatgactggttccatgccatagagaagaagctcaatcttctgcagtgcaacgatcaggagaaggtcgccttcgccacacaccagctccagggtcccacgtcagcttggtgggataaccacatggctacccgcccgccaggcacagaagttacttgtgcagagttctgtcgcagcttccagaaggcgcaagtactagacggggtcgtggcacaaaagaagagagaattccaggcactccaccagggcaacaggatagtgactgagtacctccatgagttcaattgcctagcgcgatatgcaccggaggatgtccacattgacacattgaaacaggagaagttcctagcaggtctggatgacgagctgaccaaccagttgatctccggggattacactgacttcgagaagctggtagacaaggcaatccgccaggaggatcagcgcaacaaaatggacaggaagaggaggtttcgacagttccggtccaaccaaggaagtcaccagcgaccgcgcttcactcctggacagcagggtgggcctaccaccatgattgttcgacagcatcgcccttacaacccaagcaacttccaccccggcagcagtggcagccatcatggccaaggtcagcacaaccgcagcgcagccccacgcccgccaatggcgccagttcagcaaactgcacccgttcccccaaagaaggacaccggaggcaagccaggagcctgcttcaactgtggtgagtccggtcacttcgccgacaagtgcccgaagcccaggcgtgctggacccaagtttgtccaggctcgggttaaccacgcgtccgcagaagaggcgcaagtagcaccagaggtcgtactgggtacgtttcctgttaactcaatccctgcaacagtacttttcgattctggtgcaacgcattcattcatttcaaagaagtttgttggggtacatgggttaataagagaagaacttagtacaccaatgcgggttcagacccccgggaatagctccacctcgattcaattcagcccttgtgtaacaatagaaatccaaagatcaccatttctagccaacctcatccttctcgaatccaaagacctagatgtcattcttgggatggattggctgaccaagttcaagggtgtcattgattgtgtgaatcgcacggtcaccttgaccaatgagaaaggggaaacagtggtgtacaagtcaccagtcgtactgaagcagggaatctccttaaatcagattgaggtggaaaatccgatggtcaccgaggagaagagttcgaggaaattggaagatatccctatagtcggcgagtatccagaggtgttccctgaggacctcactaccatgccacccaagagggagatcgaattccagattgatttggcaccggggactgccccaatttacaagaggccgtacagaatggcagccaacgagctagcagaggtcaagaagcaggttgatgagcagttgcagaaagggtacattcgaccaagtacttcaccttggggtgctccggtcatttttgtggagaagaaggacaagacgaagagaatgtgcgtcgattatcgcacactcaatgaggtcaccatcaagaacaaatatcctttgccgcggattgatgatctgtttgatcagctgaaaggagccaaggtgttttctaaaacagacctgcgatcaggctatcaccaattgagaattcaggaagaggatattcccaagatggccttcaccactcggtatgggttgtatgagtgcacggttatgtattttggacttacgaatgcaccggccttcttcatgaacctgatgaacaaagtgttcatggaatttctggataagtttgttgtggtattcattgatgacattctaatctattccaagtcggaagaagagcatgagcaacatcttcgtctggtactcgagaagttgcaggagcaccagctttatgccaagttcagcaaatgcgacttttggttatcagaggtcaaattcttgggtcacgtcattacagctcagggcgtggcagtctatccatcgaatgtggagtcagttaccaagtggaccccacctaagaccgtgtcacagattcggagttttcttggacttgcgggttattaccgtcggttcattgaaaatttctccagaattgccagacctatgactcagttgcttaagaaagacgagaaattcaggtggacagccgagtgtgacaagagttttgaggagctcaagaagaaattagtacctgctccagttctgattctgcccgatcagacgaaagacttccaagtctattgcgacacgtcccgtcacgggcttggatgcgttctaaagcaagagagcagagtggtcgcttatgcctcgcggcagttgcgtccgcatgaaggaaactatccaacacatggcagcggtggttcatgctttgaaaatctggaggcactatctgattggcaaccgctgtgaagtatatacggatcacaagagtttgaaatatatcttcacccaacctgatctgaatctccgacagcgaagatggttggagttaatcaaagattatgacatgagcattcactaccatccaggcaaagccaatgtggtggcaaatgcattaagcaggaagagctactgcaatgctttgtgcaccgaaggcatgtgtaaggaattgcagcaggagcttgaacatctcaacttgggaatcgtagaacacgggtttgtggctgctctaaaggcacggcctacgctcgtggatcaagtaagagcagctcaagtaaatgatcctgagatagctgaactgaaaaagaatatgagggtcggaaaagcccgggatttacttgaagatgaacatggcacaatctggctgggagaaagattgtgcatacctgatgacaaagagctgaaagatctgatactcaccaaggctcatcagactcagtactccattcatccaggcagtaccaagatgtaccaagatcttaaagaaaaattttggtaggccagcatgagaagggaaatagctgaattcgtcgcactctgcgatgtttgtcagcgggtcaaggcagaacaccagaggcccataggattgttacaacctcttcaaatcccagaatggaaatgggaagagattggaatggatttcataacaggcctgcccacgacatcatcaggccacgattcaatctgggtagtcgtggatcgacttaccaaagttgctcatttcattccagtgcatactacttatacaggcaaaaggttggcagagctctatctctcaagaatcatgtgtttgcatggagtacccaaaaagatagtatctgatcgagggagtcaattcacctcaaaattttggcagaagttgcaagaggaattgggtacccgttcgaatttcagcacagcttaccatccgcagacagatggccaaaccgagagggtcaatcagatcttggaggataagttgcgagcctgtgcgctcgattttggcggagcttgggataaaagtctgccttatgctgaattctcttacaacaacagctatcaggccagtctacaaatggcaccgttcgaagcgctgtatggccggaagtgccgcatacctctcttctgggatcaaataggcgaacgtcaactgttcggaacagaagtgctaacggaagcagaggagaaagtcagaaccgtcagagagaggctgagaattgcacagtctcgacagaaaagctacgcagacaaccgccgaagagagctcacttttgaagcaggagattatatgtacctccgtgtcactccgctccggggagtacaccgtttccagacgaaaggcaagttggcaccacgcttcgtgggaccatacaaaatcttggaacgaagaggagaagttgcctatcagctagaacttccatccaacatgatcggtatccatgacgtgttccatgtgtcccagttaaagaagtgtttgagtttacccgaagaacaagccaattcggagcacattgacatccaagaagatctgacttatgtggagaagccagttcgcatccttgataccagtgaaaggaggactagaaacaaggtcaccaggttctgtagggttcagtggagccaccactcagaggaagaagcaacctgggaaagggaagatgagttgaaggccgcccatccgcacctcttcaccagctcttccgaatctcggggtcaagattccgtt

SEQ ID NO: 13757 - DNA, 3630 bp, Oryza sativa
  Clone ID: TFbOSC5141j.C1.o2.fg
atggatgcccatccgccgaaaaacttgatcgaggtgctaggattcgtcagggagctgagaatgatggcatttgaagtaggttacgaggttgcccccgagtatcgccagattccccatgaccccaacgaggagaagtgtcgtgttcgcgtgacgttgactagtgatcgtgaagaccttccgtcgataaagtttgaagctgagggaaaaaagtacagccatgtttgtcaggaaacagccttggtggccattggagagctacgtcatcgctttgatgaggagttagagtcatcagctttccagtatcacccacacaagccacatggtcaagactatagaacttacaactgtcccgaaggtgaaggtagcgccactgtgatgcacgccgtgtatatgcttagcgccatggatgcagtaggcgtggagcgagagaaagcagctcatgatagggaaaactggaaccgtggcaggatttgtaagttggagagcaaggtgtaccgtctgcagaaggaactagctgagcttaagggagaagcaccaccgccagcacccaagcttcgcctcaccgcaaggaagagaaccagtctaccacctcgtctccagttagcttcgaagactcgtgtgatggtgaacacccgcactggaagtgaaagtggaagtggaaatggtcacaatgaaggagatcccacacttgcccaagttttggcccagcaaacccagttgattaatctattagtgcagcaagcgcagaaccagcaggcaaataacaacaatcaaccaccacctccgcagaacaagttggcagattttctacgtgtgagaccacctaccttctcaagcaccactaacccagtagaggcaggtgattggctgcatgctgtgggaaagaagttagatttgtttcagtacaccgagcaggagaagttggtggacaaggcgattcgccaagaagacaagtataataggatggaacagaaaaagcgtagtagccagaggccgcgcattgctttgggacctcaagctgcaccatacccacagggaggatcctcttcagttgctcgccctcaacgccagttctacaacaacaacactagtaatcacagcaacgataatcgtaatatggtcactcgtcatgtagcagctccaactcagaatcatcctgtcaggaaggaacagggaagcaagccaggggtgtgcttcaattgtggtgatccaggacattatgctgataagtgtccaatgcctcggcgtgtgaagaatgcacctgttcagaacaactccaatgctccagcaccgaaggctcgtgttaatcatgttgcagccgcagaagcccagaatgcacctgatgtggttttgggtacgtttcctattaactctatacccgcaactgtgttttttgattccggtgctacacattcctttttgtctaaaagttttgcgggcaatcatgggatggaagttattagtcttgggagacctttactagttaataccctaggcaatcaagtatcctcaacgcagtactgtccttccgttactatagaaatagaagaaatacctttcccatcctcacttatctttctagaatccaatgatcttgatgttatcttagggatggactggctaacccatcacataggagttatagattgtgctaaccgtaatgtgactttaacaagtagcaatgggcaaacagtgtctttctttgtgtcatcccctaaatctcacggtttgacattaaatcaagttgctttgcaagagatcccaatagtacgagactatccagatgtgttccctgaggatttgccaggtatgccacctaagagagacatagagttctggatagacttagtacctggaaccaaccctatccataagagaccatacagaatggcagctaatgagttagcagaggtaaagagacaggtggatgatttgcttcaggaaggatatatcagacccagtacttcaccgtggggagcaccagttatcttcgtggagaagaaagatcatacccaaagaatgtgtgtggattatcgagcgttgaatgaggtcactatcaagaataagtatcctctacctaggattgatgacttgtttgatcaactggaaggtgctacagttttctccaagatagatcttcgttccggatatcaccaacttcgaatccgtgaggagtgtaccgttatgtcgtttggactcactaatgccccggcctttttcatgaacttgatgaaccaagtgtttatggaatatctggataagtttgtcgtggtgtttattgatgatatccttatctactccaagaataaagaagagcatgaagagcatcttcgtcttgctttagagaaactacatgagcatcagctctatgccaagtttagtaaatgcgaattttggttgcccgaagtgaagttccttggtcatgtcatctcaactggaggagttgccgtggatccaagcaatgtggagtcagtgctaaattggaagcaacccaagacggtttcagagattcgtagtttccttggtcttgcggggtactaccgcaggtttattgagaacttctcaaagattgctagaccaatgactcgactgcttcagaaggatgtgaagtataagtggacggaagagtgtgaacagagtttccaagaattgaagaaaaggctagcggctgcgccagtgttagtcttgcctgatccaaggaaaggttttcagatttggcgtcattacctttttggtaaccgtacggagatgtatacggatcacaaaagtttgaagtacattttcactcaacctgatttgaacatgcgtcaacgacggtggttagagttgatcaaggattatcatccagaagctcagcctactctttttgatcaagttagagaggctcaaatgaatgatcctgatatccaagaaatcaaaaagaacatgagaagagcgagtcaaggcggagcatcagaagccagccggtctgctgcaaccgttgaagattccagagtggaaatgggaggaaataggaatggattttatcaccggtctacccagaacatcgatgtcggtggaagttgggataagaatctgtcgtatgctgaattctcgtataacaacagttatcaagctagtcttcaaatggctccatacaaagcattgtatggtcgtaagtgccgtacaccgctcctttgggatcaaactggtgagcgtcaagtttttgggacagatgtattgcgagaggcagaagaaaaagtgaagattatccaagaaaggttgcgagttgctcagtcgcgtcaaaagagctatgcagacaatcgtcgtagggatttgactttcgaagaaggggattatgtatacctacgggttacgccgctgcggggagttcatcgttttcagaccaaagagaaattggcaccgcgttttgtgggaccttttaagattttgaagaaatgtttgagtgtacctaccgaggaagcagatcctgagcgtttagagattcaagaagatttaacttatgttgagaagccagtcagaattttggagtttccgacattccggaggagagcgtttacgctgaggaaggttcagaagtgtttgaagaagctcaaggcaagtcacacagatcccaaacagcgcttttag

SEQ ID NO: 13758 - DNA, 4934 bp, Oryza sativa
  Clone ID: TFbOSC900370j.C1.o6.np
gtgacaagttggtatcagagccaccttgaccttaggacaagccaaatggtaaacccccatccgccgaaaaacttgatcgaggtgctaggattcgtcagggagctgagaatgatggcatttgaagtaggttacgaggttgcccccgagtatcgccagattccccatgaccccaacgaggagaagtgtcgtgttcgcgtgacgttgactagtgatcgtgaagaccttccgtcgataaagtttgaagctgagggaaaaaagtacagccatgtttgtcaggaaacagccttggtggccattggagagctacgtcatcgctttgatgaggagttagagtcatcagctttccagtatcacccacacaagccacatggtcaagactatagaacttacaactgtcccgaaggtgaaggtagcgccactgtgatgcacgccgtgtatatgcttagcgccatggatgcagtaggcgtggagcgagagaaagcagctcatgatagggaaaactggaaccgtggcaggatttgtaagttggagagcaaggtgtaccgtctgcagaaggaactagctgagcttaagggagaagcaccaccgccagcacccaagcttcgcctcaccgcaaggaagagaaccagtctaccacctcgtctccagttagcttcgaagactcgtgtggtgggagacgctgtgcctgatcatgctgaacctgtcatccatgtcttaagtgatgaggaagaagaggaagacccaaaagaaagagagccagctactccagaggaggaagatccatctcttcgttccgacgcaaggcgcaccactaacccagtagaggcaggtgattggctgcatgctgtgggaaagaagttagatttgtttcagtacaccgagcaggagaaggtttcctttgcttcacatcagttgcatggtcctgctgctgagcggtgtgaccactttcttctaaacagagccgagggacagcctatcacttggcgggagtttactgctgctttcaagaagacacacataccatcaagtgttgtggcccttaagaagagagagttcagagcactcaactagggatcccgttctgtcagagagtacctccatgactttaatcgcttagctcgttatgccccagaagatgttcgcactgatgaagaacgtcaggagatgtttttagagggactgaatgatgagttgtcttttgcattgatggctatggattaccgggatttccagtagttggtggacaaggcgattcgccaagaagacaagtataataggatggaacagaaaaagcgtagtagccagaggccgcgcattgctttgggacctcaagctgcaccatacccacagggaggatcctcttcagttgctcgccctcaacgccagttctacaacaacaacactagtaatcacagcaacgataatcgtaatatggtcactcgtcatgtagcagctccaactcagaatcatcctgtcaggaaggaacagggaagcaagccaggggtgtgcttcaattgtggtgatccaggacattatgctgataagtgtccaatgcctcggcgtgtgaagaatgcacctgttcagaacaactccaatgctccagcaccgaaggctcgtgttaatcatgttgcagccgcagaagcccagaatgcacctgatgtggttttgggtacgtttcctattaactctatacccgcaactgtgttttttgattccggtgctacacattcctttttgtctaaaagttttgcgggcaatcatgggatggaagttattagtcttgggagacctttactagttaataccctaggcaatcaagtatcctcaacgcagtactgtccttccgttactatagaaatagaagaaatacctttcccatcctcacttatctttctagaatccaatgatcttgatgttatcttagggatggactggctaacccatcacataggagttatagattgtgctaaccgtaatgtgactttaacaagtagcaatgggcaaacagtgtctttctttgtgtcatcccctaaatctcacggtttgacattaaatcaagttgctttgcaagagatcccaatagtacgagactatccagatgtgttccctgaggatttgccaggtatgccacctaagagagacatagagttctggatagacttagtacctggaaccaaccctatccataagagaccatacagaatggcagctaatgagttagcagaggtaaagagacaggtggatgatttgcttcaggaaggatatatcagacccagtacttcaccgtggggagcaccagttatcttcgtggagaagaaagatcatacccaaagaatgtgtgtggattatcgagcgttgaatgaggtcactatcaagaataagtatcctctacctaggattgatgacttgtttgatcaactggaaggtgctacagttttctccaagatagatcttcgttccggatatcaccaacttcgaatccgtgaggaggtatacctaagaccgcttttacaacacggtttggtttgctcgagtgtaccgttatgtcgtttggactcactaatgccccggcctttttcatgaacttgatgaaccaagtgtttatggaatatctggataagtttgtcgtggtgtttattgatgatatccttatctactccaagaataaagaagagcatgaagagcatcttcgtcttgctttagagaaactacatgagcatcagctctatgccaagtttagtaaatgcgaattttggttgcccgaagtgaagttccttggtcatgtcatctcaactggaggagttgccgtggatccaagcaatgtggagtcagtgctaaattggaagcaacccaagacggtttcagagattcgtagtttccttggtcttgcggggtactaccgcaggtttattgagaacttctcaaagattgctagaccaatgactcgactgcttcagaaggatgtgaagtataagtggacggaagagtgtgaacagagtttccaagaattgaagaaaaggctagcggctgcgccagtgttagtcttgcctgatccaaggaaaggttttcaggtgtattgtgatgcttctagacatggtttggggttgtgttttgatgcaagatgggaaggtgattgcctatgcatctagacagttacgcccccacgagaataactatccaacacatgacctagagttggcatctgtagttcatgcattgaagatttggcgtcattacctttttggtaaccgtacggagatgtatacggatcacaaaagtttgaagtacattttcactcaacctgatttgaacatgcgtcaacgacggtggttagagttgatcaaggattatcatccaggtaaagcaaatgttgtagcagatgctctcagcaagaaaagctactgtaagatgttagaaggtcgacacctaccttgggagttatgtgaggaatttgaaaagttgaacttgggaatagtcaacaaaggttttgttgccgctttagaagctcagcctactctttttgatcaagttagagaggctcaaatgaatgatcctgatatccaagaaatcaaaaagaacatgagaagaggtaaagccatcggctatatagaggatgagcaaggaactgtgtggctaggagaaagaaattgcgtgcccgataataaggagctaaaggatactatcatgaaagaagcccatgaaactttgtattccattcatcccgggagcactaagatgtatcaagacctgaagcaacaattctagtgggccagcatgcgacgagagatagcagaatatgtggctctatgcgatgtgtgtcagcgagtcaaggcggagcatcagaagccagccggtctgctgcaaccgttgaagattccagagtggaaatgggaggaaataggaatggattttatcaccggtctacccagaacatcggtaggacatgattctatttgggtagtggttgacaggcgtactaaagttgctcatttcatacccgtcaaaacaacctacatgggaaataagctcgcagagctatatatggcaagagttgtatgtttacatggcgttcccaagaaaatagtgttagacagaggtagtcagtttacttcgaagttttggcagaacttacaagaagggatgggtactcgtttgaatttcagtgctgcctatcaccctcaaactgacggtcagacaaaaagagtaaattaaattctagaagacatgttgagagcctgtgttctagatgtcggtggaagttgggataagaatctgtcgtatgctgaattctcgtataacaacagttatcaagctagtcttcaaatggctccatacaaagcattgtatggtcgtaagtgccgtacaccgctcctttgggatcaaactggtgagcgtcaagtttttgggacagatgtattgcgagaggcagaagaaaaagtgaagattatccaagaaaggttgcgagttgctcagtcgcgtcaaaagagctatgcagacaatcgtcgtagggatttgactttcgaagaaggggattatgtatacctacgggttacgccgctgcggggagttcatcgttttcagaccaaagagaaattggcaccgcgttttgtgggaccttttaagattgtgagtcggagaggtgaagtagcttatcaagtagagttgcctctgtcaatggagggaatacatgatcgtttcccatgtgtcgcagttgaagaaatgtttgagtgtacctaccgaggaagcagatcctgagcgtttagagattcaagaagatttaacttatgttgagaagccagtcagaattttggagtttccgacattccggaggagagcgtttacgctgaggaaggttcagaaccgcccctgccgcgccgctcaggtgcgggccggccgcgccgtctcctccttcggcgtcgccgcgtcgacctcca

SEQ ID NO: 13759 - DNA, 522 bp, Oryza sativa
  Clone ID: TFbOSC9910j.C1.o4.fg
atgacagagtacctccatgagttcaaccgtctagctcgctatgctctagaagatgagctggttgtcaaagcaattcgactggaatataagaagaacaggatggacaaccgtaagagaggaaggattgtttcccaggaggcacagggtagtagccaaaggcagcgtaccaagccactccaaattggtgaatcttcttctgcatgtcaagaacaattacaacagttggacattagtggtgagatcaactcagagactaatacaagaaatgaagttaacatggagaaagctactcaattagtgctagttcagcaggatcagtctcaagaaggtaatagtaatggaagggagcagcagttgtgtttcaattgttatgagccaggtcactttgcaagagagtgttcgaagccgaagcatcaacatccacaaggtcaagtcaacaacatcatcctcacaggagcaaatgcagtgccggttgcgtcttcaagtgatacagctcagcgatcagtttcaaagcagcagtag

SEQ ID NO: 13760 - DNA, 2817 bp, Oryza sativa
  Clone ID: TFbOSC10744j.C1.o25.fg
atggaggcgcttgtcggcggatatactccgcaccttgccgaaggtcggcaagctgcccaaacccttctagattgggacagtacgttagaattggatgatttccgggtggctagtaccgtctcgattgatatagttattaccaggacaatggcagaagggcatgagcaaaaagttatagaaattgcgattactatccatgataatgactacactgatcaactaatcagcttgatgactaagctgaagataaatgagaagccggaattctattcacatgcctatcaatggggagaacgttgggagtgtgatatgactgtgaagatcaatcccccaagaggtgaacgtgatatgtattacttccgaacacgtcatagggaggcttttctacgtcttaatcatatctatcaagataagctgcaacactctcgctattcttaccatcctatgcgaaagccgggcgaagattactgtactcttcaagacgtggattatcatgaacaaccagtaaaagcaactatgtctatctggatggaagctgcagatgacatgtatgaagaagccctagaacacatggatgtacaacgtaaacgtttggaggaagctgaacgcagagaagctgttctcaaacacaaatatcgtatacttcacgaattatatgaggaaagagaaaaacataattctatcctcaatatttgtgttgcaagagcagccttctgtcttcaccaaatcccaaatatgggtagtgatgacgatgatgatgatgatggtatggaaggacatatctcaccagtacgtgaagatgaaccacatcctcaggataatggtgaaggagttttacaaggtttaccaccatcaccaccaccgttgtatcctatttattctgatgatgaagcagaagaaatgcattcagctatcgatatcagtgaacctagccaagaacctgaagtactcaggccaaatcgggacatagcaaaaaatcaaggaaataaaggttatagtgcacatgcagaatttctgaggattaaaccaccagttttctcaaaatccaaagaacctatggatgccgaagactggctaagggctattgaaaagaaactaaccttggtcagaacaaacgaacaagagaaggtaacctttgcaacccatcaactagaaggaccagccaatgaatggtgggaagcatatcaagcttctatagaagatcctacccatatcattacatggatggaatttaccatagctttcagaaatgcttttatacctacagctgtgatcaggatgaaaaagaatgaatttcgaggattaagacaagacattcaagatgagaaagagaggattgaaaggtttatagaaggattacgtgatgaacttcgaggaccaatgattagtcaagatcatgaaagttttcaaagcctagtcaataaagtggttaggctagaaaatgatcgtagaatggtggaaggattccgtaagagaagaatgaatttacaacgacaatcaccaactagaagttcactacaagttcggaggccttatccatttaagccatctctatccaatgcaaggccgggcatgccaccaatactatcaagacctggattaaggatggaagactctccatgctatgtttgtgggaagtttggacattttgcaagactatgccctaatcgtcaaaatatgggtggccaaacttcttatcagaaaccatctactacaggttttataaagaaaaatcctccaattattaagagtggacctaatcttggacgtggtcaagtacatcatattaaagcagaacaagctcaacaagatcctaatatattgatgggaatagggttgatctgcaccggcaagatcaacaatccacggagagttgttgagttgcatcttgggtttgctgactgggcgttcttctattttggccgtgcctgtgtcgtgcatgagaggaggaaggctcgcgtctctaggatacgcaagataattggggatagctgtgctcaacatcgacatcttcgtcgagacatgaggagtgatcaatatgaccattatgaggaagtgcataatcatgaaaaggaggagagagacatgaaagagccgccagttccattgttcacactcaaagtcgaggcacctccatcatctgaagagggcatcaaagcagagcaaccattagtggaaccaactgctgagattcctttgtcacaagttgatttgtttgcagttccttgtgataaagaagagttatgtgataatgcttcacttatatccatgccacaactagtgaatgaacatgctattcctactgttaattcatactgcgctgattttaagcatgttgttcacattgctaatgaagtagagaagcgtgaattgagatcttctttaaatactttgggctatgttcagtttgatgatttttgtgagctcgataatttgaaggagaaattatttgctaagtctgatttgccatatccaaccaatattatatttcacatctttggcgaatataatgatcttggaatatattttgtgcatagagtttacatctgctcggatttagaacttcctgtacatgtggataaaacatacaagctagagagaaatgttattgctaaccaaattgtctcaactttgccttgttttgattggaagaaacaggcacaaggtgctgcgtcacctataatgggcctatgggcttgtaacttcatttgggaccccggcccaggtggggcccatgtggggtgtgccccaaccaggaatagggttgatctgcaccggcaagatcaacaacccacggagaggtgtattgatcgctaa

SEQ ID NO: 13761 - DNA, 1443 bp, Oryza sativa
  Clone ID: TFbOSC15148j.C1.o1.fg
atgggcaagccgagcaatgtacccaagtcagtgtttcaattcttaaaatttgctcaacaactaaaatgtggagtggttggcctgggttggcttgggacgagctgggacccagggtcgggttgccagttcggtctgaatcatcgtaggccttgggttaaggcaggccttaagtgcctttgtaataatatgtttaacagagaaaaaggaaagaatgtcagcgggtatgcctcaagtaactcaagttttcaactcaatccaccactggcctcaagagagttaaccagggcacacccttggtccattccaagcatgctgcttagttcacagctaccattggttggaagtcaagaccaaaatcaatatgtgtttgatcgagcatttgccacccaggtcaatgagcttccaatgccagaagaggatgtccccttttgtcatgattgcagagagcaaggacactatgccctgaattgtccatgggtatatgtcaaagaagccccttcccttggtttagcagggcagacatcgctaaaccagcctcctcacaccaagtcaagcttgcagcctagtgtgcaaagtagagagctcaacggagagaatccattgaatcccgggaaatgctttcctcctagcctctcgtaccacgtggggtcacatactaagcaagccaaaggcaagaagagtaagaatcagaagagaaaagcaccgatgcgaactgaagcagaagtacgtaagatgactattaccagcaccgaatggcctccagcagggataactattcctagacgtcaaagaggaaatactttccgaggtgcacaacagttgacccagcacctcctaagccatgatggcagagtatctgatagtgaagggtcagatcaagtctcctcggattatgaagatgagtctccccgacatctcggcgaggaagagatggaatcaaaggcatgcacccgttgcggggaaattggacacgttgctagcatgtgtctcacactctgcactcattgtgaagaagaccatccaccaggggagtgtctcacccgcaaggtcacatgttttctgtgcgaaggtgcaaaccatgtgcccaaggattgccaactcagtgtgttgttgaccaagaccgtagaaatccaacgaacaaccctacgattgtctcatcagctagtcagctccaacagcaacatcgacgatatcatccccagcaccaatgctcctcctgctgcacctgactttgcaataaatcatagcgataataccttcaacaccaaccattctctgcaccgacagcctcagcaaagaattgtcgtcgatgaaagaagttgtgtctctccccgacctactccaggccaagcaaagggcaatcaacctccggagggcgataccgagcagaagaccgttattcgcctcaaccagcaatcagaaggaaacttctccggtgaataa

SEQ ID NO: 13762 - DNA, 2871 bp, Oryza sativa
  Clone ID: TFbOSC15235j.C1.o1.fg
atggtgggacagctaggtgggccttccaccctgatcgtctgtcagcaccatccctatcacccgagtaacttcaacaatgactacaacggtggcagtcacaacaacagtaagcagcacaaccacaactcgactccacccccattaatggcaccagcccagtcagatctaccagctatgctggctcagttagaacagctcaagaaggagtccggaggaaagccgggaccctgcttcaactgtggcgagcttggccacttcgctgacaaatgcccgaagcctaggcgtgccgggccaaggtttgtccaggcccatgtcaaccacgcgtccacagaggaggcgcaagcagcacaagaggtcgtacggggtacgtttcctgttaagtcaatccctgcaacagtactttttgattctggtgcaacacattcgttcatttcaaagaagtttgtcgggatgcatgggttaataagagaggaacttagcacaccaatgcgggttcataccccagggaatagctccacttcggtacaattcagcccttctataacaatagaaatccaaagatcaccatttctagccaacctcattcttctggaatccaaggacctagatgtcatacttgggatggattggctgaccaagttcaagggagtcattgattgtgcgaaccgcacagtcaccttgaccaacgagaagggagaaacagtagtgtacaaatcactagtctcaccaaagcaaggggtctctttgaatcagattgaggtggaaatcccagtggtcatcgaggagaagaattcgcggaaattggaggatatccccatagtctgcgagtacccagaagtgttccccgaagacctcactaccatgtcacccaagagagaaattgaattccagattgatttggcaccaggaactgcccctatttacaagagaccgtacagaatggcggccaacgagctagcagagggtgctccggtcatttttgtggagaagaaagacaagacgaagagaatgtgtgtcgactatcgcgcactcaatgaggtcacaatcaaaaacaaatatcccttacctcggatagacgatttgtttgatcagctgaaaggagctaaagtgttttctaagatagacctgcgatcaggctactaccagttgagaattcgggaagaggatattccaaagacggccttcaccactcgtcagttgcttaagaaagatgagaagtttaaatggacagctgagtgcgacaagagttttgaggagctcaaaaagaaattagtatccacaccagttttgattctgcacgaccagatgaaagacttccaggtctattgcgatgcatcccgccacgggcttggatgtgttctaatgcaggaaggtagagtggtcgcatatgcctcgcggcagttgcgtccacatgaagggaattatccaactcatgacctggaattggcagcagtggttcatgctttgaagatctggaggcactatctgattagcaaccgctgcgaagtatatacggaccacaagagtctgaaatacatcttcacccaaccggacctaaatctccgacaacgaagatggttggaactaatcaaagactatgacatgagcattcactaccacccgggtaaagccaatgtggtggcagatgcgctaagcaagaaaagctactgcaatgccctatgcatcgagggcatgtgtgaagaattgcagcaggagcttgaacatctcaatgtgggagtcattgaacacgagttcgtagccgctctggaagcacggcctacgcttgtggatcaagtcagagcggctcaagtaaatgatcctgaaatagctgagctcaagaagaatatgagggttggaaaagcccgagattttcatgaggatgagcatggcacaatctggttgggagaaagattgaaaaggttggcagagctttacctttcaagaatcatgtgtttgcttggggtacctaagaagatagtatctgatcgagggagtcagttcacttcaaaattttggcagaagttgcaagaagaattggggactcgtttgaatttcagcacagcctatcatccgcaaactgatggtcagactgagcgagtcaatcaaatattggaagatatgttgcgagcctatgcacttgactttggcggagcttgggataaaagtctaccgtatgctgaattctcttacaataacagctatcaggccagtttgcaaatggcaccgtttgaagcattgtatggacggaagtgccgcactccgctcttctgggatcaaactggagaacgccaactgttcgggacagaggtgctaaccgaggcagaggaaaaagtcagaactgtcagagaaaggctgaggattgcccagtctcgacagaaaagctacgcggacaaccaccgacgagagctcacgtttgaagcaggggactatgtgtaccttcgtgttactccgctccggggagtgcaccgttttcagacgaaaggcaagttgacaccacgcttcgtgggaccatacaaaatcttggaacgaagaggtgaagttgcttaccagcttgagcttccctccaacatgcttggcatccacagtgtgttccacgtctctcagttgaagaaatgtttgagagttcctgaggaacaggcaagtccggatcaaatcgaaatccaagaagacttgacgtatgtggagaagccgactcgtatcctcgaaaccagcgagagaaggaccagaaacaaagtaatcagattttgcaaggttcagtggagtcatcactcagaagaagaggccacctgggaaagagaagatgagttaaaggccgcccatccgcacctcttcgccagctcttccaaatctcggggtcgagattccgtttaa

SEQ ID NO: 13763 - DNA, 708 bp, Oryza sativa
  Clone ID: TFbOSC26960j.C1.o1.fg
atgcgaactgaagaagaagtacgtaagatgactattaccagcaccgaatggcctccagcagggataactattcctagacgtcaaagaggaaataccttccgaggtgcacgacagttgacccagcacctcctaagccatggtggcagagtatctgatagtgaagggtcagatcaagtctcctcggatgttgaagatgagtctccccgacatctcggcgaggaagagatggaatcaaaggcatgcacccgttgtggagaaattggacacattgctagcaggtgtctcacactctgccctcattgtgaagaagaccatccaccaggtgaatgtcccacccgcaaggtcacatgttttctgtgcgaaggtaccaaccatgtgcccaaggattgccaactcagtgtgttgttgaccaagaccgcagaaatccaacgaacaaccctacgattgtctcatcagctagtcagctccaacagcaacctcgacgatatcatccacagcaccaatgctcctcctgctgcacctgactctgcagtaaatcatagcaataataccttcaacaccaaccattctctgcaccgacggcctcagcaaagaattgtcgtcgatggaagaagttgtgtctctccccgacctactccaggccgagcgaagggcaatcaatctcaggagtgcgataccaagcagaagaccgttatctgcttcaaatag

SEQ ID NO: 13764 - DNA, 1252 bp, Oryza sativa
  Clone ID: TFbOSC32656j.C1.o2.np
acacaccatcacctgggacgagttttcatctgtattcaagagatcccatgttcccgcaggaatgatcacactgagaaaacgagagttccgctacctgaagcaagaagatttgaccgtcacagagtacctgcacgagttccatcgtttggctcactatgcaccagaagatgtggaaaatgatgaagacaaacaagagaagtatctccaggggttaaaagatgagatcacagtgcaactactcctagaggaatatgaagattttgagaaacttgtggacaaagccatacaactcgaaagtgagcataatcggatgaagaactgtaagagaaggattgtcagcatcccagtattcccatgtggtaaccaaagacagcgcacggagccacttcagatcaccggatcttctgttgcgcatcaagagtttccgccccaagaagatggacacaatgcagacaacaacattagcaatactaatgatgatgataccaccaacaaccatgcttcttgccccattagtgaccactcaaatcaagcgtgcaatgtcaacatcattcaccaaggtgtcgacgatagtatcaatgatggcacccaaaatgacaaccctagcaattgtgactctgagaaagactccaatggtgatagcaactatggtaccactgatgccaatgttagcaaggatttccaaccaccaattccaactccaagtcagaatgatcgtccccagacggatagctcagcaaagaagacgttgatttgctacaattgcaaaggaccagggcattactcgagggactgcctgcaaccaaggcaaagtcgatctccacattaccgccaatttacacgaagcagacatcccaatcgtattgtggtcactggagcaaacgccgtacccgtttcactgaaaggcagcaagccaaaggatctcatcgtccccagaagcgtccgcaatccacattaaagaataccacctgttagaggttgacgccaaagatatgaatgataagaagttctagaaccgaagccccatcctcaaccaccgcagcctagtctgggtcagttagaagttcaaccagggacaagtcgggtgaagagaagattccatctgcaacaggagatcgagccaagcgttccagagtggagaagtcctgttaggcaagttggttatagaagacggagcggaagaagtcagacaagaagagaagactgcccaacctatcttcatgctagcctgctcgaatctcggggaccagat

SEQ ID NO: 13765 - DNA, 2722 bp, Oryza sativa
  Clone ID: TFbOSC404962j.C1.o3.np
ctccacgcagcagccccccggaggtgcgccatgtccgacgctcggtctcggcgttcggtcgcctcgagcactcggcgtcagcaggacgccgagctcgccgcagcagaagagcgcaggtgagcaacagctcataccgctgcagcagcagcgagggcggccagactggcggcagcggagttggcagcagccagggcggaggcggaggcggcggaagatgcggcacgtgcggcggaggtagaggttgagaccttgcgcagcagcatcaacggctccatcgccggcgacatcaccgccgacagggagcttgaggagctggcaagaggaagggcacgggagcgagcagagcggtgggcagcagcccacctccacggcggcgacggcggcccaagggaccgcgcgcccgccgacgggaacccagacgggcgcgggcttgctggcgggcgcgggcttgctggcggcagcccggagcccgcacgcggccctcgcaggcagcacggctctctctcccctgaccggcgtcatggtcaccacggcgtccagatggtggtcagggactttggtcccggcggtgggtggcctaccctcaccaaaaccaactacatcgagtgggccgcggtgatgagggtgaggctccaggtgcggcacatgtgggatgcagtccggtacggtgacgtcgactacgacgaggatcggcgggcactggatgccctcatcgctgcagtcccgcccgagatgcagttctcgctttcccagaagcggactgccaaggaggcctaggacgccatcgctgcggcacgcatcggcagcgaccgcgcccgcaagtccacactgcaggcactccgcaaggagtgggagaacctggctttcaagccaggtgaggatgttgatgacttgcagaaaatggtgcagtacggcgacgacacctacgatgaggagagagctgtcgagaagctcttccgctgcgtccctgagaagtacaggcagatcgctcgctcgatcgaatctctgctggacctctccacgatgtcgatcgaggaggcgttaggtcgcctcaaggtcgtcgatggtgatgagccacagcctctctcggggcccatcaccatcggcgggaagctccatctcactcaggagcagtgggaggcctctcagggtgatgggaggaagggggagtcatcttccccgacaggcggccataagccgcgcaaggcgcggggaggtgtccagctatggtgggcgcgaagacgtgccgagggtggcgcccgcagaggcgcccagggcgttgccaccggcaaccacaagccggcacgagacgacgcctgccgcaactgtgacaagcttggccattgggccaaagactgtcgacaaccacgacgtggccaggcccacgtcgcacgggtggaggaagagccggctctgctcctggctcacgcaagcatcgagctacctccagcggcaccggccgcagcagctttcctccaccttgatgagccgaaggtactcgtctccctctgcaacggctccagcaacgacaaagctgatgggtggtacctcgacaccggcgccacccatcacatgaccggccgacgggagttcttcaccgagttcgactccagcgtccgaggctccatcaagttcggggacgcctccggcgtggagatcaagggtgttggcttcgtcaccttcaccgccaagtccggtgagcacaggctgctcacccgagtctactacatccccgcgttgaggaattctatcatcagcgtgggacaactggatgagaacggctcacgcgtgttggtcgaggatggactcatgaggatttgggatcgccgtcgtcgccttcttgccaaggtaaccagaggcactaatcgactctacatcctcagcgcgcaggttgcacaaccagtttgcctcgccgctcgtcgggacgacgaggcgtggcagtggcacgagcgcttcgggcacctccacttcgaggccctgaagcagctcagtgccaaggagatggtgtgaggcatgctgtgccttgaccacgtggagcagctctgcgacgtctgcgtggtgacgaagcagcggcggctcccctttccccagcagacgagcttccgagccaacgagcggctcgagctcgtgcacggggacttgtgtggcccagtgacaccggccacaccaggaggacgacgttacttcctgctgctcgtcgacgacctctcccgctacatgtgggtgatggtcctcggcagcaagggagaggctacggacgccatcaggcatgagcaggctgctgcagaggcggagtgcggccgcaagctgtgcgtgctgcgcaccgacaacggcggcgaattcacagcggctgaattcgcgtcgtactgcgctgatgagggcattcagcgccactacaccacgccgtacagcccgcagtagaacggcgtcgtcgaacggcgcaaccagacagttatggggatggctcgggccctcctcaagcagagggggatgccggtcatcttctggggggaggcggtggtgacggccgcctacatcctcaaccgctcgcctaccaaggccctcgatggcaggacaccgtacgaggcttggcatgggcgcaagccggcggtctcccacctgcgggtcttcggctgcctcgcgttcgccaaggagcttggccacatcggcaatggtcagtatagatatagacattcgttctgttttgcatatgctatgaaag

SEQ ID NO: 13766 - DNA, 1323 bp, Oryza sativa
  Clone ID: TFbOSC417494j.C1.o3.fg
atggatgaagtcgggtgtcgatggacattctccagggcaaatgaaggctacacgagctgcggcccgatgtttaacagagaaaaaggaaagaatgtcagcgggtatgcctcaagtaacttaagtttccaactcaatccaccactggcctcaagagagttaaccagggcacacccttggtccattccaagcatgctgcttagttcacagctatcattggttggaagtcaagaccaaaatcagtacgtgtttgatcgagcctttggcacccaggtcaatgagcttccaatgccagaagagcaggtccccttttgtcatgattgtagagagcaaggacactatgccctgaattgtccatgggtatatgtcaaagaagccccttcccttggtttagcagggcagacatcgctaaaccagcctcctcacaccaagtcaagcttgcagcctagtgtgcaaagtagagagctcaacggagagaatccattgaatccaaggaaatgctttcctcctagcctttcgcaccacgtggggtcacgtactaagcaagccaaaggcaagaagagtaagaatcagaagagaaaagcaccgatgcgaactgaagaagaagtacgtaagatgactattaccagcaccgaatggcctccagcagggataactattcctagacgtcaaagaggaaataccttccgaggtgcacgacagttgacccagcacctcctaagccatggtggcagagtatctgatagtgaagggtcagatcaagtctcctcggatgttgaagatgagtctccccgacatctcggcgaggaagggatggaatcaaaggcatgcacccgttgtggagaaattggacacgttgctagcaggtgtctcacactctgccctcattgtgaagaagaccatccaccaggggagtgtcccacccgcaaggtcacatgttttctgtgcgaaggtacaaaccatgtgcccaaggattgccaactcagtgtgttgttgaccaagaccgcagaaatccaacgaacaaccctacgattgtctcatcagctagtcagctccaacagcaacatcgacgatatcatccccagcaccaatgctcctcctgctgcacctgactctgcaataaatcatagcaataataccttcagcaccaaccattctctgcaccgacagcctcagcaaagaattgtcgtcgatggaagaagttgtgtctctccccgacctactccaggccgagcaaagggcaatcaacctcaggagggcgataccaagcagaaaaccgtcatccgcctcaaacagcaatcagaaggaagcttctcctgtgaatga

SEQ ID NO: 13767 - DNA, 1413 bp, Oryza sativa
  Clone ID: TFbOSC900108j.C1.o26.fg
atgtcatggcacagggttggtgccctgctgctgggggctcagtcctgcctgcctgtcccggaggttccggccgtaggtgggattgggtcggtactcttgtctatggctaggatgggttggaaactatgtcacgtcttccgtctgtataccgtggtgatgtttaacagagaaaaaggaaagaatgtcagcgggcatgcctccagtaactcaagttttcaactcaatccaccactggcctcaagagagttaacaagggcacacccttggtccattccaagcatgctgcttagttcacagctaccattggttggaagtcaagaccaaaatcaatatgtgtttgatcgagcatttgccacccaggtcaatgagcttccaatgccagaagagcatgtccccttttgtcatgattgtagagaacaaggacactatgccttgaattgtccatgggtatatgtcaaagaagccccttcctttggtttagcagggcagacatcgctaaaccagcctcctcgcaccaagtcaagcttgcagcctagtgtgcaaagtgaagagcccaatgaagacaatccattgaatcctagaaaatgctttcctcctagcctttcgcaccacgtggggtcacgtactaagcaagccaaaggcaagaagagtaagaatcagaagagaaaagcaccgatgcgaactgaagaagaagtacgtaagatgactattaccagcaccgaatggcctccagcagggataactattcctagacgtcaaagaggaaataccttccgaggtgcacgacagttgacccagcacctcctaagccatggtggcagagtatctgatagtgaagggtcagatcaagtctcctcggatgttgaagatgagtctccccgacatctcggcgaggaagagatggaatcaaaggcatgcacccgttgtggagaaattggacacgttgctagcaggtgtctcacactctgccctcattgtgaagaagaccatccaccaggtgaatgtcccacccgcaaggtcacatgttttctgtgcgaaggtaccaaccatgtgcccaaggattgccaactcagtgtgttgttgaccaagaccgcagaaatccaacgaacaaccctacgattgtctcatcagctagtcagctccaacagcaacctcgacgatatcatccacagcaccaatgctcctcctgctgcacctgactctgcaataaatcatagcaataataccttcagcaccaaccattctctacaccgacagcctcagcaaagaattgtcatcgatagaagaagttgtgtctctccccgacctactccaggccgagcaaagggcaatcaacctcaggagggcgataccaagcagaagaccgttatccgcttcaaccagcaatcagaaggaagcttcccctgtgaatga

SEQ ID NO: 13768 - DNA, 4593 bp, Oryza sativa
  Clone ID: TFbOSC10731j.C1.o5.fg
atgccgcgctacaagcctaaatacttgtttggtgttgagggatttgtccaggagttgcgtacgatgtcctttgccataggatttgggactgcccctttgtatgcccagattcctcatgatcgtcacgaagagaagtgccgagtcaaagtcaccttgaacagtaatagtgaagatatcccatcagtgatgttcgaagctggagaaggaaactacatccatgcatgtcaggaggtggcaaggatcgccataggagagctccgcgatcgctacagtgatcagttggccgacactgagtatcgctaccatcctcgccaaccccagggaagtaaccatggcagctaccttgagactgaggggattgagaatgatgctaccacaaggcatttggttgagatgctgtgggctatggatgaaacccgtgcggaggttgtgctagcagctcaagatcgtgaagactggaatcgtggtaagatttgcaggctagaggacaaggtggatcgtttggagaaggaactagccgcgttgaagggagaagaaccaccgcagaaggccaggattcgtcttaccgcaaggaagagagctctatttgtccctcgctaccaattggcgccaaaggtccgtgtggtggagaaagaagttaccccagccctagcggatcctccggtcgtcaatatggtgcacactcgcagcaacgggaatggccccaacaacaacaataacaacaacaacaatggagagaatcccacacttgcccaagtcctggctcaacaggcacagcttatgaacatgatgatgcagcaactccagaaccaacagaaccagggaaataaccatgcacctccccagaacaagttagcagaatttcttcgtgtgaggccgcccactttctctagaaccactaatcctgttgaagctagcgattggctgcatgccatagagaagaagttggatttgcttcagtgcactgatcaggagaaggtctcatttgcatcacatcagctgcatggccctgcctctgagtggtgggatcacttccgccttaacagaacttctgctgaacctatcacttggcttgaattcaccgctgctttccggaagacgcatataccatcgggagtgcgtcagttcttcaacaacaatgctggcaacaacatccgcaatcaagctccacgccctgttgcagctccaacacagcaacagcctgccaagagggagcaaggtagcaagcccggggtgtgcttcaactgtggagacccaggacattactctgacaagtgtccgaagccccgacgcgtgaaggttgtccctgcccagagcaactctaccacaccagcatcaaaggcccgtgtcaatcatgttgctgctgcagaagctcaaggtgctccagatgtgattttgggtacgttccttgtcaactcagttcctgcaacagtgcttttcgattctggtgctacacattcatttttatctatgagttttgcgggaaatcatgggatggaagtagaagatcttagacgtcctttgatggttagtaccccaagtaatcaagcactctctttgcaacgtagcccctctgtcagaatagaaattcaagaagtaccatttctagccaatcttatcctgttagaatccaaagaccttgatgtcatcctagggatggactggttagccagatataaaggtgtgatagactgtgccaacagaaaagtaactctcaccagcaatgatggtcgagttgtaactgttcatgcattgtcttctgagtctttaaggtcaagactgaaccaaatgactttggaagagattcctatagtccgggagtatcccgatgtgttcccagacaatttacctggtatgccgcctaaaagggatatagagttcagaatagatttggtaccaggaacaactccgatccataagagaccttatataatggcggccaatgaattagcagtagtcaagagacaagtagatgatttgcttcagaaaggatacatcagaccgagttcatctccatggggagctccggttatttttgtggaaaagaaagatcatacccagaggatgtgtgtggactatcgtgcactaaatgatgtgactatcaagaataagtacccgctgcccagaattgatgatttgtttgatcagcttaaaggtgccactgttttctccaagatagatcttcgatcagggtatcaccagttaagaatcaaagaggaagatatacctaagacagcttttaccactaggtatgggttgtttgaatgtactgttatgtcttttggacttaccaattaccccgctttcttcatgaacttgatgaataaggtgtttatggaatatctagacaagttcgtggtggtctttattgatgacattcttatctactctcgaacaaaagaagagcatgaagaacatcttcaccttgcactagagaagctacgagaacatcaactgtatgccaagtttagcaaatgtgaattttggttgtctgaagtgaagttccttggtcatgtcatctcagccggaggagttgccgttgatcctagtaatgtggaatccgtaatcaactggaaacaaccaaagacagtttcagaggttcacagtttcctaggcctcgcaggatattatcggaggtttatagagaatttttccaagattgctaagcccatgacacgattacttcaaaaggatgtaaagtacaagtggtcagaagaatgtgagcagagttttcaagagttgaagaatcgcttaatatcagctcctattttgattttgccttatccaaagaagggttttcaagtgtattgtgatgcatccaagcttgggttaggttgtgttctgatgcaagatgggaaggtggttgcctatgcatctcgtcagttacgtccgcatgagaagaactaccctactcatgatcttgagttagctgcagtggttcatgcgttgaagatttggcgtcattatcttttcggtactcgtacaaaggtatacactgatcacaagagtttaaagtacatctttactcagccagatctgaacatgagacaacggagatggttggaattaattaaggattatgacgtgggaattcattatcacccgggaaaggctaatgttgtagcagatgctcttagcaggaaaggctattgcaatgctacggaaggacgacagctgccattggagttatgcaaggaatttgaaagattaaatttgggaattgtcagtagaggtttcgttgtagccttagaagcaaagcccactctaattgatcaagttagagaagcccaaattaatgatcctgatattcatgaaatcaagaagaatatgagaagaggaaaagctatcggtttcttggaagatgagcaaggaactgtatggttgggcaagagaatctgcgtccccgacaacaaagatttaaaagatgcaattctgaaagaagctcatgatactttatactccattcaccctggtagtaccaagatgtaccaggatctcaaggaaagattttggtgggcaagtatgaagcgtgaaatcgcagaatacatagcagtatgtgatgtttgtcagcgagtcaaggcagaacatcagaaacccgcaggtttgttgcagcctttgaagattcctgaatggaagtgggaggaaatcggtatggatttaatcactggtctacctagaacgtcattaggccatgactctatttgggtgatagacgacagacttaccaaagtggctcatttcatcccagtaaagacaacctattccggaagtcggttggcggaattgtatatggcaaggattgtgtgtttgcaccgcgtccctaagaaaatagtgtctgatcgaggcagtcagtttacttcaaagttttggaagaagcttcaggaagagatgggttctaagctgaactttagtactgcttatcatccgcagacagacggacaaaccgaaagggtaaaccagattttggaagacatgttgagagcttgtgctttagacttcggtggaagttgggataagaatttgccttacgccgaattctcgtacaacaacagttatcaagctagtcttcagatggctccttacgaagcactgtatggtcggaagtgccgcactctgcttttgtgggatcaaacgggagaacgtcaggttttcgggacggatatcctaagggaagcagaagaaaaggtgaaaatcattcaagaaagattgtgcgtggcccagtctcgtcataagagttatgccgacaatcgtcgtagagatctaagttttgacgaaggagattatgtgtactttcgtggcacgcctcttcgaggagttcatcgttttcacaccaaaggaaaattggcaccacgttttgtgggaccttataagattgtcagtagaagaggagaggttgcttatcagttggagttacctcaatctttggcaggagtccataatgtgttccatgtgtcgcaattgaaaaagtgtttaaggattccgacgtttccggagagtccgtttttacaggagaagaatttgaagagttccaaggccagcaaggcaagtcacacagatcccaaacaaccctttgagcatgttgatcctgtttaa

SEQ ID NO: 13769 - DNA, 1767 bp, Oryza sativa
  Clone ID: TFbOSC401125j.C1.o1.fg
atgccgcgctacaagcctgagtacttgtttggtgttgagggatttgtccaggagttgcgtacgatgtcctttgccataggatttgggactgcccctttgtatgcccagattcctcatgatcgtcacgaagagaagtgccgagtcaaagtcaccttgaacagtaatagtgaagatatcccatcagtgatgttcgaagctggaggaggaaactacatccatgcatgtcaggaggtggcaaggatcgccataggagagctccgcgatcgctacagtgatcagttggccgacactgagtatcgctaccatcctcgccaaccccagggaagtgaccgtggcggctaccttgagactgaggagattgagaatgatgctaccacaaggcatttggttgagatgctgtgggctatggatgaaacccgcgcggaggttgtgctagcagctcaagatcgtgaagaccggaatcgtggtaagatttgcaggctagaggacaaggtggatcgtttggaaaaggaactagccgcgttgaagggagaagcaccaccgcagaaggccaggattcgtcttaccgcaaggaagagagctctatttgtccctcgctaccaattggcgccaaaggtccgtgtggtggagaaagaagttaccccagccctagcggatcctccggtcgtcaatcacactaatcctggtgaagctggtgattggctgcatgccatagagaagaagttggatttgcttcagtgcattgatcaggagaaggtctcatttgcatcacaccagctgcatggccctgcctctgagtggtgggatcacttccgccttaacagaactactgctgaacctatcacttggcttgaattcaccgctgcgttccggaagacgcatataccatcgggagtggtgtctctcaagaagaaggaattcaggtcgctcacccagggatctcgcacggtcaccgagtatctgcacgagttcaatcgtctggctcgttatgctccggaagatgtgcgcactgatgaagagcgccaggagaggttcttggaaggacttaatgatgagctttcttacccactcatgactggggattatcatgatttccagaagttagtggataaggctattcgccaggaggacaagtacaaccgcatggagcagaagaaacgccggattgctcacttcaaggcacaacaggggaatagtcagaggccgcgtcttactttaggaccccagtccatgccacagggaggttcttcgtctgttgttcgtccgcagcatcagttcttcaacaacaatgctggcaacaacatccgcaatcaagctccacgccctgttgcagctccaacacagcaacagcctgccaagagggagcaaggcagcaagcccggggtgtgcttcaactgtggagacccaggacattactctgacaagtgtccgaagccccgacgcgtgaaggttgtccctgcccagaacaactctaccgcaccagcatcaaaggcccgtgtcaatcatgttgctgctgcagaagctcaaggtgctccagatgtgattttgggtacgttccttgtcaactcagttcctgcaacagtgcttttcgattctggtgctacacattcatttttatctatgagttttgcgggaaatcatgggatggaagtagaagatcttagacgtcctttgatggttagtaccccaagtaataattgtactctattatcaatttgttattgtgtgcctcggctgattcctggacgagggttcacacacatgtaa

SEQ ID NO: 13770 - DNA, 2070 bp, Oryza sativa
  Clone ID: TFbOSC401249j.C1.o59.np
aaggtgcgctgtggtggattgtgttgtgcgaggggtactgtcacagctcctttccgagctcttggtttggaatggtatattcctggtttggagatagatctgtacagccggatgccgcgctacaagcctgagtacttgtttggtgttgagggatttgtccaggagttgcgtacgatgtcctttgccataggatttgggactgcccctttgtatgcccagattcctcatgatcgtcacgaagagaagtgccgagtcaaagtcaccttgaacagtaatagtgaagatatcccatcagtgatgttcgaagctggaggaggaaactacatccatgcatgtcaggaggtggcaaggatcgccataggagagctccgcgatcgctacagtgatcagttggccgacactgagtatcgctaccatcctcgccaaccccagggaagtgaccgtggcggctaccttgagactgaggagattgagaatgatgctaccacaaggcatttggttgagatgctgtgggctatggatgaaacccgcgcggaggttgtgctagcagctcaagatcgtgaagaccggaatcgtggtaagatttgcaggctagaggacaaggtggatcgtttggaaaaggaactagccgcgttgaagggagaagcaccaccgcagaaggccaggattcgtcttaccgcaaggaagagagctctatttgtccctcgctaccaattggcgccaaaggtccgtgtggtggagaaagaagttaccccagccctagcggatcctccggtcgtcaatatggtgctcactcgcagcaacgggaatggccccaacatcaacaataacaacaacaacaacaatggagagaatcccacacttgcccaagtcctggctcaacaggcacagctgatgaacatgatgatgcagcaactccagaaccagcagaaccagggaaataaccatgcacctccccagaacaagttagcagaatttcttcgtgtgaggccgcccactttctctagcaccactaatcctgttgaagctggtgattggctgcatgccatagagaagaagttggatttgcttcagtgcattgatcaggagaaggtctcatttgcatcacaccagctgcatggccctgcctctgagtggtgggatcacttccgccttaacagaactactgctgaacctatcacttggcttgaattcaccgctgcgttccggaagacgcatataccatcgggagtggtgtctctcaagaagaaggaattcaggtcgctcacccagggatctcgcacggtcaccgagtatctgcacgagttcaatcgtctggctcgttatgctccggaagatgtgcgcactgatgaagagcgccaggagaggttcttggaaggacttaatgatgagctttcttacccactcatgactggggattatcatgatttccagaagttagtggataaggctattcgccaggaggacaagtacaaccgcatggagcagaagaaacgccggattgctcacttcaaggcacaacaggggaatagtcagaggccgcgtcttactttaggaccccagtccatgccacagggaggttcttcgtctgttgttcgtccgcagcatcagttcttcaacaacaatgctggcaacaacatccgcaatcaagctccacgccctgttgcagctccaacacagcaacagcctgccaagagggagcaaggcagcaagcccggggtgtgcttcaactgtggagacccaggacattactctgacaagtgtccgaagccccgacgcgtgaaggttgtccctgcccagaacaactctaccgcaccagcatcaaaggcccgtgtcaatcatgttgctgctgcagaagctcaaggtgctccagatgtgattttgggtacgttccttgtcaactcagttcctgcaacagtgcttttcgattctggtgctacacattcatttttatctatgagttttgcgggaaatcatgggatggaagtagaagatcttagacgtcctttgatggttagtaccccaagtaataattgtactctattacggtctgacccgccagaccgatgg

SEQ ID NO: 13771 - DNA, 4902 bp, Oryza sativa
  Clone ID: TFbOSC401778j.C1.o1.fg
atgcacgcccgagctgccgccggtggtgacgtcaccgccaacgtcatcgtcgtcgttccccgtggcccggttccgacgtttttggagagtctgagtttgcaggagaagattttgaagagttccaaggccagcaaggcaagtcacacagatcccaaacaacccttgagcatgttgatcccgtttaaagctattgtttctattcaactattgcatttattttcgaatatgccgcgctacaagcctgagtacttgtttggtgttgagggatttgtccaggagttgcgtacgatgtcctttgccataggatttgggactgcccctttgtatgcccagattcctcatgatcgtcacgaagagaagtgccgagacaaagtcaccttgaacagtaatagtgaagatatcccatcagtgatgttcgaagctggaggaggaaactacatccatgcatgtcaggaggtggcaaggatcgccataggagagctccgcgatcgctacagtgatcagttggccgatactgagtatcgctaccatcctcgccaaccacagggaagtgactgtggcagctaccttgagactgaggggattgagaatgatgctaccacaaggcatttggttgagatgctgtgggctatggatgaaacccgagcggaggttgtgctagcagctcaagatcgtgaagaccgaaatcgtggtaagatttgcaggctagaggacaaggtggatcgtttggagaaggaactagccgtgttgaagggagaagcaccaccgcagaaggccagggttcgtcttaccgcaaggaagagagctctattcatccctcgctaccaattggtgccaaaggtccgtgtggtggagaaagaagttaccccagccctagcggatcctccggtcgtcaatatggtgctcactcacagcaacgggaatggccccaacatcaacaataacaacaacaacaatggagagaatcccacacttgcccaagtcctggctcaacaggcacagcttatgaacatgatgatgcagcaactccagaaccagcagaaccagggaaataaccatgcacctccccagaacaagttagcagaatttcttcgtgtgaggccgcccactttctctagcaccactaatcctgttgaagctcgtgattggctgcatgccatagagaagaagttggatttgcttcagtgcactgatcaggagaaggtctcatttgcatcacaccagctgcatggccctgcctctgagtggtgggatcacttccgccttaacaggactactgctgaacctatcacttggcttgaattcaccgctgctttccgaaagacgcatataccatcgggagtggtgtctctcaagaagaaggaattcaggtcgctcacccagggatctcgcacggtcaccgagtatctgcacgagttcaaccgtttggctcgttatgctccggaagatgtgcgcactgatgaagagagccaggagaggttcttggaaggacttaatgatgagctttcttaccaactcatgactggggattatcatgatttccagaagttagtggataaggctattcgccacgaggacaagtacaaccgcatggagcagaagaaacgccggattgctcagttcaaggcacaacaggggaatagtcagaggccgcgtcttactttaggaccccagtccatgccacagggaggttcttcgtctattgttcgtttgcagcgtcagttcttcaacaacaatgctggcaacaacatccgcaatcaagctccacgacctgttgcagctccaacacagcaacagcctgccaagagggagcaaggcagcaagcccggggtgtgcttcaactgtggagacccaggacattactctgacaagtgtccgaagccccgacgcgtgaaggttgtctctgcccagagcaactctaccgcaccagcatcaaaggcccatgtcaatcatgttgctgctgcagaagatcaaggtgctccagatgtgattttgggtacattccttgtcaactcagttcctgcaacagtgcttttcgattctggtgctacacattcatttttatctatgagttttgcgggaaatcatgggatggaagtagaagatcttagacgtcctttgatggttagtaccccaagtaatcaagcactttctttgcaacgtagcccctctgtcagaatagaaattcaagaagtaccatttctggccaatcttatcctattagaatccaaagaccttgatgtcatcctagggatggactggttagccagatataaaagtgtgatagtctgtgccaacagaaaagtcaagtctgaaccaatagcttcggaagagattcccatagtacaggaatacccggacgtgttcccggacgatttacctggtatgccgcctaaaagagatattgaattcagaatagatctgaaagatcatacccagaggatgtgtgtagactatcgtgcactaaatgatgtgactatcaagaataagtacccgctgcccagaattggtgatttgtttgatcagcttaaaggtgccaccgttttctccaagatagatcttcgatcagggtatcaccagttgagaatcaaagaggaagatatacctaagacaacttttaccactaggtatgggttgtttgaatgtactgttatgtcttttggacttactaatgcccccgctttcttcatgaacttgatgaataagtttagcaagtgtgaattttggttgtctgaagtgaagttccttggtcacgtcatctcagccggaggagttgccattgatcctagtaatgtggaatccgtaaccaactggaaacaaccaaagacagtttcagagattcgcagtttcctaggcctcgcaggatattatcggaggtttatagagaatttttccaagattgctaagcccatgacacgattacttcaaaaggatgtaaagtacaagtggtcagaagaatgtgagcagagttttcaagagttgaagaatcgcttaatatcagctcctattttgattttgcctgatccaaagaagggttttcaagtgtattgtgatgcatccaagcttgggttaggttgtgttctgatgcaagatgggaaggtggttgcctatgcatctcgtcagttacgtccgcatgagaagaactaccctactcatgatcttgagttagctgcagtggttcatgcgttgaagatttggcgtcattatcttttcggtactcgtacagaggtgtacaccgatcacaagagtttaaagtacatctttactcagccagatctgaacatgagacaacagagatggttggaattaattaaggattatgacatgggaattcattatcacccgggaaaggctaatgttgtagcagatgctcttagcaggaaaggctattgcaatgctacggaaggacgacagttgccattggagttatgcaaggaatttgaaagattaaatttgggaattatcagtagaggtttcgttgcagccttagaagcaaagcccactctaattgatcaagttagagaagcccaaattaatgatcctgatattcaagaaatcaagaagaatatgagaagaggaaaagccatcggtttcgtggaagatgggcaaggaactgtatggttgggcgagagaatctgcgtccccgacaacaaagatttaaaagatgcaattctgaaagaagctcatgatactttatactccattcaccctggtagtaccaagatgtaccaggatctcaaggaaagattttggtgggcaagtatgaagcgtgaaatcgcagaatacgtagcagtatgtgatgtttgtcagcgggtcaaggcagaacatcagaaacccgcaggtttgctgcagcctttgaagattcctgaatggaagtgggaggaaatcggtatggatttcatcactggtctacccagaacgtcatcaggccatgactctatttgggtgatagtcgacagacttaccaaagtggctcatttcatcctagtaaagacaacctattccggaagtcggttggcggaattgtatatggcaaggattgtgtgtttgcatggcgtccctaagaaaatagtgtctgatcgaggcagtcagtttacttcaaagttttggaagaagcttcaggaagagatgggttctaagctgaactttagtactgcttatcatccgcagaccgacggacaagccgaaagggtaaatcagattttggaagacatgttgagagcttgtgctttagacttcggtggaagttgggataagaatctaccttatgcggaattctcgtacaacagcagttatcaagctagtcttcagatggctccttacgaagcactttataatcggaagtgccgcactccgcttttgtgggatcaaacgggagaacgtcaggttttcaggatggacatcctgagggaagcagaagaaaaggtgaaaatcattcaagaaagattgcgtgtggcccagtctcgtcataagagttatgccgacaatcgtcgtagagatctaagttttgacgaaggagattatgtgtaccttcgtgtcacgcctcttcgaggagttcatcgttttcacaccagaggaaagttggcaccgcgttttgtgggaccttataagattgtcagtagaagaggagaggttgcttatcagttggagttacctcaatctttggcaggagtccataatgtgttccatgtgtcgcaattgaaaaagtgtttaagggtacctaccgaagaagctaatcttgaacagatagaagtccaagaggacctgacctatgttgagaaaccaatccgtatcttggaaatagatgagagaagaaccagaaatcgagttatccgtttttgcaaagtccatggagtaatcactcggaagaagaatcaacttgggaacgagaagatgaattga

SEQ ID NO: 13772 - DNA, 1323 bp, Oryza sativa
  Clone ID: TFbOSC401829j.C1.o8.fg
atggatgaagtcgggggtcgatggacattctccagggcaaatgaaggctacacgagctgcggcccgatgtttaacagagaaaaaggaaagaatgtcagcgggtatgcctcaagtaacccaagttttcaactcaatccaccactggcctcaagagagttaaccagggcatacccttggtccattccaagcatgctgcttagttcacagctaccattagttggaagtcaagaccaaaatcagtatgtgtttgatcgagcatttgccacccaggtcaatgagcttccaatgctagaagaggatgtccccttttgtcacgattgtagagagcaaggacactatgccctgaattgtccatgggtatatgccaaagaagccccttcctttggtttagcagggcagacatcgctaaaccagcctcctcgcaccaagtcaagcttgcagcctagtgtacaaaggagagagcctaatggagagaatccattgaatcccgggaattgctttcctcctagcccttcgtaccacgtggggtcacgtgctaagcaagccaaaggcaagaagagtaagaatcagaagagaaaagcaccgatgcgaactgaagaagaagtacgtaagatgactattaccagcaccgaatggcctccagcagggataactattcctagacgtcaaagaggaaataccttccgaggtgcacgacagttgacccagcaccttctaagccatggtggcagagtatctgatagtgaagggtcagatcaagtctcctcggattatgaagatgagtctctccgacatctcggcgaggaagagatggaatcaaaagcatgcccccgttgtggagaaattggacacgttgctagcctgtgtttcacactctgcccttattgtgaggaagaccatccaccaggtaaatgtcccacccgcaaggtcacatgttttctgtgcgaaggtaccaaccatgtgcccaaggattgccaactcagtgtgttgttgaccaagaccgcagaaatccaacgaacaaccctacgattgtctcatcagctagtcagctccaacatcaacatcgacgatatcatccccagcaccaatgctcctcctgctgcacctgactctgcagtaaatcatagcaataataccttcaacaccaaccattctctgcaccgacggcctcagcaaagaattgtcgtcgatggaagaagttgtgtctctccccgacctactccaggccgagcgaagggcaatcaatctcaggagtgcgataccaagcagaagaccgttattcgcctcaatcagcaatcagaaggaaacttctcttgtgaatga

SEQ ID NO: 13773 - DNA, 4113 bp, Oryza sativa
  Clone ID: TFbOSC900386j.C1.o22.fg
atgttcgaagctggaggaggaaactacatccatgcatgtcaggaggtggcaaggattgccataggagagctccgcgatcgctacagtgatcagttggccgacactgagtatcgctaccatcctcgccaaccccagggaagtgaccgtggcagctaccttgagactgagaggattgagaatgatgctaccacaaggcatttggttgagatgctgtgggctatggatgagacccgcgcggagactgtgttagcagctcaagatcgtgaagaccggaatcgtggtaagatttgcaagctagaggacaaggtggatcgtttggagaaggaactagccgcgttgaagggagaagcaccaccgcagaaggccaggattcgtcttacggcaaggaagagagctctatttgtccctcgctaccaaatggcgccaaaggtccgtgtggcggagaaagaagttaccctagccctagcggatcctccggtcgtcaatatggtgctcactcgcagcaacgggaatagccccaacatcaacaataacaacaacaacaatggagagaatcccacacttgcccaagtcctggctcaacaggcacagcttatgaacatgatgatgcagcaactccagaaccagcagaaccagggaaataaccatgcacctccccagaacaagttagcagaatttcttcgtgtgaggccgcccactttctctagcaccactagtcctgttgaacctggtgattggctgcatgccatagagaagaagttggatttgcttcagtgcactgatcaggagaaggtctcatttgcatcacaccaactgcatggccctgcctctgagtggtgggaccacttccgccttaacaggactactgttgaacctatcacttggcttgaattcaccgctgctttccggaagatgcatataccatcgggagtgttgtctctcaagaagaaggaattcaggtcgctcactcaggggtctcgctctgttactgagtatctgcacgagttcaatcgtctggctcgttatgctccggaagatgtgcgcactgataaacagcgccaggagaggttcttggaaggacttaatgatgagctttcttacccactcatgactggggattatcatgatttccagaagttagtggataaggctattcgtcaggaggacaatcagaggccgcatcttactttaggaccccagtccctgccacagggaggttcttcgtctgttgttcgtccgcagcgtcagttcttcaacaacaatgctggcaacaacatccgcaatcaagctccacgccctgttgcagctccaacacagcaacagcctgccaagagggagcaaggcagcaagcccggggtgtgcttcaactgtggagacccaggacattactctgacaagtgtccgaagccccgacgcgtgaaggttgtccctgcccagagcaactctaccgcaccagcattaaaggcccgtgtcaatcatgttgccgctgcagaagctcaaggtgctccagatgtgattttggaatccaaagaccttgatgtcatcctagggatggactggttagccagatataaaggtgtgatagactgtgccaacagaaaagtaactctcaccagcaatgatggtcaagttgtaattgttcatgcattgtcttctgagtctttaaggtcaagtctgaaccaaatgactttggaagagattcctatagtccgggagtatcccgatgtgttcccagacgatttacctggtatgccacctaaaagggatatagagttcagaatagatttagtactaggaacaattccgatccataagagaccttatagaatggcagccaatgagttggcagaagtcaagaggcaagtagacgatttgcttcagaaaggatacatcagaccaagttcatctccatggggagctccggttatttttgtggaaaagaaagatcatacccagaggatgtgtgtggactatcgtgcactaaatgacgtgactatcaagaataagtacccgctgcccagaattgatgatttgtttgatcagcttaaaggtgccaccgttttctccaagatagatcttcgatcagggtatcaccagttgagaatcaaagaggaagatatacctaagacagcttttaccactaggtatgggttgtttgaatgtactgttatatcttttggacttaccaatgcccccgctttcttcatgaacttgatgaataaggtgtttatggaatacctagacaagtgcgtggtggtctttattgatgacattcttatctactcccgaaccaaagaagagcatgaagaacatcttcgccttgcactaaagaagctacgagaacatcaactgtatgccaagtttagcaagtgtgaattttggttgtctgaagtaaagttccttggtcacgtcatctcagcaggaggagttgctgtcgatcctagtaatgtggaatccgtaaccaactggaaacaaccaaagacagtttcagagattcgcagtttcctaggcctcgcaggatattatcggaggtttatagagaatttttccaagattgctaagcccatgacacggttacttcaaaaggacgtaaagtacaagtggtcagaagaatatgagcagagttttcaagagttgaagaatcgcttaatattagctcctattttgattttacctgatccaaagaagagtttccaagtgtattgcgatgcatccaaaattgggttaggttgtgttctgatgcaagatgggaaggtggttgcctatgcatctcgtcagttacgtccgcatgagaagaactaccctactcatgatcttgagttaactgcagtggttcatgcgttgaaaatttggcgtcactatcttttcggtactcgtacagaggtgtacaccgatcacaagagtttaaagtatatctttactcagccagatctgaacatgagacaacggagatggttggaattaattaaggattatgatatgggaattcattatcacccgggaaaggctaatgttgtagcagatgctcttagcaggaaaggctattgcaatgctacggaaggacgactgccattggagttatgcaaggaatttgaaagattaaatttgggaattgtcagtagaggtttcgttgcagccttagaagcaaagcccactctaatcgatcaggttagagaagcccaaattaatgatcctgatattcaagaaatcaagaagaatatgagaagaggaaaagctatcggtttcttggaagatgagcaaggaactgtatggttgggcgagagaatctgcgtccccgacaacaaagatttaaaagatgcaattctgagagaagctcatgatactttatactccattcaccctggtagtaccaagatgtaccaggatctcaaggaaagattttggtgggcaagtatgaagcgtgaaatcgcagaatacgtagcagtatgtgatgtttgtcagcgagtcaaggcagaacatcagaaacccgcaggtttgctgcagcctttgaagattcctgaatggaagtgggaggaaatcgacggacaaaccgaaagggtaaataagattttggaagacatgttgagagcttgtgctttagacttcggtggaagttgggataagaatctaccttatgcggaattctcgtacaacaacagttatcaagctagtcttcagatggctccttacgaagcactgtatggtcggaagtgccgcactccgcttttgtgggatcaaacgggagaacgtcaggttttcgggatggatatcctgagggaagcagaagaaaaggtgaaaatcattcaagaaagattgcgtgtggcccagtctcgtcataagagttatgccgacaatcgtcgtagagatctaagttttgaagaaggagatcatgtgtaccttcgtgtcacgcctcttcgaggagttcatcgttttcacaccaaaggaaaattggcaccgcgttttgtgggaccttataagattgtcagtagaagaggagaggttgcttatcagttggagttacctcaatctttggcaggagtccataatgtgttccatgtgtcgcaattgaaaaagtgtttaagggtacctaccgaagaagctaatcttgaatag

SEQ ID NO: 13774 - DNA, 3135 bp, Oryza sativa
  Clone ID: TFbOSC30542j.C1.o1.fg
atgtcatacacaccgcctggccgccgtggtggtggcggcggcgggggaagcggcaacggccgcggcagcgcgagcggcagcggcgtggggaattgcgcagacggcgcatcactcccgctagtgcctcaggggagagatgctgggcacactgcccgtctcccgatcctgtcgaggacaaattatccggactgggcactgttgatgcgcgtaaacctgcaggcgcaggggctctggacggccatcgatcctggctacgcggagtaccgcgaggatcgtgcagcgctctcggcgattctccaagctgtgccgcgtgagatgttgcgtggcctggcgaagcacaattcggcgaaggcgacgtgggatgccattaaaaccatgcgggtcagtgtcgaccgcgtgcgtgaggcgaaggagcagggattccgccgtcagttcgaggcgatgcgcttcaaggacggggagacgccagaggaatttgcaatgcggctcactgccgtcgttgcggacattcgcgacatgggcggagtcatggaagacgaacacatcaacaagaagctgctgcgtgttgtccccaagaagtacaagccggtggcgatttccctcgagcagctcctcgacgtgaagaccatggccctggaggagctcgtcgggcggctgtcgacggtcgactcttacagtgatgacgaggaggcaagtgatggcagcaaattgtacctcactgaggagcagtggcaggcccgtgtcaagcagcgggagcaggagggatccagcagcagcaacaagggccgggcgggctctagcaaccagaaccgtcgaggtaaggccggcgattcaccgaagggaaagaagatggccaccggcggccatggccgtcgtgacatctctaaggtgaagtgtttcaattgcgatgaatacggtcattactcgaagcagtgccgtaagccgcgtcgccaacgtcggggagaggcgaatgcgaatctggtccaggctgaggaagaaccaactctgctcatggcacacgtgatgggggtgtcgctcgccggcgaagcggccattggtcgaacaccttgtgtgcaggaagtgcatctcacggagaagaaggttgtgcttgaccgcgaggatgggcgtgaggaggagaagacttcagagtggttcctggacaccggggccacgaatcacatgacgggcgcacgctcggcgttcgcggagcttgacactggtgttgtgggcacggttaaattcggcgatggctcggtgattgacatccaggggcacggaactgtggtgtttcagtgcaagaatggtgatcaccgctcactggaggcagtgtactacatccccaagctgagaaaaaacatcgtcagtgttggtcgcctcgacgcgcgcggctacgacgcacacatttggcatggtgttttcacgttgcgttacccggaagggatgctgctagctaaggcacttcggaggttggcacaaggaggcatggtccgcgggctccagcaaattgatcataatgatcagttgtgtgacggggcacagacggcgctcgagctggtgcacggtgacctctgcggaccaatcacgccggcgacgccggggggcaagaagtatttcttgctcctggtcgatgacatgagtcgtcacatgtggatacgactcctctctgccaaacacgaagcatcggcggcgattaagcagttccaagccggcgtggagaaggagagcaatcggaagctcatggcgctgcgcatcgatcgcgggggtgaattcacctctgtagagttcatggagtactgcgcggatacaggggtgaagcgtcaactcactgcaccctactcaccgcagcagaacggcgtagtggagcggcgcaaccagactgtggtggcagcggcgaggtccatgctgaaggcggcaaacatgccggcatatttctggggagaggtggtggttgcagccgtctacgtcctgaacagatcaccaacgaagagtcttgatggggtgacgccgtatgaagcgtggcatggtcgccgacccactgtcgaacacctgcgtgtgtttgggtgtgtgggctatgttaagacggccaagccaaacttgagaaagcttgatgatcatggcacgaggatggtcttcattggctacgagcaaggatcaaaagcctacaggatgtatgatcctgtggcgcgacgcctgtgtgtgtcgcgcgacgtcatttttgatgggacgacgttctgggactggggcagcaacactgatgaagaaggagatcaggatgcctatgtggagtttacggtggagaatttcacagtcccagtccaagggggtgagacacatgcccaggatgcagcagtcactcctaccatgctagcaacatcaccaacatcaagcaccggaactgcaataactctgccatctggtgttgaattctgttcctctccaactgatgctagtgaagggactaatgaagggcccaggaggtacagaacagtggcaaacacgcttgccactacagctccaatccttgattttgattacagtgatcaatgccttatggcagcagaggaaccagcaaatttcttggaggctgagcaggagagctgctggaggaaggccatgcttgaagagatggactcaattgaaggtaacaacacttggtttctctgtgatttgccctctagccacagagcaatagggttggagtgggtttataaaatcaaacgtgatgccaaagatgccattgtgaagtacaaagctcgattggtggcaaagggatatgtccaacaacatggagttgattttgatgaagtgtttgccccagtggcgaggatggagactgtgcgattgctgattgcaatggctgctcatcagggatgggaagttcatcacatggatgtgaaatcagctttcttgaatagggaattggaaaaagatgtttatgtggttcaaccacctggttttgttgttgatggaaaagaagacaaggtgttgaaactgaagaaggccctatatggactaaaacaagcaccacgtgcatggtatgccaaattggattctagtcttgtgagcctgaattttgtcaagagtggtgtcgaaagtgctgtgtatattcaaggagagaagaactcacgacttgtg

SEQ ID NO: 13775 - DNA, 3849 bp, Oryza sativa
  Clone ID: TFbOSC900297j.C1.o6.fg
atgtcatacacaccgcctggccgccgtggtggtggcggcggcgggggaagcggcaacggccgcggcagcgcgagcggcagcggcgtggggaattgcgcagacggcgcatcactcccgctagtgcctcaggggagagatgctgggcacactgcccgtctcccgatcctgtcgaggacaaattatccggactgggcactgttgatgcgcgtaaacctgcaggcgcaggggctctggacggccatcgatcctggctacgcggagtaccgcgaggatcgtgcagcgctctcggcgattctccaagctgtgccgcgtgagatgttgcgtggcctggcgaagcacaattcggcgaaggcgacgtgggatgccattaaaaccatgcgggtcagtgtcgaccgcgtgcgtgaggcgaaggagcagggattccgccgtcagttcgaggcgatgcgcttcaaggacggggagacgccagaggaatttgcaatgcggctcactgccgtcgttgcggacattcgcgacatgggcggagtcatggaagacgaacacatcaacaagaagctgctgcgtgttgtccccaagaagtacaagccggtggcgatttccctcgagcagctcctcgacgtgaagaccatggccctggaggagctcgtcgggcggctgtcgacggtcgactcttacagtgatgacgaggaggcaagtgatggcagcaaattgtacctcactgaggagcagtggcaggcccgtgtcaagcagcgggagcaggagggatccagcagcagcaacaagggccgggcgggctctagcaaccagaaccgtcgaggtaaggccggcgattcaccgaagggaaagaagatggccaccggcggccatggccgtcgtgacatctctaaggtgaagtgtttcaattgcgatgaatacggtcattactcgaagcagtgccgtaagccgcgtcgccaacgtcggggagaggcgaatgcgaatctggtccaggctgaggaagaaccaactctgctcatggcacacgtgatgggggtgtcgctcgccggcgaagcggccattggtcgaacaccttgtgtgcaggaagtgcatctcacggagaagaaggttgtgcttgaccgcgaggatgggcgtgaggaggagaagacttcagagtggttcctggacaccggggccacgaatcacatgacgggcgcacgctcggcgttcgcggagcttgacactggtgttgtgggcacggttaaattcggcgatggctcggtgattgacatccaggggcacggaactgtggtgtttcagtgcaagaatggtgatcaccgctcactggaggcagtgtactacatccccaagctgagaaaaaacatcgtcagtgttggtcgcctcgacgcgcgcggctacgacgcacacatttggcatggtgttttcacgttgcgttacccggaagggatgctgctagctaagttccaagccggcgtggagaaggagagcaatcggaagctcatggcgctgcgcatcgatcgcgggggtgaattcacctctgtagagttcatggagtactgcgcggatacaggggtgaagcgtcaactcactgcaccctactcaccgcagcagaacggcgtagtggagcggcgcaaccagactgtggtggcagcggcgaggtccatgctgaaggcggcaaacatgccggcatatttctggggagaggtggtggttgcagccgtctacgtcctgaacagatcaccaacgaagagtcttgatggggtgacgccgtatgaagcgtggcatggtcgccgacccactgtcgaacacctgcgtgtgtttgggtgtgtgggctatgttaagacggccaagccaaacttgagaaagcttgatgatcatggcacgaggatggtcttcattggctacgagcaaggatcaaaagcctacaggatgtatgatcctgtggcgcgacgcctgtgtgtgtcgcgcgacgtcatttttgatgggacgacgttctgggactggggcagcaacactgatgaagaaggagatcaggatgcctatgtggagtttacggtggagaatttcacagtcccagtccaagggggtgagacacatgcccaggatgcagcagtcactcctaccatgctagcaacatcaccaacatcaagcaccggaactgcaataactctgccatctggtgttgaattctgttcctctccaactgatgctagtgaagggactaatgaagggcccaggaggtacagaacagtggcaaacacgcttgccactacagctccaatccttgattttgattacagtgatcaatgccttatggcagcagaggaaccagcaaatttcttggaggctgagcaggagagctgctggaggaaggccatgcttgaagagatggactcaattgaaggtaacaacacttggtttctctgtgatttgccctctagccacagagcaatagggttggagtgggtttataaaatcaaacgtgatgccaaagatgccattgtgaagtacaaagctcgattggtggcaaagggatatgtccaacaacatggagttgattttgatgaagtgtttgccccagtggcgaggatggagactgtgcgattgctgattgcaatggctgctcatcagggatgggaagttcatcacatggatgtgaaatcagctttcttgaatagggaattggaaaaagatgtttatgtggttcaaccacctggttttgttgttgatggaaaagaagacaaggtgttgaaactgaagaaggccctatatggactaaaacaagcaccacgtgcatggtatgccaaattggattctagtcttgtgagcctgaattttgtcaagagtggtgtcgaaagtgctgtgtatactcaaggagagaagaactcacgacttgtggttggtgtatatgtggatgatctcattattacaggagcaagtctgatggaaataaacaagtttaaggagcagatgcaagctctttttaaaatgagtgatctcggtctgctctcttattatctcgggatggaggtgaaacagggaaaggaagggatcacagtgtctcaaggtgcatatgcagcaaagatacttgacaaagctgggatgagggattgtaatccatgtcagactcccatggatgctcggttgaagttgagcaaggagggtggagaatgtgtggaggaaactcaattcagaagcataattgggagcttaaggtacttggtgaacacaagacctgatctaagttattcggttggttatgttagcaggtttatggagaaaccgacctctgaacattgggctgccatgaaacatattttgaggtatgtggcaggtactctgaatctcggggtggaattcagaaagaagcagcatcaggttcctcagctgaatggctatagtgacagtgatatggctggggatattgatgatagaaagagtacaaccggagttctattcaaactgggagacagtttgattagttggcagtcacaaaaacaaaaggtggtagcattatcttcgtgtgaggctgaatatatagctgctgcaactgctgctgtacaaggagtatggctggctcgaccgataggtgagttggaaggccaagaacctggttgtgcactgatcaaggttgataacaagtctgctataagtctctgcaagaatcctgtgcttcatgatcgcagtaaacatattgatacaaagtttcatttcatccgggattgtgttgatcaaaaacgggtggaggtggaatacataaggtcagaggaccaacttgcagatattttaacaaagcctcttggtaagattcgatttctggagttgagaggcaagctgggattagttccagtctga

SEQ ID NO: 13776 - DNA, 258 bp, Oryza sativa
  Clone ID: TFbOSC23022j.C1.o3.np
atgaagggaatagtgggaagtaaactgaatgtaaagaaagtgaatccgagttgcctgttcgtgggaactattcccagttatgaaccaagtgaaatgttcgaagatagtctatagaggagatcgagccaagcagtccagagtggagaagtttagttagataagtttgttatagaagatgaagcggaagaagtcagacaagaagagaagaccgcccaacctatcttcttgctagcctcctcgaatctcggggacgagatt

SEQ ID NO: 13777 - DNA, 496 bp, Oryza sativa
  Clone ID: TFbOSC25029j.C1.o1.np
atcaaaggcatgcacccgttgtggagaaattggacacgttgctagcatgtgtctcacactctgcactcactaggaagaagaccatccaccaggggagtgtcccactcgcaaggtgacatgttttctgtgcgaaggaacaaaccatgtgcccaaggattgccaactcagtgtgttgttgaccaagaccgcagaaatccaacgaacaaccctacgattgtctcatcagctagtcagctccaacagcaacatcgacgatatcatccacagcaccaatgctccacctagctctgcaataaatcatagcaataatacctttagcaccaaccattctctgcaccgacagcctcagcaaagaattgtcgtcgatggaagaagttgtgtctctccccgacctactccaggccgagcaaagggcaatcaacctccggagggcgataccaagcagaagaccgtcatccgcttcaacccacaatcagaaggaagcttctcctgtgaa

SEQ ID NO: 13778 - DNA, 639 bp, Oryza sativa
  Clone ID: TFbOSC32065j.C1.o1.np
actctagaggatcccctcgtaagctcataatctattatgaaccaaataacctagcgattgatggcgattaaaatcaagtgatcaaccaaagagacatttgtttggaccaagggtttcagatatgtcttctttggatcaaaggcatgcacccgttgtggagaaattggacacgttgctagcatgtgcctcaccctctgccctcattgtgaagaagaccatccaccaggggagtgtcccatccgcaaggtcacatgttttctgtgcgagggtacaaaccatgtgcccaaggattgccaacttagtgtgttgttgaccaagaccgcagaaatccaacgaacaaccctacgattgtctcgtcagctagtcagctccaacaacaacatcgatgatatcatccacagcaccaatgctcctcttgctccacctaactctgcaataaatcatggcaataatacctttagcactaaccattctctgcaccgacagcctcagcaaagaattgtcgtcgatggaagaagttgtgtctctccccgacctactccaggccaagcaaagggcaatcaacctccggagggcgataccaagcagaagaccgtcatccgcttcaaccagcaatcagaaggaagcttctcctgtgaa

SEQ ID NO: 13779 - DNA, 3330 bp, Oryza sativa
  Clone ID: TFbOSC400192j.C1.o34.fg
atggaggcgaatgactggctccatgccatagagaagaagctgaatctcctgcagtgcaatgatcaggagaaggttgcttttgccacacaccagcttcaaggtcctgcgtcagcttggtgggacaatcacatggccacccgcccaccagacgatgtccgcaccgacgccgagaagcaggaaaagttcatggcaggtctggatgacgagctgaccaaccaattgatatcaggggactacgctgactttgagaggctggttgacaaggcaatccgtcaggaggatcaacgcaacaagatggacaggaagaggaaggccgctcagttcagggcacatcagggaagtcaccagaggccgcgcttcactcccggacagcagggtggacctaccaccatgatcgtccgccagtaccgcccgttcaaccctagcaacttccaccagggcgccagtggcagtcaggaccaacacggaggtcagctcaaccgcggtgcagctccacgcccaccagtggcaccggcacagtcaggcccgtccgcgcaagccaagaaggagactggaacaaaaccagggtcctgcttcaactgtggcgagcttggccacctcgctgacaaatgcccgaagcctaggcgtgccgggccaaggtttgtccaggctcgtgtcaaccacgcatctgcggaggaggcacaagcagcaccagaggtcgtactgggtacgtttcctgttaactcaatccctgcaacagtactttttgattctggtgcaacgcattcgttcatttcaaagaagtttgtcgggatgcatgggttagtaagagaggaacttagcacaccaatgcgggttcataccccagggaatagttccacttcggttcaattcagcccctctataacaatagaaattcaaagatcaccatttctagccaacctcattcttctcgaatccaaagatctagatgtcattcttgggatggattggctgaccaagttcaagggagtcattaattgtgcgaatcgcacagtcaccttgaccaacgagaagggagaaacagtagtgtacaaatcaccagactcaccaaagcaaggggtccctttgaatcagattgaggtggaaatcccagtggtcaccgaggagaagaattcgaggaaattggaagagattcccatagtctgcgagtacccagaagtgtttcccgaagacctcactaccatgccacccaagagagagattgaattccggattgatttggcaccgggaactgctccaatttacaagagaccgtacataatggcggccaacgaactagcagaggtcaagaagcaggttgatgagcagctacagaaagggtacattcgaccaagtacttcaccttggggtgcttcggtcatttttgtggagaaaaaggataagacgaagaggatgtgcgttgattatcgcgcactcaacgaggtcacaatcaagaataaatatcctttaccgcggatcgatgatttgtttgatcaactgaaaggagctaaagtgttttctaagatagacctgcgatcaggctaccaccagttgagaattcgggaagaggatattccaaagacggccttcaccactcggtacgagctgtatgagtgcacggttatgtccttcggacttaccaacgcacccgcattcttcatgaatctgatgaacaaagtgttcatggaatttctggacaagtttgttgtcgttttcatcgacgacatacttatctattcaaagtctgaagaagaacacgagcagcatctccgtctggtactcgagaagttgaaggagcaccagctatacgccaagttcagcaagtgtgacttctggttgacagaagtcaaatttctgggccatgtcattacagctcagggttattaccgccgattcatcgaaaacttctccaggatcgcccgacccatgactcagttgcttaagaaagatgagaagtttaaatggacagctgagtgcgacaagagttttgaggagctcaaaaagaaattagtatctgcagcagttttgattctgcccgaccagatgaaagacttccaagtctattgcgatgcatcccgccacggacttggatgtgtcctaatgcaagagggcagagtggttgcgtatgcctcgtggctgttgcgtccacacgaagggaattatccaactcatgacctggaattggcagcagtggttcatgctttgaagatctggaggcactatctgattggcaaccgctgcgaagtatatacggaccataagagtctgaaatacatcttcacccaaccggacctaaatcttcgacaacgaagatggttggaattaatcaaagactatgatatgagcattcactaccacccggggaaagccaatgtggtggcagacgcattaagcaggaagagttactgcactgccctatgcatcgagggcatgtgtgaggaattgcagcaggagtttgagcatctcaacgtgggaattgttgaacaggggttcgtagccgctctggaggcacggcctacgctcgtggatcaagtcagagcagctcaagtgaatgatcctgaaatagcagagctgaaaaagaacatgagagtcggaaaggctcgggatttccttgaggatgaacacggcacaatctggttgagagaaagattgtgtgtacctgacgacaaggaactgaaggatctgatactcaccgaggctcatcagacccagtactccattcatctaggcagcaccaaaatgcgagcgtcaactgttcgggatagaggtattagcggaagcagaagagaaagtcagaaccatcaggaaaggttgaggattgcccagtctcgacagaagagctacgcggataactgccgaagggagctcacttttgaagtaggggattacgtgtatcttcgtgtcactccgctctggggagtacaccgttttcagacgaaaggcaagttggcaccacgcttcgtgggaccatacaaaatcttggaacgaaggggggaagttgcttatcagctagaacttccatccaatatgatcgacatccatgatgtgttccacatgtcccaactaaagaagtgcttaagagtacctgaagaacaagctgattcggagcatattgatatccaggaggacctgacatatgtagagaagccggttcgtatacttgataccagcgaaagaagaaccagaaacaaggtcaccaggttttgccgagttcagtggagtcaccattcagaggaagaagcaacctgggaaagggaagatgagttgaaagccgcccatccgcacctcttcgccagctcctccgaatctcggggccgagattccgtttaa

SEQ ID NO: 13780 - DNA, 5011 bp, Oryza sativa
  Clone ID: TFbOSC100051j.C1.o6.np
tgggattaaatacgactgccacgtggctctaaaggcctcgaacaatgggaagctagtgaggatcatagctctgaaggatgagatagcacgcttgaagaaggagaatgctcagttgaagggtctcccagcgccaggaggagtccggatccgcaccacgccccgcaagacggcgactgcacccgtgcgcattcagcttgcgcccaggaacccacctccgcccgcaattctcgcagctccagctccaaccccagctccagttccagtgccagctcccgcgtccgctctctccttcgctccagcgtcagctgccaggggtccagccagtggcaacggaggttggttgtctgctactcccagtggcagccgcgaccacagcagcagcagttccagtggctcagagccgggcagcagggagacgtatctgccagactccaggagccgctaagagggatctggtctcttcctcaagatggtctacaccaggaatggtaaccgtgcaataggcgagggcagcaacggcgaagaacgcactaacggtgtgcatcccaaccgtgattccggcaatggtccgccaccactccccgagaatccgacccttgcccaagtaatggctcatcagacgcagatgatgacagctatgatgcagcagatgcagcagcagcaccagcagatgtaccagaggatgcagcagcaagccgagtagcagtagtttggtccccctccccctcagtccaaactgccggagtttctacgcgttagaccacccaccttctccagcaccaccaaccctatggaggtaaatgactggctccatgccatagagaagaagctcaatctcctgcagtgcaatgatctggagaaggtcgccttcgccacacaccagctccaaggtcccgcgtcagcttggtgggacaatcatatggctacccgcccaccaggcacggaagtcacttgggcggagttctgccgcagcttcaggaaggcgcaagtgccagatggggtcgtggcacaaaagaagagggaattccgggcactccaccagggcaacaggacagtgacggagtatctccatgagttcaatcgcctcgcgcgatatgcaccggaggatgtccgtactgacgccgagaagcaggagaaattcctagcaggtctggatgatgagctaaccaaccagttgatatctggagattacgccgactttgagaggttggttgacaaggcaatccgtcagaggatcagcgcaactaaatggaaaggaagaggaaggcagcgcagttccggtccaaccaagggagccaccagcgaccgcgcttcactcccggacagcaaggtggacctaccaccctaatcgtccgccagcaccgccctttcagtgccagcaacttccatcagggcgccagtggcagccagaaccaccatggcggtcagcccaaccgcagtgcagctccactcccaccaatggctccagcacagtcagctccgtccgcgcaagccaagaaggagactgggacaaagccagggtcttgcttcaactgtggcgagcttggccacttcgctgacaaatgcccaaagcctaggcgtgtcgggccaaggtttgtccaggcccgtgtcaaccacgcgtccgcagaggaggcgcaagcagcaccagaggtcgtactgggtacattccctgtcaactcagttcctgctacagtactttttgattctggtgcaacgcattctttcatttcaaagaaatttgtggggatgtatgggttaagaaaaaaagagcttagtacaccaatgaaggttcataccccaggaaatagttcaacctcggtcagttatagcccttcagtgctaatagaaattcaaagatcaccatttctagccaacctcatccttctcgaatccaaggatctagacgtcattcttgggatggattggctgaccaagtttaagggcgtcattgattgtgcgaatcacacagtcaccttgaccaatgagaagggagaaaccgtggtgtacaagtcaccagtctcaccgaagcaaggaatctccttaaatcagattaaggtggaaaaccctgtgaccaccggggagaagagttcgcggaaattggacgatatccccatagtctgcgagtacccagaagtgttccccaaagacctcactaccatgccacccaagagagaaattgaattccggattgatttggcaccaggaactgcccctatttacaagagaccgtacagaatgacggccaacgagctagcagaggtcaagaagcaagttgatgagtagctgcagaaagggtacattcgaccaagtacttcaccttggggtgctccggtcatttttgtggagaagaaggacaagacgaagagaatgtgtgtcgactatcgcgtactcaatgaggtcacaatcaagaacaaatatcctttaccgcggattgatgatttgtttgatcagctgaaaggagctaaagtgttttctaagatagacctgcgatcaggctaccactagttgagaattcgggaagaggatattccaaagacagccttcaccactcggtatgggttgtatgagtgcacggttatgtctttcggacttaccaacacacccgcattcttcatgaatctgatgaacaaagtgttcatggaatttctggacaagtttgttgtggtcttcatcgacgacatacttatctattcaaagtccgaagaagaacatgagcaacatctccgtctggtactcgagaagttgaaggagcacaggttatacgccaagttcagcaagtgtgacttctggttgtcggaagttaaatttctgggtcacgttattacagctcagggcgtggcagttgatccatcgaacgtggagtcagttaccaaatggaccccaccgaagaccgtgtcgcagattcagagttttcttggacttgcgggttattaccgccgattcatcgaaaacttctcaaggatcgcccgacccatgacttagttgcttaagaaagatgagagtttaaatggacagctgagtgcgacaagagttttgaggagctcaaaaagaaattagtatccgcaccagttttgattctgcccgaccagatgaaagacttccaagtctgttgcgacgcatcccgccacgggcttggatgtgttctaatgcaagagggcagagtggtcgcgtatgccttgcggcagttgcatccacacgaagggaattatccaactcatgacctggaattggcagcagtggttcatgctttaaagatctggagacactatctgattggcaaccactgcgaagtatatacggaccataagagtctgaaatacatcttcacccaaccggacctaaatctctgacaacgaagatggttggaactaatcaaagactatgacatgagcattcactaccacccgggtaaagccaatgtggtggcagatgcgctaagcaggaaaagctactgcaatgccctatgcatcgagggcatgtgcgaagaattgcagcaggagcttgaacatctcaatgtgggagtcgttgaacacggattcgtagccgctctagaagcacggcctacgctcgtcgatcaagttagagcagtgaatgatcttgaaatagcagagctgaaaaagaacatgagagtcggaaaggctcgggatttccttgaagatgaacacggcacaatctggttggcagaaagattgtgtgtacctgacgacaaagaactgaaggatctgatactcaccgaggctcatcagactcactactccattcatccaggcagcatcaaaatgtatcaagacctcaaagaaaagttttggtgggtcagcatgagaagggaaatagctgaattcatcgcactctgcgacgtttgccagtgagtgaaggcagagcaccaaagaccagcaggtttactccaacctcttcaaatcccggaatggaaatgggaggagattggaatggactttataacaggactgccccggacatcatcgggccacgattcaatctgggtagtcgtggatcgactcactaaggttgctcacttcataccagtacataccacgtatacgggcaaaaggttggcagagctctacctctcgagaatcatgtgtctacatggagtacccaaaaagatagtatctgatcgagggagccaattcacttcaaagttctagcagaaattgcaagaggaattgggaacccggttgaatttcagcacagcctaccatccgcagaccgatggtcagaccgagcgagtcaatcaaatattggaggacatgttaagggcctgcgcacttgattttggtggagcttgggacaaaagcttgccgtatgcggagttctcttacaacaacagttaccaggctagtcttcaaatggcaccgttcgaagcattatacggccggaagtgtcgcacccctctcttctgggatcagacaggcgagtgtttggaacagaggtgctaagggaagcagaagagaaagtcagaaccatcagggaaaggttgagaattgcccaatctcgacagaagaactacgcggacaaccgccgaagggagctcacttttgaaacaggggattacgtgtatcttcgtgttactccgctccggggagtgcaccgttttcaaaccaaaggcaagttggcaccacgtttcgtgggaccatacaaaatcttggaacgaaggggagaagttgcttatcagctagagcttccttccaacatgatcggcatccatgacgtgttccatgtatcccaattaaagaagtgcttgagggtacccgaggaacaagccaattcggagcacattgatattcaagaagatctgacgtatgtggagaggccacttcgaattcttaagaccagtgaaagaagaaccagaaacaaggtcactaggttctgcagggttcagtggagtcaccattcagaggaggaagcaacctgggaaagggaagatgagttgaaggccgcccatccgcacctcttcgccagctcctccgaatctcggggtcgagattccgtt

SEQ ID NO: 13781 - DNA, 3639 bp, Oryza sativa
  Clone ID: TFbOSC100217j.C1.o1.np
atggccgatcacccacccaatcaccgcggagaagccatggatgactttgtggcagagttggctcgcatgacactggtggtgggctaccccaatgtgcccgagtattcgactgttctgccgctcagtggtgagttccctcaccgtgttcgcccggaggttcatggctatgtgggtacctgtctcgctaacatggtggttgaggcatccggaggcacagcagatcacacctgtcaggaggcagcatagctgatgatggccagactacggaagcgccacaactacatcttctgcaacacggcgtaccgttttcaccctcgtcgagcaagtggcgatgacgtcagcaccttccgtccgacagccggcgagaacgacaccacctttggtcacatgtgtgccgtgatgaggggtatggacaggatgcactcggatctacgcaaggcgtccaaggccttgaatgacgggaagctcgtgaggatcatagctctgaaggatgaaatcgcgcgcctgaagaaggagaatgcgcagttgaagggtctccccattcccggaggagtccggatccgcaacacgccccgcaagtcgacgacggcacccgtgcgcattcagcttgcgcctaggaacccacctccgcctgcacctccagcagctcctccagttccgcccgcagtttcagaagttcccacagctcctgcagctccagctccagtcccagctcctgtcccagtgtcagctcccacgtccgctctctccttcgctcctgcatcagccgtcaggggtccagccagtggtaacgggggttggttgcctgctactcccagtggcagccacgaccacagcagtagcagttccagtggctcggagccgggcagcggcgagacgtatttgccagagtccaggagccactcagagggacctggcctcttcctccagatggtctacaccaggaatggtagccgtacaacaggcgagggcagcaacggcgaagagcgcaccgacggtgtgcatcccaacagcaactccggcaatggtccgccaccgctccccaaaaatctgacccttgcccaagtaatggctcatcagactcagatgatggcagccatgatgcagcagatgcaccagaggatgcagcagcaagccgagcagcagcagcagcagtttggtccccctcgccctcagtccaagttgccggagttcttacgtgtcaggccacccaccttctccagtaccaccaaccctatggaggcaaacgactggctccacgctatagagaagaagctcaatctcctacagtacaatgatcaggagaaggttgctttcgctacacaccagctccagggtcccgcgtcagcttggtgggacaatcacatggccacccgcccgctaggcacggaagtcacttgggcggagttctgtcgcagcttcaggaaggcgcaggtgcctgacggggttgtggcacagaagaagagggagttccgggcactccaccagggcaacaggacagtgataaagtatctccatgagttcaatcgcctagcgcgatatgcaccggaggatgtccgtactgacgccgagaagcaggagaaattcctagcaggcctggatgacgagctgaccaaccagctgatctctggagactacgccgattttgagaagctggttgacaaagcgatccgtcaggaggatcagcgcaacaaaatggacaggaagagaaaggcagcgcaattccggtccaaccaaggaagccacccgtgaccgcgcgtcacttccggacagcagagtggacctaccaccatgatcgtccgccagcaccgccctttcaactcgagcaacttccaccatggcaccagtggcagccagaaccaccatggaggtcagcccaatcgcagtgcagctccgcgcccaccaatggcaccagcacagtcagctccatctgcgcaagtcaagaaggagactggaacaaagccagggtcctgcttcaactgtggcgagcttggccacttcgctgacaaatgcccgaagccaaggcgtgctgggccaaggtttgtctaggctcgtgtcaaccacgcgtccgcagaggaggcgcaagcagcaccagaggtcgtactgggtacgttttctgtcaactcagtccctgctacagtactttttgattctggtgcaacacattctttcatttcaaagaagtttgtggggatgcatgggttaagaaaagaagagcttagtacaccaatgagggttcataccccaggaaatagttcaacctcggtcagttatagcccttcagtgctaatagaaattcaaagatcaccatttctagccaaccttatccttctcgaatccaaagacttagatgtcattcttgggatggattggctgaccaagttcaagagagtcattgattgtgcgaatcgcacagtcaccttgaccaatgagaagggagaaaccgtggtgtacaagtcaccggcctcaccaaagcagagaatctccttaaaccagattgaagtggaggaacctgtgaccaccgagcagaagagttcgccgaaattggaggatatccccatagtctgcgagtatcccgaagtgttccctgaagatctcactactatgccacccaagagagaatttgaattccggattgatttggcaccaggaactgccccaatttacaagaggccgtagagaatggcagccaacgagctagcagaggtcaagaagcaggttgatgagcagctgcagaaagggtacactcgaccaagtacttcaccttggggtgctccggtcatttttgtggagaagaaggataaagcaaagaggatgtgcgtcgattatcgcgcactcaatgaggtcacaatcaagaacaaatatcctttgccacggattgatgatttgttcaaccaactaaagggggctaaagtgttctctaaaatcgacctgcgatcaggttatcactagttgagaattcgggaagaggatattcccaagacggccttcaccactcgatatgggttgtacgagtgcatggttatgtctttcggacttaccaacgcacctgcattcttcatgaatctgatgaacaaagtgttcatggaatttctggacaagtttgttgtggtattcatcgacgacattcttatctattcaaagtccgaagaagaacatgagcaacatctccgtctggtactcgagaagttgaaggagcaccaattatatgccaagttcagcaagtttgacttttggctgttggaggtcaaattcttgggtcacgtcattacagctcagggcgtggcagtcgatccatcgaatgtggagtcagttaccaagtggaccccacctaagaccgtgtcatagattagaagttttcttggactcgcgggttattatcgtcggttcattgaaaatttctcaagcattgccagacctatgacccagttgcttaagaaagatgagaaatttaaatggacagctgagtttgacaagagttttgaggagctcaagaagaaattagtatccgctccagttctgattctgcccgaccaaagaaaagacttccaagtctattgcgacgcgtcccgccacggactcggatgtgttttagtgcaagaggcccgcgtttcgtcaagtgtgcagcagccccgtcgg

SEQ ID NO: 13782 - DNA, 4716 bp, Oryza sativa
  Clone ID: TFbOSC101121j.C1.o1.fg
atgggttgcaagatggccggtcacccacccaaccaccgcggagaaggcatgatcaactttgtggcagagttggcacgcatgacactggtggtgggctaccccaacgcgccagagtacacgacgattccaccgctcagtggcgagcttcctcaccgtgttcgcttggaggtccacggctacgtgggtacctgcctagctaacatggtggttgaggcatccggaggctcaacagatcacgcctgtcaggaggcagcatacctgatgatggctagactacgggagcgccacaactacatcttccacgacacggcgtaccgatttcaccctcgtcgagccagtggtgatgatatcagtaccttccgtccgacagccggcgagaacgacaccacctttagtcacatgtgtgctgtgatgaggggattggataggatgcactcggacctgcacaaggcgaccaaggccttgaacgatgggaagctcatgaggatcgtcactctgaaggacgagatagcgcgcctgaagagggagaatgctcagttaaagggtcttcccgcgccaggaggagtccggatccgcactacgcccgcaagacgacgacggcacccgtgcgcatccagcttgcgcccaggaacccacctccatcagcagctcccgcagcacctccagttccgcccgcagttcctgcagctccagctccagctcccgcgtccgctctctccttcgctccagcatcagccgccagaggtccagccagtggcaccggaagttggttgtctgctactcccagtggcagccgcgatctcagtagcagcagctccagtggctcacagtcaggcagcggcgagacttacctgccaggctccgggagtcgctcagaggtaccggatggtctacaccaggaatggtagccgcgcgacaggcgagggcagcaacggcgaagagcgcactgatggggcgcatccccacagcgattctggcaatggtccgccaccacttcccgagaatccgacgctagcccaagtaatggcacatcagacccagatgatggcagccatgatgcagcagatgcagcagcagcaccagcagatgcaccagcggatgctgcagcacgccgaacagcagcatcaacagtttggtccccctccccctcagtccaagttgcctgagttcctgcgtgtcaggccacccaccttttccagcaccaccaaccctatggaggcgaatgactggctccatgccatagagaagaagctgaatctcctgcagtgcaatgatcaggagaaggttgctttcgccacacaccagcttcaaggtcctgcgtcagcttggtgggacaatcacatggccacccgcccaccagatggggtcgtggcacaaaagaagagggaattccgggcgctccatcagggcaacaggactgtgacagagtacctccatgagttcaatcgcctcgcgcgatatgcaccagaggatgtccgcaccgacgccgagaagcaggaaaagttcatggcgggtctggatgacgagctgaccaaccaactgatatctggggactacgctgattttgagaggctggtggacaaggcaatccgtcaggaggatcaacgcaacaagatggacaggaagaggaaggccgcacagttcagggcacctcagggaagtcaccagaggccgcgcttcactcccggacagcagggtggacctaccaccatgatcgtccgccagtaccgcccgttcaatcctagcaactttcctcagggcgccagtggcagtcagaaccaccatggaggtcagcccaaccgcggtgcagctccacgcccaccaatggcaccggcacagtcaggcccgcccgcgcaagccaagaaggagactggagcaaaaccagggtcctgcttcaactgtggtgagcttggccacttcgctgacaaatgcccgaagcctaggcgtgctgggccaaggtttatccaggctcgtgtcaaccacgcatctgcggaggaggcacaagcagcaccagaggttgtactggacctagatgtcattcttgggatggattggctgaccaagtttaagggggtcatcgattgtgcgaatcacacagtcaccttgaccaacgagaagggagaaaccgtggtgtacaaatcactagtctcaccaaagcaaggggtctctttgaatcagattgagacggaaatcccagtcgacaccgtggagaaaaacttgaggaaattggaatatatacccatagtctgcgagtatccagaagtgttccccgaagacctcactaccatgccacccaagagagagattgaattccggattgacttggcaccgggaaccgctccaatttacaagagaccgtacagaatggcagccaacgaattagcagaggtcaagaagcaggttgatgagcagctgcagaaagggtacattcgaccaagtacttcaccttggggtgctccggtcatttttgtggagaaaaaggataagacgaagaggatgtgcgttgattattgcgcactcaacgaggtcaccatcaagaacaaatatcccttgctgcgaatcgatgatttgtttgatcaactgaaaggagctgaagtgttttctaagatagacctgcgatcaggctaccaccagttgagaattcaggaagaggatattccaaagacggccttcaccactcggtacgggctatatgagtgcacggttatgtctttcggacttaccaacgcacccgcattcttcatgaatctgatgaacaaagtattcatggaatttctggacaagtttgttgtggtgttcatcgacgacattcttatctactcaaaatccgaagaagaacatgagcaacatctccgtttggtactcgagaagttgaaggagcaccagctatacgccaagttcagcaagtgtgacttctggttgacggaagtcaaatttctgggccatgtcattacagctcagggtgtggcagttgatccgtcgaacttacttaagaaagatgagaagtttaaatggacagctgagtgcgataagagtattgaggagctcaagaagaaattagtatccgcaccagttttgattctgcccgaccagatgaaagacttccaagtctattgcgatgcatcccgccacggacttggatgtgtcctaatgcaagagggcagggtggttgcgtatgcctcgcggcagttgcgtccacacgaagggaattatccaactcatgacctggaattggcagcagtggttcatgctttgaagatctggaggcactatctgattggcaaccgctgcgaagtatatacggaccataagagtctgaaatacatcttcacccaaccggacctaaatctccgacaacgaagatggttggaactaatcaaagactatgacatgagtattcactaccacccgggtaaagccaatgtggtggcagacgcattaagccggaaaagttactgcactgccctatgcatcgagggcatgtgtgaggaattgcggcaggagtttgagcatctcaacgtgggaattgttgaacatggttttgtagccgctctggaggcacggcctacgctcgtggatcaagtcagagcagctcaagtaaatgattctgaaatagcagagctgaaaaagaacatgagagtcggaaaagcccgggatttccacgaagatgagcatggcacaatctggttgggagaaagattgtgtgtacctgacgacaaggaactgaaggatctgatactcaccgaggctcatcagacccagtactccattcatccaggcagcactaaaatgtatcaagacctcaaagaaaagttttggtgggcagagcaccaaagaccagcaggtttactccaacctcttcaaatcccggaatggaaatgggaggagattggaatggacattataacgggactgccccggacatcgtcaggtcacgattcgatctgggtagtcgtggatcgactcactaaggttgctcacttcataccagtacataccacatatacgggcaaaaggttggcggagctttacctttcgagaatcatgtgcctacatggagtacccaaaaagattgtatctgaccgagggagtcagttcacctcaaaattctggcagaagctgcaggaaaaattggggacccgtttaaatttcagcacggcctatcacccgcaaactgatggtcagaccgagcgggtcaatcaaatcttggaagatatgttgagagcttgcgctcttgattttggtggagcttgggacaaaaatttgccatatgcggaattctcgtacaacaacagctaccaggccagtctacagatggcaccgtttgaagctttatacggccggaagtgccgcacacctctcttctgggatcagacaggcgagcgtcaactgttcggaacagaggtattagcggaagcagaagagaaagtcagaatcatcagggaaaggttgaggattgcccagtctcgacagaagagctacgcggataaccgtcgaaggaagctcacttttgaggcaggagattacgtgtatcttcgtgtcactccgctccggggagtacaccgttttcagacgaaaggcaagttggcaccacgattcgtgggaccatacaaaatcctggaacgaaggggggaagttgcttatcagttagaacttccatccaacatgatcggcatccatgacgtgttccacgtgtcccaattaaagaagtgctaa

SEQ ID NO: 13783 - DNA, 4422 bp, Oryza sativa
  Clone ID: TFbOSC102114j.C1.o1.fg
atgtcgacgactgcacccgtgcgcatccaacttgcgcccaggaacccacctccgccagcagctcccgcagcacctccagttccgcccgcagttcctgcagctccagcaccagctccagctcccgttcacatgtccgctcccgcgtccgctctctccttcgctccagcatcagccgccaggggtccagccagtggcaacggaggttgcttgtttgggatggtctacaccaggaatggtagccgcgcaacaggcgagggcagcaacggcgaagagcgcactgagggtgtgcatcccaacagcaattccggcaatgttccgccaccacttcccgagaatccgacgctagcccaagtgatggcacatcagactcagatgatggcagccatgatgcaacagatgcagcagcagcaccagcagatgtaccagaggatgttgcagcacgccgaacagcagcaccagcagtttggtccccctccccctcagtccaagttgccagagtttctacgtgtcaggccacccaccttctccagcaccaccaaccctatggaggcgaatgactggctccatgccatagagaagaagctgaatctcctgcagtgcaatgatcaggagaaggttgctttcaccacacaccagcttcaaggtcctgcgtcagcttggtgggataatcacatggccacccgcccaccaggtactgaagtcacttgggcagagttctgccgtagcttcaggaaggcgcaggtgccagacggggtcgtggcacaaaagaagagggaatttcgggcactccatcaaggcaacaggactgtgacggagtatctccatgagttcaatcgcctcgcgcgatatgcacccgaggatgtccgtaccgacgccgagaagcaggaaaggttcatggcaggtctggatgatgagctgaccaaccaactgatatctggggactacgccgactttgagaggctagttgacaaggcaatccgtcaggaggatcaacgcaacaagatggacaggaagaggaaggccgctcagttcagggcacctcagggaagtcaccagaggccgcgcttcgctcccgggcagcagggtggacctaccaccatgatcgttcgccagtaccgcccgttccaccctagcaactttccccagggcgccagtggcagtcagaaccaccatggaggtcagcccaaccgcggtgcagctccacgcccaccaatggcaccggcacagtccggcccgtccgcgcaagccaggaaggagactggagcaaaaccagggtcttgcttcaactgtggcgagcttggccacttcgccgacaaatgcccgaagcctaggcgtgccgggccaaggtttatccaggctcgtgtcaaccacgcatctgcggaggaggcacaagcagcaccagaggttgtactgggtacgtttcctgttaactcaatccctacaacagtactttttgattctggtgcaacgcattcgttcatttcaaagaagtttgtcgggatgcatgggttaataagagaggaacttagcacaccaatgcggctgaccaagtttaagggagtcatcgattgtgtgaatcgcacagtcaccctgaccaacgagaagggagaaacggtagtgtacaaatcaccaaactcaccaaagcaaggggtctccttgaatcagattgaagcggaaatcccagtggtcaccatggagaagaatttgaggaaattggaagatatccccatagtctacgagtatccagaagtgttccccgaagacctcactaccatgccacccaagagagagattgaattccggattaacttggcaccgggaaccgctccaatttacaagagaccgtacagaatggcggccaacgaactagcagaggtcaagaagcaggttgatgagcagctgcagaaagggtacattcgaccaagtacttcaccttggggtgctccagtcatttttgtggagaaaaaggataagacgaagaggatgtgcgttgattatcgcgcactcaacgaggtcacaatcaagaacaaatatcctttgccacgaatcgatgatttgtttgatcaactgaaaggagctaaagtgttttctaagatagacctgcgatcagcctaccaccagttgataatccgggaagaggatattccaaagacggccttcaccactcgcaagtgtgacttctggttaacggaagtcaaatttctgggccatgtcattacagctcaaggtgtggcagttgatccatcgaacgtggagtcagttaccaaatggaccccaccgaagaccgtgtcgcagattcaaagttttcttggacttgcgggatattaccgccgattcatcgaaaacttctccaggatcgcccgacccatgactcagttgcttaagaaagatgagaagtttaaatggacagctgagtgcgataagagttttgaggagctcaaaaagaaattagtatccgcaccagttttgattctgcccgatcagatgaaagacttccaagtctattgcgatgcatcccgccacggacttggatgtgtcctaatgcaagagggcagggtggttgcgtatgcctcgcggcagttgcgtccacacgaagggaattatccaactcatgacctggaattggcagcagtggttcatgctttgaagatctggaggcactatctgattggcaaccgctgcgaagtatatacggaccataagaatctgaaatacatcttcacccaaccggacctaaatctccgacaacgaagatggttggaactaatcaaagattataacatgagcattcactaccacccgggtaaagccaatgtggtggcagacgcattaagcaggaaaagtcactgcactgccctgtgcatcgagggcatgtgtgaggaattgcggcaggactttgagcatctcaacatgggaattgttgaatacgggttcgtagccgctctggaggcacggcctacgctcgtggataaagtcagagtagctcaagtaaatgattctgaaatagcagagctgaaaaagaacatgagagtcggaaaagcccgggatttccacgaagatgagcatggcacaatctggttgggagaaagattgtgtgtacctgacgacaaggaactgaaggatctgatactcaccgaggctcatcagacccagtactccatccatccaggcagcaccaaaatgtatcaagacctcaaagaaaagttttggtgggtcagcatgaggagagaaatagctgaattcgtcgcactctgcgatgtttgccaacgagtgaaggcagagcaccaaagaccagcaggtttactccaacctcttcaaatcccggaatggaaatgggaggagattggaatggactttataataggactgccctggacatcatcgggtcacgattcaatctggatagtcatggatcgactcactaaggttgctcacttcataccagtacataccacgtatacgggcaaaaggttggcggagctctacctctcgagaatcatgtgtctacatagagtacccaaaaagattgtatctaaccgagggagtcagttcacctcaaaattctggcagaagctgcaggaagaattggggacccgtttaaatttcagcacggcctatcacccgcaaactgatggtcaaaccgagcgagtcaatcaaatcttggaagatatattgagagcttgcgctcttgattttggtggagcttgggacaaaagcttgccatatgcggaattctcgtacaacaacagctaccaggccagtctacagatggcaccgtttgaagctttatacggccggaagtgccgcacacccctcttctgggatcagacaggcgagcgtcaactgttcgggacagaggtattagcggaagcagaagagaaagtcagaatcatcaaggaaaggttgaggattgcccagtctcgacagaagagctacgcggataaccgtcgaagggagctcacttttgaggcaggggattacgtgtatcttcgtgtcactccgctccggggagtacaccgctttcagacgaaaggcaagttggtaccacgcttcgtgggaccatacaaaatcctggaacgaaggggggaagttgcttatcagttagaacttccatccaatatgatcggcatccatgacgtgttccacgtgtcccaattaaagaagtgcttaagggtacctgaagaacaggctgattcggaacacattgatttccaggaggacctaacatacgtggagaagccggttcatatacttgataccagcgaaagaagaaccagaaacaaggtcaccaggttttgccgagttcagtggagtcatcattcagaagaggaagcaacctgggaaagggaggatgagttgaaagccgcccatccgcacctcttcgccagctcctccgaatctcggggccaagattccgtttaa

SEQ ID NO: 13784 - DNA, 4488 bp, Oryza sativa
  Clone ID: TFbOSC102349j.C1.o22.fg
atggtctacaccaggaatggtagccgcgcaacaggcgagggcagcaacggcgaagagcgcactgatggggcgcatccccacagcgattccggcaatggtccgccaccacttcccgagaatccgacgctagcccatgtaatggcacatcagacccagatgatggcagccatgatgcaacagatgcagcagcaccagcagatgcaccagcggatgctgcagcacgccgaacagcagcatcagcagtttggtccccctccccctcagtccaagttgccagagtttctacgtgtcaggccacccaccttctccagcaccaccaaccatatggaggcgaatgactggctccatgccatagagaagaaactgaatctcctgcagtgcaatgaccaggagaaggttgctttcgccacacaccagcttcaaggtcctgcgtcagcttggtgggacaatcacatggccacccgcccaccaggtactgaagtcacttgggcagagttctgccgtagcttcaggaaggcgcaggtgccagacggggtcgtggcacaaaagaagagggaatttcgggcactccatcagggcaacgggactgtgacggagtacctccatgagttcaatcgtctcgcgcgatatgcacccgaggatgtccataccgacgccgagaagcaggaaaagttcatggcaggtctggatgatgagctgaccaaccaactgatatctggagactacgccgactttgagaggctagttgacaaggcaatccgtcaggaggatcaacgcaacaagatggacaggaagaggaaggccgctcagttcagggcacctcaggggagtcaccagaggccgcgcttcgcttccgggcagcagggtggacctaccaccatgatcgtccgccagtaccgcccgttcaaccctagcaactttccccagggcgccagaggcagtcagaaccaccatggaggtcagcccagccgcggtgcagctccacgcccaccaacggcaccggcacagtcaggcccgtccgcgcaagccaagaaggagactggaacaaaaccagggtcttgcttcaactgtggcgagcttggccacttcgctgacaaatgcccaaagcctaggcgtgccgggacaaggtttatccaggctcgtgtcaaccacgcgtccgcggaggaggctcaagcagcaccagaggttgtactgggtacgtttcctgttaactcaatccctgcaacagtactttttgattctggtgcaacgcattcgttcatttcaaagaagtttgtcgagatgcatgggttaataagagaggaacttagcacaccgatgcgggttcataccccagggaatagctccacttcggttcaattcagcccttctataacaatagaaattcaaggatcaccatttctagccaacctcattcttctcgaatccaaagacctagatgtcattcttgggatggattggctgaccaagtttaagggagtcatcgattgtgcgaatcgtaccgtcaccttgaccaacgagaagggagaaacggtagtgtacgaatcaccagacgcaccaaagcgaggggtctctttgaatcagattgaagcggaaatcccagtggacactgtggagaagaacttgaggaaattggaagatatacccatagtctgcgagtatccagaagtattccccgaagacctcactaccattgcacccaagagagagattgaattccggattgacttggcaccgggaaccgctccaatttataagagaccgtacagaatggcggctaacgaattagccgaggtcaagaagcagaaaaaggataagacgaagaggatgtgcgttgattatcgtgcactcaacgaggtcacaatcaagaacaaatatcctttgccgcgaatcgatgatttgtttgatcaactgaaaggagctaaagtgttttctaagatagacctgcgatcaagctaccaccagttgagaattcgggaggaggatattccaaagacggccttcaccactcggtacggattatatgagtgcacggttatgtcgttcggacttaccaacgcacccgcattcttcatgaatctgatgaacaaagtgttcatgaaatttctggacaagtttgttgtggtattcatcgacgacatacttatctattcaaagtccaaagaagaacatgagcaacatctccgcctggtactcgagaagttgaaggagcaccagctatacgccaagttcagcaagtgtgacttctggttgacggaagtcaaatttttgggccatgtcattacagctcagggtgtggcagttgacccatcaaacgtagagtcagttaccaaatggaccccaccgaagaccgtgtcgcagattcgaagttttctaggactggcaggttattaccgccgattcatcgaaaacttctccagaatcgcccgacccatgactcagttgcttaagaaagatgagaagtttaaatggacagttgagtgcgataagagttttgaggagctcaagaagaaattagtatccgcaccagttttaattctgcccgaccagatgaaagacttccaagtctattgcgatgcatcccgtcacggacttggatgtgtcctaatgcaagagggcaaagtggttgcgtatgcctcgcggcagttgcgtccacatgaagggaattatccaactcatgacctggaattggcagcagtggttcatgctttgaagatctggaggcactatctgattggcaaccgctgcaaagtatatacggaccataagagtctgaaatacatcttcacccaaccggacctaaatctccgacaacgaagatggttggaactaatcaaagactatgacatgagcattcactaccacccgggtaaagccaatgtggtggcagacgcgttaagcaggaaaagttactgcactgccctatgcatcgagagcatgtgtgaagaattgcggcaggagtttgagcatctcaacgtgggaattgttgaacacgggttcgtagccgctctggaggcacggcctatgctcgtggatcaagtcagagcagctcaagtaaatgattctgaaatagcagagctgaaaaagaacatgagggtcggaaaagcccgagatttccacgaagatgagcatggcacaatctggttgggagaaagattgtgtgtacctgacgacaaggaactgaaggatctaatactcaccgaggctcatcaggcccagtactccattcatccaggcagcaccaaaatgtatcaagacctcaaagaaaagttttggtgggtcagcatgagcaaagaaatagctgaattcgtcgcactctgcgatgtttgccaacgagtgaaggcagagcaccaaagaccagcaggtttactccaacctcttcaaatcccggaatggaaatgggaggagattggaatggactttataacaggactgccccggacatcatcgggtcacgattcaatctgggtagtcgtggatcgactcactaaggttgctcacttcataccagtacataccacgtatacgggcaaaaggttggcggagctctatctctcgagaatcatgtgtctacatggagtacccaaaaagattgtatctgaccgagggagtcagttcacctcaaaattctggcagaagctgcaggaagaattggggacccgtttaaatttcagcacggcctatcacccgcaaactgatggtcagaccgagcgagtcaatcaaatcttggaagatatgttgagagcttgcgctcttgattttggtggagcttgggacaaaagcttgccatatacggaattctcgtacaacaacagctaccaggccagtctacaggtggcaccgtttgaagctttatacggccggaagtgccgcacacctctcttctgggagcagacaggcgagcgtcaactgttcgggacagaggtattagcggaagcagaagagaaagtcagaacaatcagggaaaggttgaggattgcccagtctcgacagaaaagttacgcggataaccgccgaagggagctcatttttgaagcaggggattacgtgtatcttcgtgtcactccgctctggggagtacaccgttttcagacgaaaggcaagttggtaccacgcttcgtgggaccatacaaaatcctggaacgaaggggggaagttgcttatcagctagaacttccatccaatatgatcggcatccatgacgtgttccacgtgtcccaattaaagaagtgcttaagggtacctgaagaacaggctgattcggaacacattgatatccaggaggacctaacatacgtggagaagccggttcgtatacttgataccagcgaaagaagaaccagaaacaaggtcaccaagttttgccgaattcagtggagtcatcactcaaaagaggaagcaacctgggaaagggaggatgagttgaaagccgcccatctgcacctcttcaccagctcctccgaatctcggggccgagattccgtttaa

SEQ ID NO: 13785 - DNA, 4220 bp, Oryza sativa
  Clone ID: TFbOSC11733j.C1.o1.gm
atggtggttgaggcatccggaggcacagcagatcacgcctgtcaggaggcagcatacctgatgatggccagattacgggagcgccacaactacatcttctgcaacacggcgtaccggtttcaccctcgtcaagcaagtggcgacgacgtcagcaccttccgttcgacagccggcgagaacgacaccacctttggtcatatgtgtgccgtgatgaggggaatggacaggatgcactcggatctgcgcaaggcatccagggccttgaatgacgggaagctcgtgaggatcatagctctgaaggatgagatcgcacgcctgaagaaggatgagatcgcacgcctaaagaaggagaatgctcagttgaagaatccgcaacacgccccgcaagtcgacgacggcacccctccagctccagtcccagctcctgtcccagtgtcagctcccgcgtccgctctctccttcgctccagcattagccgccaggggtccagccagtggcaacgggggttggttgcctgctactcccagtggcagccgcgaccacagcagcagcagttccagtggctcggagccgggcagcggcgagatgtatctgccaaactccaggagccgctcagagggacgtggtgacgagcaggaggacgccctcgactccaccgaccgcaggagccgttccgagtctgttcgcttggggatggtctacaccaggaatggtagccgtacagcaggcgagggcagcaacggcgaagaacgcattgatggtgtgcatcccaacagcgactccggcaatggtccgccactgctccccgagaatccgactctggcccaatccaaactgccggagtttctacacgtcaggccacccaccttctctagcaccaccaaccccatggaggcgaatgactggctccatgccattgagaagaagctaaatctcctgcagtgcaatgatcaggagaaggtcgccttcgccacacaccagctccagggtcccgcgtcagcttggtgggacaatcacatggctacccgcccgccaggcacggaagtcacttgggcggagttctgtcgcaacttcaggaaggcgcaggtgccagacggggttgtggcacagaagaaaagggagttccaggcactccaccagggcaacaggacagtgactgagtatctccatgagttcaatcggctagcgcgatatgcatcggaggatgtccgcactgacgccgagaagcaggagaaattcctagcaggcctagatgacgagctgaccaaccagttaatctctggaggctacgccgattttgagaagctggttgacaaagcaatccatcaggaggatcagtgcaacaaaatggacaggaagagaaaggcagcgcaattccggtccaaccaaggaagccacccgcgaccgcgcttcactcccagacagcaaagtggacctaccaccatgatcgtccgccagcaccgccctttcaactcgagcagcttccaccagggcgccagtggcagccagaaccaccatggaggtcagcccaaccgcagagcagctccgcgcccaccaataacaccagcacagtcagctccatccgcccaagccaagaaggagactggaacaaagccagggtcctgcttcaactgtggcgagcttggccactttgctgacaaatgcccgaagccaaggcgtgtcgggccaaggtttgtccaggctcgtgacaaccacgcgtccgcagaggaggcgcgagcagcaccagaggttgtactggtcaccttgaccaatgagaagggagagaccgtggtgtacatgtcaccagtctcaccaaagcagagaatctccttaaaccagattgaagtggaaaaccctgtgaccaccgagcagaagggtttgcagaaattggaggatatccccatagtctgcgagtatcccgaagtgttccttgaagacctcactaccatgccacccaagagagaacttgaattccggattgatttggcaccaggaactgccccaatttacaagaaaccgtacagaatggcaaccaacaagctagcacaggtcaagaagcaggttgatgagcagctgcagaaagggtacattcgaccaagtactttaccttggggtgctccggtcatttttgtggagaagaaggataagacgaaaagaatgtgcgtcgattatcgcgcactcaatgaggtcacaatcaagaacaaatatcctttgccgcggattgatgatttgttcgaccaactaaaaggggctaaagtgttttctaaaatcgacctgcgatcaggctatcaccagttgagaatccgggaagaggatattcccaagacagccttcaccactcgatatgggttgtacgagtgcacggtgatgtcttttagacttaccaatgcacccgcattcttcatgaacctgatgaacaaagtgttcatggaatttctggataagtttgtggtggaacaccagttatatgccaagttcagtaaatgcgacttttggctattggaagtcaaattcttgggtcacgtcattacagctcagtgcgtggcaatcgatccgtcgaatgtggagtcagttaccaagtggaccccacctaagaccgtgtcacagattagaagttttcttggactcgcggctgagtgtgaccagagttttgagaagctcaaaaagaaattagtaaccgccccagttctgattctgcccgaccagactaaagacttccaagtctactacgacgcgtcccgccacgggcttggatgtgttctaatgcaagagggcagagtggtcgcttatgcctcgcggcagttgcgtccacatgaagggaactatccaactcatgacctggaattggcagcggtggtacatgctttgaagatctggaggcactatctgattggcaaccgttgcgaagtatatacggatcacaagagtctgaagaagagctactgcaatgccctatgcaccgagggcatgtgtaaagaattgcagcaggagcttgaacacctcaacttggggcttgtagaatacgggtacgtggctgtcctcgaggcacgacctacactcgtggatcaagtcagagcagctcaagtaaatgatcctgaaatagcagagctgaaaaagaacatgagggtcggaaaagcccaggattttcacgaagatgaacacggcacaatctggtttggagaaagattatgtgtaccggacgataaggaactaaaggatttgatactcaccgaggctcatcagactcagtactccattcatccaggcagcaccaaaatgtaccaagacctcaaagaaaagttctggtttactccagcctcttcagatcccggaatggaaatgggaggagattggaatggactttataacaggactgccctggacatcatctggccacgattcaatctagaagagaaagttagaaccgtcagagagaggttgagaattgcccagtctcgacagaagagctatgcggacaaccgccgaagggaactcacttttgaagcaggggattacatgtatctccgtgttactccgctccggggagtacaccgtttccagacaaaaggtaagttggcaccacgcttcgtgggaccatacaaaatcttggaacgaagaggagaagtggcttatcagctagaacttccatccaacatgatcggtatccatgacgtgttccacgtgtcccagttaaagaagtgtctaagggtactcgaagaacaagccgattcggagcacattgacatccaagaagatctgacctacgtggagaagccagttcgtatccttgagaccaccggcgccgacgcgctccacaaccaccgccgcgcccacgttcccgccttctccgggccacgtcagccacgccagcgcatgcgccgtgtcttccgcacctactccccctccctgtcgcacgcgcccgcgcccgagacggccgggattcgaaatttcgaatcccacctctctctcctcctccacctccccaccaccaccgccaccccttctctctttttccccatctcgtcgagccctcccgagccctctaacgccctagcgccatcgcccttctttttgacgacgacgccaccgttccggtcgtcagtagccgacacgccgagccgcgccgacaacgccgtcgcgttcgccgtcgtgcgggccaccccggtcacccctttttcgttggatcccgccgccggaacccaacttcgggccggtcaccg

SEQ ID NO: 13786 - DNA, 3693 bp, Oryza sativa
  Clone ID: TFbOSC12096j.C1.o12.fg
atggaggcgaatgactggctccatgccatagagaagaagctgaatctcctgcagtgcaatgatcaggagaaggttgctttcgccacacaccagcttcaaggtcctgcgtcagcttggtgggacaatcacatggccacccgcccgccaggcactgaagtcacttgggcggagttctgtcgtagcttcaggaaggcgcaggtgccagacggggtcgtggcacaaaagaagaggaaattccgggcactccatcagggaaacaggacagtgaccgagtacctccatgagttcaatcgcctcgcgcgatatgcatcggaggatgtccgcactgacgccgagaagcaggaaaagttcatggcaggtctggatgacgagctgaccaaccaactgatatctggggactacgcggattttgaaaggctggtggacaaggcaatctgtcaggaggatcagcgaaataaaatggacaggaagagaaaggcggcacagttccggtccaaccaaggaaaccatcagcgaccgcgcttcgctcccgggcagcagggtggacctaccaccatgatcgtccgccagtaccgcccgttcaactctagcaacttccaccagggcgccagtggcagtcagaaccaccatggaggtcagcccaaccgcggtgcagctccacgcccaccagtggcaccggcacagtcaggcccgtccgcgcaagccaagaaggagactggaacaaaaccagggtcttgcttcaactgtggcgagcttggccactttgctgacaaatgcccgaagcccaggcgtgccgggccaaggtttgtccaggctcgtgtcaaccacgcgtctgcagaggaggcgcaagcagaaccaaaggtcgtactgggtacatttcctgttaactcaatccctgcaatagtactttttgattccggtgcaacgcattctttcatttcaaagaaatttgtggggatgcatgggttaaggaaagaagagcttaatacaccaatgagggttcataccccgggaaatagttcaacctcggtcagttttagcccttcagtgctaatagaaatccaaagatcaccatttctagccaacctcattcttcctgaatccaaagacctagatgtcattcttgggatggattggctgaccaagatcaagggagtcattgattgtgcgaatcgcacagtcaccttgaccaacgagaagggagaaaccgtagtgtacaaatcactagtctcaccaaagcaaggggtctccttgaatcagattgaggcggaaatcccagtggtcacgaaggagaagaatccgaggaaattggaagagattcccatagtttgcgagtacccagaagtctttcctgaagacctcactaccatgccacccaagcgagagattgaattccgaattgatttggcaccgggaaccgcgccaatttacaagagaccgtacaggatggcggccaacgaactagcagaggtcaagaagcaggttgatgagcagctgcagaaagggtacattcgaccaagtacttcaccttggggtgctccggtcatttttgtggagaaaaaggataagacgaagaggatgtgcgttgattatcgcgcactcaatgagtttgttgtcgttttcatcgacgacatacttatctattcaaagtctgaagaagaacatgagcagcatctccgtctggtactcgagaagttgaaggagcaccagctatacgccaagttcagcaagtgtgacttctggttgacggaagtcaaacttctgggccatgtcattacagctcagggtgtggcagttgatccatcaaacgtggagttagttaccaaatggaccccactgaagaccgtgtcgcagattcgaagttttcttggactcgcagatgaaagacttccaagtctattgcgatgcatcccgccacggacttggatgtgtcctaatgcaagagggcagagtggttgcgtatgctcgcggcagttgcgtccacacgaagggaattatccaactcatgacctggaattggcagcagtggttcatgctttgaagatctggaggcactatctgattggcaaccgctgtgaagtatatacggatcacaagagtctgaaatacatattcacccaaccggacctaaatctccgacaacgaagatggttggaattaatcaaagactatgatatgagcattcactaccacccggggaaagccaatatggtggcagacacattaagcaggaagagttactgcactgccctatgcatcgagggcatgtgtgaggaattgcggcaggagtttgagcatctcaacgtgggaattgttgaacacgggttcgtagccactctggatgcacggcctacgctcgtggatcaagtcagagcagctcaagaactgaaggatctgatactcaccgaggctcatcagacccagtactccattcatccaggcagcaccaaaatgtatcaagacctcaaagaaaagttttggtgggtcagcatgaggagagaaatagctgaattcgtcgcactctgcgatgtttgccaacgagtgaaggcagagcaccaaagactagcaggtttactccaacctcttcaaatcccggaatggaaatgggaggagattggaatggactttataacaggactgccccggacatcatctggtcacgattcaatctgggtagtcgtggatcgactgactaaggtttctcacttcataccagtacataccacgtatacgggcaaaaggttggtggagctctacctctcgagaatcatgtgtctacatggagtacccaaaaagattgtaactgatcgagggagtcagttcacctcaaaattctggcagaagctgcaggaagaattggggacccgtttaaatttcagcacggcctatcacccgcaaactgatggtcagaccaagcgagtcaatcaaatcttggaagatatgttgagagctagcgctcttgattttggtggagcttgggacaaaagcttgccatatgcggaattctcgtacaacaacagctaccaggctagtctacagatggcaccgtttaaagctttatacgaccggaagtgccgcacacctctcttctgggatcagataggcgagcatcaactattcgggacagaggtattagcggaagcagaagagaaagtcagaaccatcagggaaaggttgaggattgcccagtctcgacagaagagctacgcggataaccgccgaagggagctcacttttgaagcaggggattacgtgtatcttcgtgtcactccgctccggcgagtacaccgttttcagacgaaaggcaagttggcaccacgcttcgtgggaccatacaaaatcttggaacgaaggggggaagttgcttatcagctagaacttccatccaatatgatcggcatccatgacgtgttccacgtgtcccaattaaagaagtgcttaagagtacccaaagaacaagctgattcggagcatattgatatccaggaggacctgacatatgtggagaagccggttcatatacttgataccagcaaaagaagaaccagaaacaaggtcaccaggttttgccgagttcagtggagtcaccattcagaggaggaagcaacctgggaaagggaagatgagttgaaagctgcccatccgcacctcttcaccagctcctccgaatctcggggccgagattccgtttaa

SEQ ID NO: 13787 - DNA, 177 bp, Oryza sativa
  Clone ID: TFbOSC12096j.C1.o15.gm
atggcgatcgatggtttcccggtgatccgcttgccagaaaacaaggcgggggcaatggtgcgggaataccactccacaggcaccctcgacggcacggacgaagcctactcctcggagaacccgccatcggacacatactcgcactctggggttggggaaaaaatagagcaagactga

SEQ ID NO: 13788 - DNA, 4044 bp, Oryza sativa
  Clone ID: TFbOSC12919j.C1.o2.gm
atggtttacaccaggactggcaaccgcacgacaggcgagggcagcaacggcgaagaacgcgtggatggtgtgcaccccaacagtgattctggcaatggtccgccaccacttcccgagaatccgacccttgcccaagttatggcacatcagactcagatgatggcagccatgatgcagcagatgcagcagcagcaccagcagatgcaccagaggatgatgcagcacgccgaacagcagcaccagcagtttggtccccctccccctcagtccaagttgccggagtttctacgtgtcaggccacccaccttctccagcaccaccaaccctatggaggcaaatgactggctccatgcgatagagaagaagctgaatctcctgcagtgcaatgatcaggagaaggtcgctttcgccacacaccagcttcagggtcccgcgtcagcttggtgggacaaccacatggccacccgcccaccgggtactgaagtcacgtgggcagagttctgccgtagcttcaggaaggcacaggtgccagacggggtcgtggcacaaaagaagagggaattccgggcgctccatcagggcaacaggactgtgacagagtacctccatgagttcaatcgcctcgcgcgatatgcaccagaggatgtccgcaccgacgccgagaagcaggagaagttcatggcgggtctggatgacgagctgaccaaccaactgatatctggggactacgccgactttgagaggctggttgacaaggcaatccgccaggagaatcaacgcaacaagatggacaggaagaggaaggccgctcagttcagggcaccccaggaaagtcaccagaggtcgcgcttcactcccgggcaacagggtggacctaccaccatgattgttcgtcaacaccgcccgttcaaccccagcaacttccaccagggctccagtggcagccagaatcaccatggaagtcagcccaaccgcggtacagctccacgcccaccgatggcaccggcacagtcaggccagcccgcacaagccaagaaggagacgggagcaaaaccagggtcctgcttcaactgtggcgagcttggccacttcgctgacaaatgcccgaagcccaggcgtgccggaccaaggtttatccaggctcgtgtcaaccacgcatctgcggaggaggcacaagcagcaccagaggtcgtactggtcaccctgaccaatgagaaaggagaaaccgtggtgtacaaatctctagtctcgccaaagaaaggagcctcgttgaatcagattgagacggaaatcccagtggacgccgaagagaagaacttgagaaaattggaggacatacccatagtctgcgagtatccagaggtgttccccgaagacctcaccaccatgccacccaagagggagattgaattccggattgatttggcaccaggaaccgctccaatctataagagaccgtacagaatggcggccaacgaattagcggaggtcaagaagcaagttgatgaacagctgcagaaagggtacatacgaccaagcacttcaccttggggcgctccggtcatttttgtggagaaaaaggataagacaaagaggatgtgcgtcgattatcgcgcacttaacgaggtcacaatcaagaataaatatcctttgccgcgaatcgacgatttatttgatcaactgaaaggagctaaagtgttctctaagatagacctgcgatcaggctaccaccagttgagaatccgggaagaggatattccgaagacggccttcaccactcggtacgggctatatgagtgcacggttatgtccttcggacttactaacgcacccgcattcttcatgaatctgatgaacaaagtgttcatggaatttctggacaagtttgttgtggtattcatcgacgacattcttatctattcaaagtccgaggaagaacatgaacaacatctccgtctagtactcgagaagttgaaggagcaccagctatacgccaagttcagcaagtgtgacttctggttgacggaagtcaaatttctgggccatgtcattacagctcagggtgtagcagttgatccatcgaacgtggagtcagttaccaagtggaccccaccgaagacagtgtcgcagattcgaagttttctaggactggctggttattaccgtcgtttcatcgaaaacttctcaagaatcgcccgacccatgactcagttgcttaagaaagacgagaagtttaaatggacagctgagtgcgacaagagctttgaggagctcaaaaggaaattagtatccgcaccggttttgatcctgcccgaccagacgaaagacttccaagtctattgcgatgcatcccgtcacggacttggatgtgtcctaatgcaagagggcagagtggttgcatatgcctcgcggcagttgcgtccacacgaaggaaattatccaactcatgacttggaattggcagcagtggtccatgctttgaagatctggaggcactatctgatcggcaaccgctgcgaagtatatacggaccataaaagtctgaaatacatcttcacccaaccagacctaaaccttcgacaacgaagatggttggaactaatcaaagactatgacatgagtattcactaccacccgggtaaagccaatgtggtggcagacgctttaagccggaaaagttactgcactgctctatgcatcgagggcatgtgtgaggaattgcgacaggagcttgaacatctcaacatgggaattgttgaacacgggttcgtagccgctctggaggcacggcctacgctcgtggatcaagttagagccgctcaagtaaatgatccggaaatagcagaactgaaaaagaacatgagagtcggaaaggctcgggatttccttgaggatgagcatggcacaatctggatgggagaaagattgtgtgtaccggacgacaaggaattgaaggatctgatactcaccgaagctcatcagacccagtactccattcatccaggcagcactaaaatgtatcaagacctcaaggaaaaattttggtgggtcagcatgaggagagaaatagctgaattcgtcgcactctgcgatgtttgccaacgagtgaaagcagagcaccaaagaccagcaggtttactccaacctcttcaaatcccggaatggaaatgggaggagattggaatggactttataacaggactgccccggacatcatcgggtcacgattcaatctgggaagaattggggacccgtttaaacttcagcacggcctatcacccgcaaactgatggtcagaccgagcgtgtcaatcaaatcttggaggatatgttgagagcttgcgctcttgattttggtggagcctgggacaaaagcttaccatatgcggaattctcgtataacaacagctaccaggccagtttacagatggcaccgtttgaagctctatacggccggaagtgccgcacacctcttttctgggatcagacaggcgaacgtcaactgttcggaacagaagtattagcgggagcagaagagaaagtcagaatcatcagggagagattgaggattgctcagtctcgacagaagagctacgcggataaccgtcgaagggagctaacttttgaggccggagactacgtgtatcttcgtgtcactccgctccggggagtacaccgtttccagacgaaaggcaagttggcaccacgcttcgtgggaccatacagaatcttggaacgaaggggagaagttgcttatcagctagaacttccatccaatatgatcggcatccatgacgtgttccacgtgtcccaattaaagaagtgtttaagggtacctgaagaacaggctgattcggaacacatcgatatccaggaggacctgacatatgtggagaagccggaggttccggagctcgtcccgccgtcgtcgtcgtcctccgtcggccgccgtcgtcgaccgttgtcgccgccgctccccgccgccggtcggtcgccgtcggtcgccgccttgcgccgctgccgcatgcgcgccgccgccgtgtga

SEQ ID NO: 13789 - DNA, 3342 bp, Oryza sativa
  Clone ID: TFbOSC13101j.C1.o3.fg
atggccatacgtccgccaggcatggaagtcacttgggcggagttctgtcgcagcttcaggaaggcgcaggtgccagatggggtcgtggcacaaaagaagagggaattccgggcactccaccagggcaacaggacagtgacggagtatctccatgagttcaatcgcctcgcgcgatatgcaccggaggatgtccgaactgacgcagagaagcaggaaaagttcctggcaggtctggatgacgagctaaccaaccagctgatatcgggaggctacaccgactttgagaggctggttgacaaggcaatccgtcaggaggatcagcgcaataaaatggacaggaagaggaaggtggcgcagttctggtccaaccaagggagccaccagcgaccgcgcttcactcccggacaacagggtggacctaccaccatgatcgtccgccagcaccgccctttcaatgccagcaacttccatcagggtgccagtagcagccagaaccaccatggaggtcagcccaaccgcggtgcagctccacgcccaccaatgcaaccagcacagtcagctccatccgcgcaagccaagaaggagactggagcaaagccagggtcctgcttcaactgtggtgagcttggccacttcgctgacaaatgcccgaagcctaagcgtgccgggccaagttttagcccttcagtgctaatagaaattcaaagatcaccatttctagccaacctcattcttcttgaatccaaagacctagatgtcattctggggatggattggctgaccaagttcaagggagtcattgattgtgcgaatcgcacagtcaccttgaccaacgagaagggagaaacagtagtgtacaaatcactagtctcaccaaaacaaggggtctccttgaatcagattgaggtggaaatcccagtggtcaccgaggagaggaattcgaggaagttggaagagattcccatagtctgcgagtacccagaagtgtttcctgaagacctcactaccaagccacccaagagggagattgagttccggattgatttggcaccgggaaccgctccaatctacaagagaccatacaggatggcagccaatgaactagcagaggtcaagaagcaggttgatgagcaactgcagaaaaggtacattcgaccaagtacttcaccttggggtgctccggtcatttttgtggagaaaaaggataagacgaagaggatgtgcgtcgattatcgcgcactcaacgaggtcacaatcaagaacaaatatcctttaccacggatcgatgatttgtttgatcaactgaagggagctaagctaagaattcgggaagaggatattccaaagacggccttcaccactcggtacgggctgtatgagtgcacggttatgtctttcggacttaccaacgcacccgtattcttcatgaatctgatgaacaaagtgttcatggaatttcttgacaagtttgttgcggtattcatcgacgacatacttatctattcaaagtccgaagaagaacatgagcaacatctccgtctggtactcgagaagttaaaggagcaccagttatatgccaaattcagcaagtgtgacttctggttgtcggaagtcaagtttctgggtcacgtgattacagctcaaggcgtggcagttgatccagcaaatgtggagtcagttaccaaatggaccccacctaagaccgtgtcgcaaattcggagttttcttggacttcaaggttattaccgccgattcatcgaaaacttctccaggattgcccgacccatgactcagttgcttaagaaagatgagaagtttaaatggatagccgagtgcgacaagaattttgaggagctcaaaaagaaattagtgtccgcaccggttttggtcctgcccaatcagatgaaagacttccaagtctattgcgacgcatctcgccatgggcttgaatggaattatccaactcatgacctggaattggcagcagtggttcatgctttgaagatctggaggcattatctgattggcaaccgctgcgaagtatatacagaccacaagagtctgaaatacatcttcacccaaccggacctaaatctccgacaacgaagatggttggaactaatcaaagactacgacatgagcattcactaccacccgggtaaagccaatgtggtggcagatgcgctaagcaggaaaagctactgcaatgccctatgcatcgagggcatgtgtgaagaattgcagcaggagcttgagcgtctcaaagtgggaattgttgaacacgggttcgtagccgctctggaagcacggcctacgctcgtggatcaggttagagccgctcaagtaaatgaccctgaaatagctgaattgaaaaagaatatgagggttggaaaagcccgggacttccttgaggatgagcacggcacaatttggatgggagaaagattgtgtgtacctgatgacaaggaattgaaggatctgatactcaccgaggctcatcagacacagtattccattcacccaggcagcaccaaaatgtaccaagacctcaaagaaaagttttggtgggacagcatgagaagagaaatagctgaattcatcgcactctgcgacgtttgccaacgagtgaaggcagagcaccaaaggccagcaggtttactccaacctcttcaaatcccggaatggaaatgggaggaaattggaatggattttatagctggactgccgcagacatcatcgggtcacgattcaatctgggtagtcgtggaccgactcactaaggtagctcacttcataccagtgcataccacctatacgggaaagaaattggcagagttgtacctgggaaggatcatgtgtctgcatggggtacccagaaagataatatctgatcgagggagccaattcacttcaaagttctggcagaaattgcaaaaagaattggggacccgtttaaatttcagtacagcctaccatctgcggacagatggccagactgagagggtcaatcagattttggaggatatgctgcgagcttgtgcacttgactttggtggagcatgggataagagcctgccatatgcggaattctcgtacaacaatagttaccaggttagtctccaaatggcaccatttgaagctttatacggccggaagtgtcgcacccctctcttctgggatcagacaggtgagcgtcaactgtttggaacagaggtgttaacggaagcagaagagaaagtcagaaccatcagggaaaggttgagaattgcccagtctcgacagaagagctacacggataaccgccgaagggagctcactttcgaagcaggagattatgtgtaa

SEQ ID NO: 13790 - DNA, 5339 bp, Oryza sativa
  Clone ID: TFbOSC13598j.C1.o1.np
atggccggtcacccacccaaccaccgcggagaaggcatgatcgacttcgtggcagagctggcacgcatgacactggtggtgggctaccccaatgcgccggagtacacgaccatcccaccgctcagtggcgagcttcctcaccgtgtccgcttggaggtccatggctacgtggggacttgcctcgctaacatggcggttgaggcgtcaggaggcacagcagatcatgcctgtcaggaggcagcctacttgatgatggccaggttacgggagcgccacgactacatcttccacgacacggcgtaccgctaccacccccgtcgagcccatggtgatggcgtcagctccttccgtccgacagctggcgagaacgacaccaccttcggtcacatgtgtgctgtgatgaggggattggaccggatgcactcggacctgcacaaggcgaccaaggccttgaatgatgggaagctcatgaggatcgtcgctctgaaggacgagatagcgcgcctgaagaaagagaatgctcagttgaagggtcttccagcaccaggaggagtccggatccgcactacgccccgtaagaggacgactgcacccgtgcgcatccagcttgcgcccaggaacccacctccagcagcagcagctccggcagttcctccagctccagctccagctccagctccagctccagctcccgctcccgcgttcactctctccttcgctccagcatcagccgccagaggaccagccagtggtaccggaggttgtcccctccagatggtctacaccaggactggtagccgcgcaacaggcgagggcagcaacggtgaagaacgcgctgatggtgtgcaccccaacagtgagtccggcaatggtccgccaccacttcccgagaatccgacgcttgcccaagttatggcacatcaaactcagatgatggcagccatgatgcagcagatgcagcagcagcaccagcagatgcaccagaggatgatgcagcacgccgaacagcagcatcaacagtttggtccccctccccctcagtccaagttgccggagtttctacgtgtcaggctacccaccttctccagcaccaccaaccctatggaggcaaatgactggctccatgcgatagagaagaagctgaatctcctgcagtgcaatgatcaggagaaggtcgctttcgccacacaccagcttcagggtcctgcgtcagcttggtgggacaaccacatggccacccgcccaccgggtactgaagtcacatgggcagagttctgccgtagcttcaggaaggcacaggtgccagatggggtcgtggcacaaaagaagagggaattccgggcgctccatcagggtaacaggactgtgacagagtacctccatgagttcaatcgcctcgcgcgatatgcaccagaggatgtccgcaccgacgccgagaagcaggagaagttcatggcgggtttggatgatgagctgaccaaccaactgatatctggggactacgttgactttgagaggctggtcgacaaggcaatccgccaggaggatcaacgcaacaagatggacaggaagaggaaggccgctcagttcagggcaccccagggaagtcaccagaggccgcgcttcactcccgggcaacagggtggacctaccaccatgatcgtccgtcagcaccgcccgttcaaccctagcaacttccaccagggcactagtggcagtcagaaccaccatggaagtcagcccaaccgcggtacagctccacgcccaccaatggcaccggcacagtcaggccagcccgcacaagccaagaaggagacgggagcaaaaccagggtcctgcttcaactgtggcgagcttggccacttcgctgacaaatgcccgaagcccaggcgtgccgggccaaggtttatccaggctcgtgtcaaccacgcgtctgcggaggaggcacaagcagcaccagaggtcgtactgggtacgtttcctgttaactcaatccctgcaacagtactttttgattctggtgcaacgcattctttcatctcaaagaaatttgtcgggatgcatgggttaataagagaggaacttagcacaccgatgcgggttcataccccagggaatagctccacttcggttcaattcagcccttctataacaatagaaattcaaaggtcaccatttctagccaacctcattcttctcgaatccaaagacctagatgtcattcttgggatggattggctgaccaagttcaagggagtcatcgattgtgcgagtcgcacagtcaccttgaccaacgagaagggagaaaccgtggtgtacaaatctctagtctcgccaaagaaaggggtctcgttgaatcagattgagacggaaatcccagtggacaccgtagagaagaacttgagaaaattggaagatatacccatagtctgcgagtatccggaagtgtttcctgaagacctcactaccatgccacccaagagagagattgaattccggattgacttggcaccgggaaccgctccaatttacaagagaccatacaggatggcggccaacgaattagcagaggtcaagaagcaagttgatgagcagctgcagaaagggtacatacgaccaagcacttcaccttggggcgctccggtcatttttgtggagaaaaaggataagacgaagaggatgtgcgtcgattatcgcgcacttaacgaggtcacaatcaagaataaatatcctttaccgcgaatcgacgatttatttgatcaactaaaaggagctaaagtgttttctaagatagacctgcgatcaggctaccaccagttgagaatccgggaagaggatattccgaagacggccttcaccactcggtacgggctatatgagtgcacggttatgtctttcggacttaccaacgcacccgcattcttcatgaatctgatgaacaaagtgttcatggaatttctggacaagtttgttgtggtgttcatcgacgacattcttatctattcaaagtccggagaagaacatgaacaacatctccgtctagtactcgagaagttgaaggagcaccagctatacgccaagttcagcaagtgtgacttctggttgacggaagtcaaatttctgggccatgtcattacaactcagggtgtggcagttgacccatcgaacgtggagtcagttaccaaatggaccccacctaagaccgtgtcgcagattcggagttttctaggactggcaggttattaccgccgattcatcgaaaatttctccaggatcgcccgacccatgactcagttgcttaagaaagatgagaagtttaaatggacagctgagtgcgataagagttttgaggagctcaagaagaagttagtatccgcaccagtattgattctgcccgacccgacgaaagacttccaagtctattgtgatgcatcccgtcacggacttggatgtgtcctaatgcaagagggcagagtggttgcgtatgcctcgcggcagttgcgtccacacgaaggaaattatccaactcatgacttggaattggcagcagtggttcatgctttgaagatctggaggcactatctgattggaaaccgctgcgaagtatatacggaccataagagtctgaaatacatcttcacccaaccggatctaaaccttcgacaacgaagatggttggaactaatcaaagactatgacatgagtattcactaccacccgggtaaagccaatgtggtggcagacgctttaagccggaaaagttactgcactgccctatgcatcgagggcatgtgtgaggaattgcggcaggagtttgagcatctcaacgtgggaattgttgaacacgggttcgtagccgctctggaggcacggcctacgctcgtggatcaagttagagccgctcaagtaaatgatccggaaatagcagaactgaaaaagaacatgagagtcggaaaggctcgggatttccacgaagatgagcatggcaccatctggatgggagaaagattgtgtgtacctgacgacaaggaactgaaggatctgatactcaccgaggctcatcatacccagtactccattcatccaggcagcactaaaatgtaccaagaccttaaagaaaaattttggtgggtcagcatgaggagagaaatagctgaattcgtcgcactctgcgatgtttgccaacgagtgaaagcagagcaccaaagaccagcaggtttactccaacctcttcaaatcccggaatggaaatgggaggagattggaatggactttataacaggactgccccggacatcatcgggacatgattcaatctgggtagtcgtggatcgactcaccaaggtggctcactttatacccgtacataccacctatacgggaaagagactggcagaattgtacctcgcaaggatcatgtgtttgcatggggtacccaggaaaatagtatccgaccgaggtagtcagttcacctcaaagttttggcagaaactgcaggaagaattggggacccgtttgaatttcagcacggcctatcacccgcaaactgatggtcagaccgagcgagtcaatcaaatcttggaggatatgttgagagcttgcgctcttgattttggtggagcttgggacaaaagcttgccatacgcggaattctcgtacaacaacagctaccaggccagtctacagatggcaccgtttgaagctttgtacggccggaagtgccgcacacacctctcttctgggatcagacaggcgaacgtcaactgttcggaacagaagtattagcggaagcagaagagaaagtcagaatcatcagggaaaggttgagaattgctcagtctcgacagaagagctacgcggataaccgtcgaagggagctcatttttgaggcaggagattacgtgtatcttcgtgtcactccgctccggggagtacaccgttttcagacgaaaggctagttggcaccacgcttcgtgggaccatacaaaatcttggaacgaaggggagaagttgcttatcagctagaacttccatccaatatgatcggcatccatgacgtgttccacgtgtcccaattaaagaagtgtttaagggtacctgaagaacaggctgattcggagcacattgatatccaagaggacctaacatatgtggagaagccggttcgtatacttgataccagcgaaaggagaaccagaaataaggtcaccaggttttgccgagttcagtggagtcatcattcagaagaggaagcaacctgggaaagggaagatgagttgaaagccgcccatccgcacctcttcaccagctcctccgaatctcggggccgagattccgtt

SEQ ID NO: 13791 - DNA, 1869 bp, Oryza sativa
  Clone ID: TFbOSC1567j.C1.o2.fg
atggcggtcgaggcatctggaggcacagcagatcacgcctgtcaggaggcagcctacttgatgatggccagactacgggagcgccacgactacatcttccacgacacggcgtaccgctaccacccccgtcgagcccatggtgatggcgtcagctccttccgtccgacagctggcgagaacgacaccaccttcggtcacatgtgtgctgtgatgaggggattggaccagatgcactcggacctgcacaaggcgaccaaggccttgaatgatgggaagctcatgaggatcgtcgctctgaaggacgagatagcgcgcctgaagaaggagaatgctcagttgaagggtcttccagcaccaggaggagtccggatccgcactacgccccgttgcttgtttgggatggtctacaccaggactggcaaccgcacgacaggcgagggcagcaacggtgaagaacgcgctgatggtgtgcaccccaacagtgattctggcaatggtccgccaccacttcccgagaatccgacccttgcccaagttatggcacatcagactcagatgatggcagccatgatgcagcagatgcagcagcagcaccagcagatgcaccagaggatgatgcagcacgccgaacagcagcaccagcagtttggtccccctccccctcagtccaagttgccggagtttctacgtgtcaggccacccaccttctccagcaccaccaacactatggaggcaaatgactggctccatgcgatagagaagaagctgaatctcctgcagtgcaatgatcaggagaaggtcgctttcgccacacaccagcttcagggtcctgcgtcagcttggtgggacaaccacatggccacccgcccaccgggtactgaagtcacatgggcagagttctgccgtagcttcaggaaggcacaggtgccagacggggtcgtggcacaaaagaagagggaattccgggcgctccatcagggcagcaggactgtgacagagtacctccatgagttcaatcgcctcgcgcgatatgcaccagaggatgtccgcaccgacgccgagaagcaggagaagttcatggcgggtctggatgacgagctgaccaaccaactgatatctggggactacgccgactttgagaggctggttgacaaggcaatccgccaggaggatcaacgcaacaagatggataggaagaggaaggccgcgcagttcagggcacatcagggaagtcaccagaggccgcgcttcactcccgggcagcagggtggacctaccaccatgattgttcgtcaacaccgcccattcaaccccagcaacttccaccagggctccagtggcagccagaatcaccatggaagtcagcccaaccgcggtacagctccacgcccaccgatggcaccggcacagtcaggccagcccgcacaagccaagaaggagacgggagcaaaaccagggtcctgcttcaactgtggcgagcttggccacttcgctgacaaatgcccgaagcccaggcgtgccggaccaaggtttatccaggctcgtgtcaaccacgcatctgcggaggaggcacaagcagcaccagaggtcgtactgggtacgtttcctgttaactcaatccctgcaacagtactttttgattctggtgcaacgcattctttcatctccaagaaatttgtcgggatgcatgggttaataagagaggaacttagcacaccgatgcgggttcataccccagggaatagctccacttcggttcaattcagcccttctataacaatagaaattcaaaggtcacccggttttgccgagttcagtggagtcatcattcggaagaggaagcgacctgggaaagggaagatgagttga

SEQ ID NO: 13792 - DNA, 377 bp, Oryza sativa
  Clone ID: TFbOSC16992j.C1.o1.gm
ggttacataacgtcaagggggttcatgggcccttgatggccatcgggcgatcgccggccctatggcctctaagcttggtgggccgagaaggctacttcggccctcgcgggggcgaaccggtcctggcgaagtcgtccttctctgggctggatgccggggcgaaccggtcctggcgaagtcgtctttcttcggcatgcactcacccgacccttcgcctcgcatcatccttggctcgtggtcttcgccatgggtttcggcagattcggtcgaagggactcatgccatccgccaacagctatgaacccgtgttcaacaattcccacgttgagccgcttaaactcttgctgcaattcctcacacatgccctcgatgcatag

SEQ ID NO: 13793 - DNA, 2019 bp, Oryza sativa
  Clone ID: TFbOSC16992j.C1.o2.gm
atggtctacaccaggaatggcacccgcacgacaagcgagggcagcaacggcgaagaacgcgctgatggtgtgcaccccaacagtgattccggcaatggtccgccaccatttcccgagaatctgacgctggcccaagtaatggcacatcagactcagatgatggcagccatgatgcagcagatgcagcagcagcaccagcagatgcaccagaggatgctgcagcacgccgaacagcagcaccagcagtttggtccccctcctcctcagtccaagctgcccgagtttctacgcgtcaggccacccaccttctccagcaccaccaaccccatggaggcgaatgactggctccatgccatagagaagaagctgaatctcctgcagtgcaatgatcaggagaaggtcgctttcgccacacaccagcttcaaggtcctgcgtcagcttggtgggacaatcacgtggccacccgcccgccaggcactgaagtcacttgggcggagttctgtcgtagcttcaggaaggcgcaggtgccagacggggtcgtggcacaaaagaagaggggattccgggcactccatcagggcaacaggacagtgacagagtacctccatgagttcaatcgcctcgcgcgatatgcaccggaggatgtctgcaccgacgccgagaagcaggagaaattcctagcaggcctggatgatgagctaaccaaccagctgatatctggagactatgccgactttgaaaggttggttgacaaggcaatccgtcaggaggatcagcgcaacaaaatggacaggaagagaaaggcggcacagttccggtccaaccaaggaaaccatcagcgaccgcgcttcactctcggacagcagggtggacctaccaccatgatcgtccgccagcaccgcacgttcaagtctagcaacttccaccagggcgccagtggcagtcagaaccaccatggaggtcagcctaaccacggtgcagctccacacccaccagtggcaccagcacagtcaggcccgtccgcgcaagccaaggagactggagcaaagccagggtcctgcttcaactgtggtgagcttggccacttcgccgacaaatgcccgaagcctaggcgtgccgggtcaaagtttgtccaggctcgtgtcaaccacgcgtctgcaaaggaggcgcaagcagcaccagaggtcgtactggccaatgaactagccgaggtcaagaaacaggttgatgagcagctgcagaaagggtacatacgaccaagtacctcaccttggggtgctccggtcatttttgtggagaaaaaggataagacgaagaggatgtgcgtcgattatcgcgcactcaacgaggtcacaatcaagaataaataccctttaccacgaatcgatgacttgtttgaccaactgaagggagctaaggtgttctctaagatagacctgcgatcaggctatcaccagttaagaattcgggaagaagatattccaaagacggctttcaccacccggtacgggctgcatgagtgcacggttatgtctttcggacttaccaacgcacccgcattcttcatgaatctgatgaacaaagtgttcatggaatttctcgacaagtttgtggtggttttcatcgacgacatacttatctattcaaagtctgaagaagaacatgagcagcatctccgtctggtactcgagaagttgaaggagcaccaattatacgccaagttcagcaagtgtgacttctggttgacggaaggcatggcagttgatccatcgaacgtggagtcagttaccaaatggaccccaccgaagaccgtgtcgcagattcgaagttttcttagactggcggctgagtgcgataagagctttgaggagctcaaaaagaaattagtatccgccccagttctgattctgcccgaccagatgaaagatttccaggtctattgcgacgcatctcgccacgggcttggtggttcatgctttgaagatctggaggcactatctgattggcaaccgctgtga

SEQ ID NO: 13794 - DNA, 5334 bp, Oryza sativa
  Clone ID: TFbOSC18057j.C1.o2.fg
atggccggtcacccacccaaccaccgcggagaaggcatgatcgactttgtggcagagttggcacgcatgacactggtggtgggctaccccaacgcgccggagtacacgactattccaccgctcagtggcgagcttcctcaccgtgtcagcttggaggtccatggctacgtggggacttgcctcgctaacatggcagttgaggcgtcaggaggcacagcagatcacgcctgtcaggaggcagcctacttgatgatggccagactgcgggagcgccacaactacatcttccatgacacggcgtaccgcttccacccccgtcgagccaacggtgatgatgtcagttccttccgtccgacagccggcgagaacgacaccacctttggtcacatgtgtgctgtgatgaggggactggataggatgcactcggacctgcacaaggcgaccaaggccttgaacgatgggaagctcatgaggatcgtcgctctgaaggacgagatagcgcgcctgaagagggagaacgctcagctaaagggtcttccagcgccaggaggagtccggatccgcactacgccccgcaagactatgacggcacccgtgcgcatccagcttgcgcccaggaacccgcctccagcagcagctcccgcagcacctccagttccgcccgcagttcctgcagctccagctccagctcccgcgtccgctctctccttcgctccagcatcagccgccagaggtccagccagtggcaccggaggttgcttgtttgggatggtctacaccaggactggcacccgcacgataggcgagggcagcaacggcgaagaacgtgctgatggtgtgcaccccagcagtgattccggcaatggtctgccaccacttcccgagaatccgacccttgcccaagttatggcacatcagactcagatgatggcagccatgatgcagcagatgcagcagcagcaccagcagatgcaccagaggatgatgcagcacgccgaacagcagcaccagcagtttggtccccctccccctcagtccaagttgcctgagttcctacgtgtcaggccacccaccttctccagcaccaccaaccctatggaggcaaatgactggctccatgcaatagagaagaagctgaatctcctgcagtgcaatgatcaggagaaggtcgcttttgccacacaccagcttcaagggcctgcgtcggcttggtgggacaatcacatggccacccgcccaccgggtactgaagtcacatgggcagagttctgccgtagcttcaggaaggcacaggtgccagatggggtcgtggcacaaaagaagagggaatttcgtgcactccatcagggcaacaggactgtgacggagtacctccatgagtttaatcgcctcgcacgatatgcaccagaggatgtccgcaccgacgccgagaagcaggaaaagttcatggcaggtctggatgacgagctgaccaaccaactgatatctggggactacgccgactttgagaggctagttgacaaggcaattcgtcaggaggaccaacgcaacaagatggacaggaagaggaaggccgcacagttcagggcacctcagggaagtcgccagaggccgcgcttcactcccgggcagcagggtggacctaccaccatgatcgtccgccagtaccgcccgttcaatcctagcaactttcctcagggcgccagtggcagtcagaaccaccatggaggtcagtccaaccgcggtgcagctccacgtccaccaatggcaccggcacagtcaggcccgcccgcgcaagccaagaaggagactggagcaaaaacagggtcctgcttcaactgtggcgagcttggccacttcgctgacaaatgcccgaagcccaggcgtgccgggccaaggtttatccaggctcgtgtcaaccacgcatctgcggaggaggcacaagcagcaccagaggttgtactgggtacgtttcctgttaactcaatccctgcaacagtactttttgattctggtgcaacgcattctttcatttcaaagaaattcgtggggaggtatgggttaaggaaagaagagcttagcacaccaatgagagttcataccccgggaaatagttcaacctcagtcagttttagcccttcagtgctaatagaaatccaaagatcaccatttctagccaacctcattcttcttgaatccaaagacctagacgtcattcttgggatggattggctgaccaagttcaagggagtcatcgattgtgcgaatcgcacagtcaccctgaccaacgagaagggagaaaccgtggcgtacaaatcactagtctcaccaaagcaaggggtctctttgaatcagattgaagcagaaatcccagtggacaccgtggagaagaacttgaggaaaatggaatatatacccatagtctgcgagtatccggaagtgttccccgaagacctcactaccatgccacccaagagagagattgaattccggattgacttggcaccgggaaccgccccaatttacaagagaccgtacaggatggcagccaacgaactagcagaggtcaagaagcaagttgatgagcagctgcagaaagggtacattcgaccaagtacttcaccttggggtgctccggtcatttttgtggagaaaaaggataagacgaagaggatgtgcgttgattatcgcgcactcaatgaggtcacaatcaagaacaaatatcccttgccgcggatcgacgatttatttgatcaactgaaaggagctaaagtgttttctaagatagacctgcgatcaggctaccaccagttgagaattcgggaagaggatattccgaagacggccttcaccactcggtacgggctatatgagtgcacggttatgtccttcggacctactaacgcacctgcattcttcatgaatctgatgaacaaagtgttcatggaatttctggacaagtttgttgtggtattcatcgacgacatacttatctactcaaaatccgaggaagaacatgagcaacatctccgtctggtactcgagaagttgaaggagcaccagctatacgccaagttcagcaagtgtgacttctggttgacggaagtcaaatttctgggccatgtcattacagcccagggtgtggcagttgatccgtcaaacgtagagtcagtcaccaagtggatcccaccgaagaccgtgtcgcagattcgaagttttctaggactggcaggttattaccgccgattcatcgaaaacttctccagaatcgcccgacccatgactcagttgcttaagaaagatgagaagtttaagtggacagctgagtgcgataagagttttgaggagctcaagaagaaattagtatccgcaccggttttgattttgcccgaccagatgaaagacttccaagtctattgcgatgcatcccgtcacggacttggatgtgtcctaatgcaagagggcagagtggttgcgtatgcctcacggcagttgcgtccacacgaagggaattatccaactcatgacctagaattggcagcagtggttcatgctttgaagatctggaggcactatctaattggcaaccgctgcgaagtatatacggaccataagagtctgaaatacatcttcacccaaccggacctaaatctccgacaacgaagatggttggaactaatcaaagactatgacatgagtattcactaccacccgggtaaagccaatgtggtggcagacgcattaagccggaaaagttactgcactgccctatgcatcgagggcatgtgtgaggaattgcggcaggagtttgagcatctcaacgtgggaattgttgaacacgggttcgtagccgctctggaggcacggcctacgctcgtggatcaagtcagagtagctcaagtaaatgattctgaaatagcagagctgaaaaagaatatgagagtcgggaaagcccgggatttccacgaagatgaacacggcacaatctggttgggagaaagattatgtgtacctgacgacaaggaactgaaggatctgatactcactgaggctcatcagacccagtactccattcatccaggcagcactaaaatgtatcaagacctcaaagaaaagttttggtgggtcagcatgaggagagaaatagctgaattcgtcgcactctgtgatgtttgccaacgagtgaaggcagagcaccaaagaccagcaggtttactccaacctcttcaaatcccggaatggaaatgggaggagattggaatttactttataacgggactgccccggacatcgtcgggtcacgattcgatctgggtagtcgtggatcgactcactaaggttgctcacttcataccagtacataccacatatacgggcaaaaggttggcggagctttacctttcgagaatcatgtgcctacatggagtacccaaaaagattgtatctgaccgagggagtcagttcacctcaaaattctggcagaagctgcaggaagaaatggggacccgtttaaatttcagcacggcctatcacccgcaaactgatggtcagaccgagcgagtcaatcaaatcttggaagatatgttgagagcttgcgctcttgattttggtggagcttgggacaaaagcttgccatatgcggaattctcgtacaacaacaactaccaggccagtctacagatggcaccgtttgaagctttatacggccggaagtgccgcacacctctcttctgggatcagacaggcgagcgtcaactgttcggaacagaggtattagcggaagcagaagagaaagtcaggatcatcagggaaaggttgagaattgcccagtctcgacagaagagctacgcggataaccgtcgaagggagctcacttttgaggtaggagattacgtgtatcttcgtgtcactccgctccggggagtacaccggtttcagacgaaaggcaagttggcaccacgcttcgtgggaccatacaaaatcttggaacgaaggggagaagttgcttatcagctagaacttccatccaacatgatcggcatccatgacgtgttccacgtgtcccaactaaagaagtgcttaagggtacctgaagaacaggctgattcggaacacattgatatccaggaggacctaacatatgtggagaagccggttcgtatacttgataccagcgaaaggagaaccagaaacaaggtcacccggttttgccgagttcagtggagtcatcattcggaagaggaagcaacctgggaaagggaagatgagttgaaagccgcccatccgcacctcttcaccagctcctccgaatctcggggccgagattccgtttaa

SEQ ID NO: 13795 - DNA, 3924 bp, Oryza sativa
  Clone ID: TFbOSC18656j.C1.o6.gm
atggtctacaccaggactggcaaccgcacgacaggcgagggcagcaacggcgaagaacgcgccgatggtgtgcaccccaacagtgattctggcaatggtccgccaccacttcccgagaatccgacgcttgcccaagttatggcacatcagactcagatgatggcagccatgatgcagcagatgcagcagcagcaccagcaaatgcaccaaaggatgatgcagcacgccgaacagcagcatcaacagtttggtccccctccccctcagtccaagttgccagaatttctacgcgtcaggccacccaccttctccagcaccaccaaccctatggaggcgaacgactggctccatgcaatagagaagaagctgaatctcctgcagtgcaatgatcaggagaaggtcgctttcgccacacaccagcttcagggtcccgcgtcagcttggtgggacaaccacatggccacccgcccaccgggtactgaagtcacatgggcagagttctgccgtagcttcaggaaggcacaggtgccagatggggtcgtggcacaaaagaagagggaatttcgtgcactccatcagggcaaccggactgtgacagagtacctccacgagttcaatcgcctcgcgcgatatgcaccagaggatgtccgcaccgacgccgagaagcaggagaagttcatggcgggtttggatgacgagttgaccaaccaactgatatccggggactacgctgactttgaaaggctggttgacaaggcaatccgtcaggaggatcagcgcaacaaaatggacaggaaaagaaaggcggcgcagttccggtccaaccaaggtagtcagcaccgaccgcgcttcactcccggacagcagggtggacctaccaccatgatcgtccgtcagcaccgcccgttcaactccagcaacttccaccagggcactagtggcagtcagaaccaccagggaggccagcccaaccgcggtgcagctccacgcccaccaatggcaccggcacagtcaggccagcccgcgcaagccaagaaggagacgggagcaaaaccagggtcctgcttcaactgtggcgagcttggccacttcgctgacaaatgcccgaagcccaggcgtgccgggccaaggtttatccaggctcgtgtcaaccacgcgtctgcggaggaggcacaagcagcaccagaggtcgtactggtcaccttgaccaacgagaagggagaaaccgtagtgtacaaatcaccagactcaccaaagcaaggagtctccttgaatcaaattgaaacggaaatcccagtggacaccgtggagaagaacttgagaaaattggaagatatacccatagtctgcgagtatccggaagtgttccccgaagacctcactaccatgccacccaagagagagattgaattccggattgacttggcaccgggaaccgctccaatttacaagagaccatacaggatggcggccaacgaattagcagaggtcaagaagcaagttgatgagcagctgcagaaagggtacgtacgaccgagcacttcgccttggggcgctccggtcatatttgtggagaaaaaggataagacgaagaggatgtgcgtcgattatcgcgcacttaacgaggtcacaatcaagaataaatatcctttaccgcgaatcgacgatttatttgatcaactgaaaggagctaaagtgttctctaagatagacctgcgatcaggctaccaccagttgagaattcgggaagaggatattccgaagacggccttcaccactcggtacgggctatatgagtgcacggttatgtctttcagacttaccaacgcacccgcattcttcatgaatctgatgaacaaagtgttcatggaatttctggacaagtttgttgtggtgtttatcgacgacattcttatctattcaaagtccggagaagaacatgaacaacatctccgtctggtactcgaaaagttgaaggagcaccagctatacgccaagttcagcaagtgtgacttctggttgacggaagtcaaatttctgggtcatgtcattacagctcagggtgtggcagttgatccgtcgaacgtggagtcagttaccaaatggaccccacctaagaccgtgtcgcagattcgaagttttctaggactggcgggttattaccgccgattcatcgaaaatttctccagaatcgcccgacccatgactcagttgcttaagaaggatgagaagtttaaatggacagctgagtgcgataagagctttgaggagctcaagaagaaattagtatccgcaccagttttgattctgcccgacccgactaaggacttccaagtctattgtgatgcatcccgtcacggacttggatgtgtcctaatgcaggaaggcagagtggttgcgtatgcctcgcggcagttgcgtccacacgaaggaaattatcccactcatgacttggaattggcagcagtggttcatgctttgaagatctggaggcactatctgattggaaaccgctgcgaagtatatacggaccataagagtctgaaatacatcttcacccaaccggatctaaaccttcggcaacgaagatggttggaactaatcaaagactatgacatgagtattcactaccacccgggtaaagccaatgtggtggcagacgcattaagccggaaaagttactgcactgccctatgcatcgagggcatgtgtgaggaattgcggcaggagtttgagcatctcaacgtgggaattgttgaacacgggttcgtagccgctctggaggcacggcctacgctcgtggatcaagttagagccgctcaagtaaatgatccggaaatagcagagctgaaaaagaacatgagagtcggaaaggctcgggacttctttgaggatgagcatggcacaatctggatgggagaaagattgtgtgtacctgacgacaaggaattgaaggatctgatactcaccgaggctcatcagacccagtactccattcatccaggcagcaccaaaatgtatcaagacctcaaagaaaagttttggtgggtcagcatgaggagagaaatagctgaattcgtcgcactctgcgatgtttgccaacgagtgaaggcagagcaccaaagacccgcaggtttactccaacctcttcaaatcccggaatggaaatgggaggagattggaatggactttataacgggactgccccggacatcatcgggacatgattcaatctgggtagtcgtggatcgactcaccaaggaagaattggggacccgtttaaatttcagcacggcctatcacccgcaaactgatggtcagaccgagcgagtcaatcaaatcttggaagatatgttgagagcttgcgctcttgattttggtggagcttgggacaaaagcttgccatatgcggaattctcgtacaacaacagctaccaggccagtctacagatggcaccgtttgaagctttatacggccggaagtgccgcacacctctcttctgggatcagacaggcgaacgtcaactgttcggaacagaagtattagcggaagcagaagagaaagtcagaaccatcagggaaaggttgaggattgctcagtctcgacagaagagctacgcggataaccgccgaagggagctcacttttgaggccggagattacgtgtatcttcgtgtcactccgctccggggagtacaccgttttcagacgaaaggcaagttggcaccacgcttcgtgggaccatacaaaattttggaacgaagaggagaagttgcttatcagctagaacttccatccaacatgatcggcatccatgacgtgttccatgtgtcccaattaaagaagtgcttaagggtacctgaagaacaggctgattcggagcacattgatatccaagaggacctaacatatgtggagaagccg

SEQ ID NO: 13796 - DNA, 4081 bp, Oryza sativa
  Clone ID: TFbOSC18884j.C1.o4.gm
atggtctacaccaggaatggcacccgcaccacgggcgagggcagcaacggcgaagagcgcactgatggtgtgcatcccaatagtgattccggcaatggtccgccaccactccccgagaatccgacccttgcccaagtaatggctcatcagacgcagatgatgacagccatgatgcagcaaatgcaacagcagcaccaacagatgtaccagaggatgcagcagcaagccgagcagcaccagcagcagtttggcccccctccccctcagtccaaactgccagagtttctacgcgtcaggccacccaccttttctagcaccaccaaccctatgaaggcaaatgattggctccatgccatagagaagaagctcaatctcctgcagtgcaatgatcaggagaaggtcgccttcgccacacaccagctccaaggtcccgcgtcagcttggtgggacaatcacatgactacccgcccgccaggcactgaagtcacttgggcagagttctgccgcaacttcaggaaggcgcaggtgctagatggggtcgtggcacaaaagaagagggaattccgagcactccaccagggcaacaggacagtgacggagtatctccatgagttcgatcgcctcgcgcgatatgcaccggaggatgtccgtactgacgccaagaagcaggagaaattcctagcaggtctggatgatgagctaaccaaccagttgatatccggagattacgccgactttgagaggctggttgacaaggcaatccgtcaggaggatcagcacaacaaaatggataggaagaggaaggcggcgcagttccggtccaaccaagcaagccaccagcgaccgcgcttcattcccagacagcagggtgaacctaccaccatgatcgtccgccagcaccgccctttcaactcaagcaacttccaccagggcgctagtggcagccagaaccaccgtggaggtcagcccaaccgcagtgcaactccgcgcccaccaatggcaccagcacagtcagctccgtctgtgcaagccaagaaggagaccggagcaaagccagggtcctgcttcaactgtggtgagcttggccacttcgctgacaaatgcccgaagcctaggcgtgctgggccaaggtttgtccaggcccgtgtcaaccacgcgtctacagaggaggcacaagcagcaccagaggtcgtactggtcaccttgatcaatgagaagggagaaacagtagtgtacaaatcactagtctcaccaaaacaaggggtctctttgaatcagattgaggtggagatcccagtggtcaccgaggagaagaattcgaggaaattggaagagattcccatagtctgcgagtacccagaagtgtttcccgaagacctcactaccatgccacccaagagagagattgaattccggattgatttggcaccgggaaccgctccaatttacaagagaccgtacaggatggcagccaacgaactagcagaggtcaagaagcaggttgatgagcagctgcagaaagggtacattcgaccaagtacttcaccttggggtgcaccggtcatttttgtggagaaaaaggataagacgaagaggatgtgcgtcgactatcgcgcactcaatgaggtcacaatcaagaacaaatatcctttaccgcggatcgatgatttgtttgatcaactgaagggagctaaagtgttttctaagatagacctacgatcaggctaccaccagttgagaattcgggaagaggatattccaaagacggccttcaccactcagtatgggttgtatgagtgcacggttatgtctttcggacttaccaatgcacccgcattcttcatgaacttgatgaacaaagtgttcatggaatttctggataagtttgtggtggtattcattgacgacatactcatctattccaaattggaagaagaacatgagcaacatctccgtctggtactcgagaaattgaaggagcaccagttgtatgccaagttcagcaagtgtgacttctggttgtcggaagtcaaatttctgggtcacattattacagctcaaggcgtggcagttgattcatcgaacgtggagtcagttaccaaatggaccccacctaagaccgtgtcgcagattcggagttttcttggacttgcagggtattaccgtcggttcattgaaaatttctccaggatcgcccgacccatgactcagttgcttaagaaagatgagaaatttaaatggacagccgagtgtgacaagagttttgaggagctcaagaagaaattagtatccgccccagttctgattctgcccgaccagatgaaagacttccaagtctattgcgacgcatcccgccacgggcttggatgtgttctaatgcaagagggtagagtggtcgcatacgcctcgcggcagttgcgtccacatgaagggaattatccaactcatgacctggaattggcagtagtggttcatgctttgaagatctggaggcactatctgattggcaaccgctgcgaagtatatacggaccacaagagtctgaaatacatcttcacccaaccggacctaaatctccgacaacgaagatggttggaactaatcaaagattatgacatgagcattcactaccacccgggtaaagccaatgtggtggcagatgcattaagcaggaaaagctactgcaatgccctatgcaccgaggacatgtgtgaagaattgcagcaggagcttgagcgtctcaacgtgggaattgttgaacataggttcgtagccgctctggaagcacggcctacgcttgtggatcaattcagagcagctcaagtaaatgaccccgaaatagttgaactgaaaaagaatatgagagtgggaaaagcccgggacttccttgaggatgaacatcgcacaatctggatgggagaaagattgtgtgtacctgacgacaaggaactgaaggatctgatactcaccgaggctcatcagactcagtactccattcatccaggcagcaccaaaatgtatcaagacctcaaagaaaagttttggtgggtcagcatgagaagggaaatagctgaattcgtcgcactctgcgacgtttgccaacgagtgaaggcagagcaccaaaggccagtaggtttattccaacctcttcaaatcccgaaatggaagtgggaggagattggaatggactttataacaggactgccccggacatcatcgggctccgttaaaggcaaattaccgaagccgggattgactgacatcattgatgacaatgtcctgccgatcgatcccgagaaattcacgcctgaccagaagcaaaaatttgaagcaatgatgcagcaagcacgggatcagtatctaagctcgttcatgcaaacccgcaagggaatgctggttcagaagtacaagttaaaactggttgctgacaaccctggaaccggttcttctaaagatggagaagtgaaacaagctccagatggctcggctcagccgagcaacaagggtgctaccagtggttctataggaaatcaaggcgataaccctcaagaagtgcacggagctccaggcgactccatctgtcgaacccacgactcaaccaacagcgccagcatcaacgcccttacctgctacatcggccacggctgcagcagcagccgatccagcagacgtcatcaattcagccggttgtacagccgatccaacaacaggtcgcgcagccagctcagcaaacaccaccaattcagccggtggtacggccgatccaacaacaggtcttgcagccagttcagcaagcaccatcaacgcagcagcatctccaaccaatccagcaaacaccgccaaggcaacgccttcagccgatccaacggactccggtacgacagcaggtcgttcagccgattcagcacctggggccagccaatgcatcggctggatttgcagcacatggggggcaacctgcgcagcagctcgccgccgcaccgtgccgtcgccgccgttgggttcgcgtggtcgaggtccacccagtccgcccctcctccatcgaggtccgtcgccggagcccgcatcccctcgcactccg

SEQ ID NO: 13797 - DNA, 5484 bp, Oryza sativa
  Clone ID: TFbOSC19176j.C1.o1.fg
atggagaaacctaagagccctctgaatcctttttcattgcatatgttcttcgcaattggatttgttccgggaaaatggggatctgttcttgtggttcaagggaaaaatcttggtcgctcgtttaaaatggccggtcacccacccaaccaccgcggagaaggcatgattgatttcgtggcagagttggcacgcatgacactggtagtgggctaccccgacgcgccggaatacacgaccatcccaccgctcagtggcgagcttccttaccgtgtccgcttggaggtccatggctacgtggggacttgcctcgctaacatggcggtcgaggcatcaggaggcacagcagatcacgcctgtcaggaggcagcctacttgatgatggccaggttacgggagcgccacgactacatcttccacgacacggcgtaccgctaccacccccgtcgagcccatggtgatggcgtcagctccttccgtccgacagctggcgagaacgacaccacctttggtcacatgtgtgctgtgatgaggggattggacaggatgcactcggacctgcacaaggcgaccaaggccttgaatgatgggaagctcatgaggatcgtcgctctgaaggacgagatagcgcgcctgaagaaggagaatgctcagttgaagggtcttccagcaccaggaggagtccggatccgcactacgccccgtaagaggacgactgcacccgtgcgcatccagcttgcgcccaggaacccacctccaccagcagctcccgcagcacctccagttccgcccgcagctccggcagttcccgcagttcctccagctccagctccagctccaactcccgcgttcactctctccttcgctccagcatcagccgccagaggttcagccagtggtaccggaggttgcttgtttgggatggtctacaccaggactggtagccgcgcaacaggcgagggcagcaacggcgaagaacgcgctgatggtgtgcaccccaacggtgattctggcaatggtccaccaccacttcccgagaatccgacgcttgcccaagttatggcacatcagactcagatgatggcagccatgatgcagcagatgcagcagcagcaccagcagatgcatcagaggatgatgcagcacgccgaacagcagcaccagcagtttggtccccctcccccccagtccaagttgcctgagtttctacgtgtcaggccacccaccttctccagcaccaccaaccctatggaggcaaatgactggctccatgcgatagagaagaagctgaatctcctgcagtgcaatgatcaggagaaggtcgctttcgccacacaccagcttcagggtcctgcgtcagcttggtgggacaaccacatggccacccgcccaccgggtactgaagtcacatgggcagagttctgccgtagcttcaggaaggcacaggtgccagacggggtcgtggcacaaaagaagagggaattccgggcgctccatcagggcaacatgactgtgacagagtacctccacgagttcaatcgcctcgcgcgatatgcaccagaggatgtccgcaccgacgccgagaagcaggagaagttcatggcgggtctggatgatgagctgaccaaccaactgatatctggggactacgccgactttgagaggctggttgacaaggcaatccgccaggaggatcagcgcaacaaaatggacaggaaaagaaaggcggcgcaattccggtccaaccaaggtagtcagcaccgaccgcgcttcactcccggacagcagggtggacctaccaccatgatcgtccgccagcaccgcccgttcaactccagcaacttccaccagggcactagtggcagtcagaaccaccagggaggccagcccaaccgcggtgcagctccacgcccaccaatggcaccggcacagtcagcccagcccgcgcaagccaagaaggagacgggagcaaaaccagggtcctgcttcaactgtggcgagcttggccacttcgctgacaaatgcccgaagcccaggcgtgccgggccaaggtttatccaggctcgtgtcaaccacgcgtctgcggaggaggcacaagcagcaccagaggtcgtactgggtacgttccctgttaactcaatccctgcaacagtactttttgattctggtgcaacgcattctttcatttcaaagaaattcgtgggaatgtatgggctaaggaaagacgagcttagcacaccaatgagggttcgtaccccgggaaatagttcaacctcagtcagttttagcccttcagtgctaatagaaatccaaagatcaccatttctagccaacctcattcttctcgaatccaaagacctagatgtcattcttgggatggattggctgaccaagtttaagggggtcatcgattgtgcgagtcgcacagtcaccttgaccaacgagaagggagaaaccgtagtgtacaaatcaccagactcaccaaagcaaggagtctccttgaatcaaattgaaacggaaatcccagtggacaccgtggggaagaacttgagaaaattggaagatatacccatagtctgcgagtatccggaagtgttccccgaagacctcactaccatgccacccaagagggagattgaattccggattgacttggcaccgggaaccgctccaatttacaagagaccatacaggatggcggccaacgaattagcagaggtcaagaagcaagttgatgaacagctgcagaaagggtacatacgaccaagcacttcaccttggggcgctccggtcatttttgtggagaaaaaggataagacgaagaggatgtgcgtcgattatcgcgcacttaacgaggtcacaatcaagaataaatatcccttaccgcgaatcgacgatttatttgatcaactgaaaggagctaaagtgttctctaagatagacctgcgatcaggctaccaccagctgagaatccgggaagaggatattccgaagacggccttcaccactcggtacgggctatatgagtgcacggttatgtctttcggacttaccaacgcacccgcattcttcatgaatctgatgaacaaagtgttcatagaatttttggacaagtttgttgtggtgttcatcgacgacattcttatctattcaaagtccgaagaggaacatgaacaacatctccgtctggtactcgagaagttgaaggagcaccagctatacgccaagttcagcaagtgtgacttctggttgacggaagtcaaatttctgggccatgtcattacagcccagggtgtggcagttgatccatcgaacgtggagtcagttacaaaatggaccccaccaaagaccgtgtcgcagattcggagttttctaggactggctagttattaccgtcgtttcatcgaaaacttctcaagaatcgcccgacccatgactcagttgcttaagaaagacgagaagtttaaatggacagctgagtgcgacaagagctttgaggagctcaaaaggaaattagtatccgcaccggttttgatcctgcccgaccagacgaaagacttccaagtctattgtgatgcatcccgtcacggacttggatgtgtcctaatgcaagagggcagagtggttgcgtatgcctcgcggcagttgcgtccacacgaaggaaattatccaactcatgacttggaattggcagcagtggttcatgctttgaagatctggaggcattatctgattggaaaccgctgcgaagtatatacggaccataagagtctgaaatacatcttcacccaaccggatctaaaccttcgacaacgaagatggttggaactaatcaaagactatgacatgagtattcactaccacccgggtaaagccaatgtggtggcagacgctttaagccggaaaagttactgcactgccctatgcatcgagggcatgtgtgaggaattgcggcaggaatttgaacatctcaacatgggaattgttgaacacgggtttgtagccgctttggaggcacggcctacgctcgtggatcaagtcagagccgctcaagtaaatgatccggaaatagcagaactgaaaaagaacatgagagtcggaaaggctcgggatttccatgaagatgagcatggcacaatctggatgggagaaagattgtgtgtacctgacgacaaagaactgaaggatctgatactcaccgaggctcatcagacccagtactccattcacccaggcagcaccaaaatgtatcaagacctcaaggaaaaattttggtgggtcagcatgaggagagaaatagctgaattcgtcgcactctgcgatgtttgccaacgagtgaaagcagagcaccaaagaccagcaggtttactccaacctcttcaaatcccggaatggaaatgggaggagattggaatggactttataacaggactgccccggacatcatcgggacatgattcaatctgggtagtcgtggatcgacttaccaaggtggctcactttataccagtacataccacctatacgggaaagagattggcagaattgtacctcgcaaggatcatgtgtttgcatggggtacccaagaagatagtatccgaccgaggtagtcagttcacctcaaagttctggcagaagctgcaggaagagatggggacccgtttaaatttcagcacggcctatcacccgcaaactgatggtcagacagagcgagtcaatcaaatcttggaagatatgttgagagcttgcgctcttgattttggtggagcttgggacaaaagcttaccatatgcggaattctcgtataacaacagctaccaggccagtctacagatggcaccgtttgaagctctatacggccggaagtgccgcacacctctcttctgggatcagacaggcgaacgtcagctgttcggaacagaagtattagcggaagcagaagagaaagtcagaatcatcagggagagattgaggattgctcagtctcgacagaagagctacgcggataaccgtcgaagggagctaacttttgaggccggagattacgtgtatcttcgtgtcaccccgctccggggagtacaccgctttcagacaaaaggcaagttggcaccacgcttcgtgggaccgtacaaaattttggaacgaaggggagaagttgcctatcagctagaacttccatccactatgatcggcatccatgacgtgttccatgtgtcccaattaaagaagtgtttaagggtacctgaagaacaggctgattcggaacacattgatatccaagaggacctaacatatgtggagaagccggttcacatacttgacactagcgaaaggagaaccagaaacaaggtcacccggttttgccgagttcagtggagtcatcattcggaagaggaagcgacctgggaaagggaagatgagttgaaagccgcccatccgtacctcttcaccagctccaccgaatctcggggccgagattccgtttaa

SEQ ID NO: 13798 - DNA, 2467 bp, Oryza sativa
  Clone ID: TFbOSC20350j.C1.o1.gm
ggcaacaggactatgacggagtacctccatgagttcaatcgcctcgcgcgatatgcaccagaggatgtccgcaccgacgccgagaagcaggaaaagttcatggcgggtctggatgacgagctgaccaaccaactgatatctggggactacgctgactttgagaggctagttgacaaggcaatccgtcaggaggatcaacgcaacaagatggataggaagaggaaggccgctcagttcagggcacctcagggaagtcaccagaggccgcgcttcgcttccgggcagcagggtggacctaccaccatgatcgtccgccagtaccgcccgttcaaccctagcaactttccccagggcgccagaggcagtcagaaccaccatggaggtcagcccagcagcggtgcagctccacgcccaccaacggcatcggcacagtcaggcccgtccgcgcaagccaagaaggagactggaacaaaaccagggtcttgcttcaactgtggcgagcttggccacttcgctgacaaatgcccgaagcctaggcgtgccgggccaaggtttatccaggctcgtgtcaaccacgcgtccgcggaggaggctcaagcagcaccagaggttgtactggcggaaatcccagtggacaccgtggagaagaacttgagggaattggaagatatacccatagtctgcgagtatccagaagtgttccccgaagacctcactaccatgccacccaagagagagattgaattccggattgacttggcaccgggaaccgctccaatttacaagagaccatatagaatggcggctaatgaattagccgaggtcaagaagcaggttgatgagcagctgcagaaagggtacattcgaccaagtacttcaccttggggtgctccggtcatttttgtggagaaaaaggataagacgaagaggatgtgcgttgattatcgcgcactcaacgaggtcacaatcaagaacaaatatcctttgccgcgaatcgatgatttgtttgatcaactgaaaggagctaaagtgttttctaagatagacctgcgatcaggctaccaccagttgagaattcgggaggaggatattccaaagacggccttcaccactcggtacggattatatgagtgcacggttatgtcgttcggacttaccaacgcacccgcattcttcatgaatctgatgaacaaagtgttcatggaatttctggacaagtttgttgtggtattcatcgacgacatacttatctattcaaagtccaaagaagaacatgagcaacatctccgcctggtactcgagaagttgaaggagcaccagctatacgccaagttcagcaagtgtgacttctggttgacggaagtcaaatttttgggccatgtcattacagctcagggtgtggcagttgacccatcaaacgtagagtcagttaccaaatggaccccaccgaagaccgtgtcgcagattcgaagttttctaggactggcaggttattaccgccgattcatcgaaaacttctccagaatcgcccgacccatgactcagttgcttaagaaagatgagaagtttaaatggacagttgagtgcgataagagttttgaggagctcaagaagaaattagtatccgcaccagttttaattctgcccgaccagatgaaagacttccaagtctattgcgatgcatcccgtcacggacttggatgtgtcctaatgcaagagggcagagtggttgcgtatgcctcgcggctgttgcgtccacacgaagggaattatccaactcatgacctggaattggcagcagtggttcatgctttgaagatctggaggcactatctgattggcaaccgctgcaaagtatatacggaccataagagtctgaaatacatcttcacccaaccggacctaaatctccgacaacgaagatggttggaactaatcaaagactatgacatgagcattcactaccacccgggtaaagccaatgtggtggcagacgcgttaagcaggaaaagttactgcactgccctatgcatcgagggcatgtgtgaagaattgcggcaggagtttgagcatctcaacgtgggaattgttgaacacggttttgtagccgctctggaggcatggcctacgctcgtggatcaagtcagagcagctcaagtaaatgattctgaaatagcagagctgaaaaagaacatgagagtcggaaaagcccgggatttccacgaagatgagcatggcacaatctggttgggagaaagattgtgtgtacctgacgacaaggaactgaaggatctgatactcaccgaggctcatcagacccagtactccattcatccaggcagcactaaaatgtatcaagacctcaaagaaaagttttggtgggtcagcatgaggagagaaatagctgaattcgtcgcactctgcgatgtttgccaacgagtgaaggcagagcaccaaagaccagcag

SEQ ID NO: 13799 - DNA, 4386 bp, Oryza sativa
  Clone ID: TFbOSC25185j.C1.o3.fg
atggtctacaccaggaatggtagccgcgcaacaggcgagggcagcaacggcgaagaacgcgctgatggtgtgcaccccagcagtgattccggcaatggtccgccaccacttcccgagaatccgacccttgcccaagttatggcacatcagactcagatgatggcagccatgatgcagcagatgcagcagcagcaccagcagatgcaccagaggatgatgcagcacgtcgaacagcagcaccagcagtttggtccccctccccctcagtccaagttgccagagtttctacgcgtcaggccacccaccttctcaagcaccaccaaccccatggaggcgaatgactggctccatgccatagagaagaagctgaatcgcctgcagtgcaatgatcaggagaaggtcgctttcgccacacaccagcttcagggtcccgcgtcagcttggtgggacaatcacatggccacccgcccaccaggtactgaagtcacatgggcagagttctgccgtagcttctggaaggcgcaggtgccagacggggtcgtggcacaaaagaagagggaattccgggcactccatcagggcaacaggactgtgacagagtacctccacgagttcaatcgcctcgcgcgatatgcaccagaggatgtccgcaccgacgccgagaagcaggagaagttcatggcgggtctggatgatgagctgaccaaccaactgatatccggggactacgctgactttgagaggttggttgacaaggcaatccgccaggaggatcaacgcaacaagatggacaggaagaggaaggccgcacagttcagggcacctcagggaagtcaccagaggccgcgcttcgctcctgggcagcagggtggacctaccaccatgatcgttcgtcagcaccgcccgttcaaccctagcaactttccccagggcgccagtggcagtcagaaccaccatggaggtcagtccaaccgcggtgcagcttcacgcccaccaatggcaccggcacagtcaggcccgcccgcgcaagccaagaaggagactggagcaaaaccagggtcctgcttcaactgtggcgagcttggccacttcgctgacaaatgcccgaagcctaggcgtgccgggccaaggtttatccaggctcgtgtcaaccacgcatctgcggaggaggcacaagcagcaccagaggtcgtactgggtacgttccctgttaactcaatccctgcaacagtactttttgattctggtgcgacgcattctttcatttcaaagaaatttgtcgggatgcatctgttaataagagaggaacttagcacaccaatgcgggttcataccccagggaatagctccacttcggttcaattcagcccttctataacaatagaaattcaaagatcaccatttctagccaacctcattcttctcgaatccaaagacctagatgtcattcttgggatggattggctgaccaagtttaagggggtcatcgattgtgcgaatcgcacagtcaccttgatcaacgagaagggagaaaccgtggtgtacaaatctctagtctcgccaaagaaaggggtctctttgaatcagattgaagcggaaatcccagtggacaccgtagagaagaactcgagaaaattggaagatatacccatagtctgcgagtatccagaagtgttccccgaagacctcactaccatgccacccaagagagagattgaattccggattgacttggcaccgggaactgctccaatctataagagaccatacaggatggcggccaacgaactagcagaggtcaagaaacaggttgatgagcagctgcagaaagggtacattcgaccaagtacttcacctttgggtgctccggtcatttttgtggagaaaaaggataagacgaagaggatgtgcgttgattaccacgcactcaacgaggtcacaatcaagaacaaatatcctttgccgcgaatcgatgatttgtttgatcaactgaaaggagctaaagtgttttctaagatagacctgcgatcaggctaccaccagttgagaattcgggaagaggatattccgaagacggccttcaccactcggtacgggctatatgagtgcacggttatgtctttcggactcaccaacgcacccgcattcttcatgaatctgatgaacaaagtgttcatggaatttctggacaagtttgttgtggtgttcatcgacgacattcttatctattcaaagtccgaagaaaaacatgaacaacatttccgtctggtactcgagaagttgagggagcaccagctatatgccaagttcagcaagtgtgacttctggttgacggaagtcaaatttttgggccatgtcattacagctcagggttattaccgtcgattcatcgaaaatttctccagaatcgcccgacccatgactcagttgcttaagaaggatgagaagtttaaatggacagccgagtgcgataagagcttcgaggagctcaagaagaaattagtatccgcacccgttttgattctgcccgacccgatgaaagacttccaagtctattgtgatgcatcccgtcacggacttggatgtgtcctaatgcaagagggcagagtggttgcgtatgcctcacggcagttgcgtccacacgaagggaattatccaactcatgacttggaattggcagcagtggttcatgctttgaagatctggaggcactatctgattggcaaccgctgcgaagtatatacggaccataagagtctgaaatacatcttcacccaaccggacctaaatctccgacaacgaagatggttggaactaatcaaagactatgacatgagtattcactaccacccgggtaaagccaatgtggtggcagacgctttaagccggaaaagttactgcactgccctatgcatcgagggcatccgctctggaggcacggcctacgctcaagcaaatgattctgaaatagcagagctgaaaaagaacatgagtgtcggaaaagcccgggatttccacgaagatgagcatggcacaatctggttgggagaaagattgtgtgtacctgacgacaaggaactgaaggatctgatactcaccgaggctcatcagacccagtactccattcacccaggcagcactaaaatgtatcaagacctcaaagaaaagttttggtgggtcagcatgaggagagaaatagctgaattcgtcgcactctgcgatgtttgccaacgagtgaaggcagagcaccaaagaccagcaggtttacttcaacctcttcaaatcccggaatggaaatgggaggagattggaatggactttataacaggactgccccggacatcatcgggtcacgaatcgatctgggtagttgtggatcgactcactaaggttgctcacttcataccagtacataccacatatacgggcaaaaggttggcggagctttacctttcgagaatcatgtgcctacatggagtacccaaaaagattgtatctgaccgagggagtcagttcacctcaaaattctggcagaagctacaggaagaactggggacccgtttaaatttcagcacggcctatcacccgcaaactgatggtcagaccgagcgagtcaatcaaatcttggaagatatgttgagagcttgtgctcttgattttggtggagcttgggacaaaagcttgccatatgcggaattctcgtacaacaacagctaccaggccagtctacagatggcaccgtttgaagctttatacggccggaagtgtcgcacacctctcttctgggatcagacaggcgaacgtcaactgttcggaacagaagtattagcggaagcagaagagaaagtcagaatcatcagggaaagattgaggattgctcagtctcgacagaagagctacgcggataaccgtcgaagggagctcacttttgaggcaggagattacgtgtatcttcgtgtcactccgctccggggagtacactggtttcagacgaaaggcaagttggcaccacgcttcgtgggactatacaaaatcttggaacgaaggggagaagttgcttatcagttagaacttccatccaatatgatcggcacccatgacgtgttccatgtgtcccaattaaagaagtgcttaagggtacctgaagaacaggctgattcggagcacattgatatccaggaggacctaacatatgtggagaagccggttcgtatacttgataccagcgaaagaagaaccagaaataaggtcaccaggttttgccgagttcagtggagtcatcattcagaagaggaagcaacctgggaaagggaagatgagttgaaagccgcccatccgcacctcttcagcagctcctccgaatctcggggccgagattccgtttaa

SEQ ID NO: 13800 - DNA, 5175 bp, Oryza sativa
  Clone ID: TFbOSC25593j.C1.o1.fg
atgtcattgcagagggttggtgccctgctgctaggggctcagtcctgcctgcctgtcccgggggttccggccgtaggcgggattgggtcggtactcttgtctatggctaggatgggttggaaactatgtcacgtcttccgtctgtataccgtggtgatggccggtcacccacccaaccaccgtggagaaggcatgattgacttcgtggcagagttggcacgcatgacactggtggtgggctaccccaatgcgccagaatacacgacgattcccccgctcagtggcgaacttcctcaccgtgtccgcttggaggtccacggctacgtggggacttgcctcgctaatatggcggttgaggcgtcaggaggcacagcggatcacgcttgtcaggaggcagcctacttgatgatggccagactgcgggagcgccacaactacatcttccacgacacggcgtaccgcttccaccctcgtcgagcccacggtgacgacgtcagttccttccgtccgacagctggcgagaacgacaccacctttggtcacatgtgtactgtgatgaggggattggacaggatgcactcggacctgcacaaggcgaccaaggccttgaatgatgggaagctcatgaggatcgtcgctctgaaggatgagatagcgcgcctgaagaaggagaatgctcagttgaagggtcttccagcaccaggaggagtccggatccgcactacgcctcgtaagaggacgactgcacccgtgcgcatccagctcgcgcccaggaacccagttccgaccgcagctcctgcagcacctccagttccgcccgcagctccggcagttcctgcagctccagctccagctcccgcgttcgatctctccttcgccctagcatcagccgccaggggtccagccagtggtaccggaggttgcttgtttgggatggtctacaccaggactggcaaccgcacgacaggcgagggcagcaacggcgaagaacgcgttgatggtgtgcaccccaacagcgattccggcaatggtccgccaccacttcccgagaatccgacccttgcccaagttatggcacatcagactcagatgatggcagccatgatgcagcagatgcagcagcagcaccagcagatgcaccaaaggatgatgcagcacgccgaacagcagcaccagcagtttggtccccctccccctcagtccaagttgccagagtttctacgcgagaaggtcgcttttgccacacaccagcttcagggtcccgcgtcagcttggtgggacaaccacatggccacccgcccaccgggtactgaagtcacatgggcagagttctgccgtagcttcaggaaggcacaggtgccagatggggtcgtggcacaaaagaagagggaatttcgtgcactccaccagggcaacaggactgtgacagagtacctccacgagttcaatcgcctcgcgcgatatgcaccagaggatgtccgcaccgatgccgagaagcaggagaagttcatggcgggtctggatgatgagctgaccaaccaactgatatccggggattacgctgactttgagaggctggttgacaaggcaattcgtcaggaggaccaacgcaacaagatggacaggaagaggaaggccgcacagttcagggcacctcagggaagtcaccagaggccgcgcttcactcccggacagcagggtggacctaccaccatgatcgtccgtcagcaccgcccgttcaactccagcaactttcaccagggctctagtggcagtcagaaccaccatggaggtcagcccaaccgcggtgcagctccacgcccaccaatggcaccggcacagtcaggcccgcccgcgcaagccaagaaggagactggagcaaaaccagggtcctgcttcaactgtggcgagcttggccacttcgccgacaaatgcccgaagcccaggcgtgccgggccaaggtttatccaggctcgtgtcaaccacgcatctgcagaggaggcacaaacagcaccggaggtcgtactggtactttttgattctggtgcaacgcattctttcatttcaaagaaatttgtggggaggtatgggttaaggaaagaagagcttagcacaccaatgagagttcataccccgagaaatagttcaacctcagtcagttttagcccttcagtgctaatagaaatccaaagatcaccatttctagccaacctcattcttctcgaatccaaagacctagatgtcattcttgggatggattggctgaccaagtttaagggggtcattgattgtgcgaatcgcacagtcaccttgaccaacgagaagggagaaaccgtggtgtacaaatcaccagactcaccaaagcaaggagtctccttgaatcagattgaagcggaaatcccagtggacaccgtggagaagaacttgagaaaattggaagatatacccatagtctgcgagtatccggaagtgttccccgaagacctcactaccatgccacccaagagagagattgaattccggattgacttggcaccgggaactgctccaatctataagagaccgtacagaatggcggccaacgaattagcagaggtcaagaagcaagttgatgagcagctgcagaaagggtacattcgaccaagcacttcaccttggggcgctccggtcatttttgtggagaaaaaggataagacgaagaggatgtgcgtcgattatcgcgcacttaacgaggtcacaatcaagaataaatatcctttaccgcggatcgatgatttgtttgatcaactgaaaggagctagagtgttttctaagatagacctgcgatcaggctaccaccagttgagaatccgggaagaggatattccgaagacggccttcaccactcggtacgggctatatgagtgcacggttatgtctttcggacttaccaacgcacccgcattcttcatgaatctgatgaacaaagtgttcatggaatttctggacaagtttattgtggtgttcatcgacgacattcttatctattcaaagtctgaagaagaacatgaacaacatctccgtctagtactcgagaagttgaaggagcaccagctatacgccaagttcagcaagtgtgacttctggttgacggaagtcaaatttctgggccatgtcattacagctcagggtgtggcagttgatccatcgaacgtggagtcagttaccaaatggaccccaccgaagaccgtgtcgcagattcggagttttcttggacttgcgggttattaccgtcgattcatcgaaaatttctccagaatcgcccgacccatgactcagttgcttaagaaagatgagaagtttaaatggacagccgagtgcgataagagcttcgaggagctcaagaagaaattagtatccgcaccagttttgattctgcccgacccgacgaaagacttccaagtctattgtgatgcatcccgtcacggacttggatgcgtcctaatgcaagagggcagagtggttgcgtatgcctcgcggcagttgcgtccacacgaagggaattatccaactcatgacttggaattggcagcagtggttcatgctttgaagatctggaggcactatctgattggcaaccgctgcgaagtatatacggaccataagaactatgacatgagcattcactaccacccgggaaaggccaatgtagtggcagacgcattaagccggaaaagttactgcactgccctatgcaccgagggcatgtgtgaggaattgcggcaggagtttgagcatctcaacgtgggtattgttgaacacgggttcgtagccgctctggaagcacggcctacgctcgtggatcaagtcagagcagctcaagtaaatgattctgaaatagtagagctgaaaaagaatatgagagtcggaaaagcccgggatttccacgaggatgaacacggcacaatcaggatgggagaaagattgtgtgtacccgacgacaaggaactgaaggatctgatactcaccgaggctcatcagacccagtactccattcatccaggcagcactaaaatgtatcaagacctcaaagaaaagttttggtgggtcagcatgaggagagaaatagctgaattcgtcgcactctgcgatgtttgccagcgagtgaaggcagagcaccaaagaccagcaggtttactccaacctcttcaaatcccggaatggaaatgggaggagattggaatggactttataacgggactgccccggacatcatcgggacatgattcaatctgggtagtcgtggatcgactcaccaaggtggctcactttataccagtacataccacctatacgggaaagagattggcagaattgtacctcgcaaggatcatgtgtttgcatggggtacccaagaagatagtatccaaccgaggtagtcagttcacctcaaagttttggcagatactgcaggaagaattggggacccgtttaaatttcagcacggcctatcacccgcaaactgatggtcagaccgagcgagtcaatcaaatcttggaagatatgttgagagcttgcgctcttgattttggtggagcttgggacaaaagcttaccatatgcggaattctcgtacaacaacagctaccaggccagtctacagatggcaccgtttgaagctttatacggccggaagtgccgcacacctctcttctgggatcagacaggcgaacgtcaactgttcggaatagaagtattagcggaagcagaacagaaagtcagaatcatcagggaaagattgaggattgctcagtctcgacagaagagctacgcggataaccgtcgaagggagctcacttttgaggcaggagattacgtgtatcttcgtgtcactccgctccgaggagtacaccgttttcagacgaaaggcaagctggcaccacgcttcgtgggaccatacaaaattttggaacgaaggggagaagttgcttatcagctagaacttccatccaacatgatcggcatccatgacgtgttccatgtgtcccaattaaagaaatgcttaagggtacctgaagaacaggctgattcggaacacattgatatccaagaggacctaacatatgtggagaagccggttcgtatacttgataccagtgaaaggagaaccagaaacaaggtcaccaggttttgctga

SEQ ID NO: 13801 - DNA, 1326 bp, Oryza sativa
  Clone ID: TFbOSC26672j.C1.o1.fg
atggtctacaccaggaatggcacccgcacaacaggcgagggcagcaacggcgaagagcgcactgatggtgtgcaccccaacagtgattccgacaatagtccgccaccacttcccgagaatccgacgctggcccaagtgatggcacatcagactcagatgatggcagccatgatgcaacagatgcagcagcagcaccaacagatgcaccagaggatgcaacagcacgccgaacagcatcaccagcagtttggtccccctccccctcaatccaaactgccagaatttctacgtgtcaggccacccactttctccagcaccaccaaccccatggaggcaaatgactgggtccatgccatagagaagaagctgaatctcctgcagtgcaatgatcaggagaaggtcgctttcgccacacaccagctccaaggtcccgcgtcagctcggtgggacaaccacatggccacacgtccgccaggcacggaagtcacttgggcaaagttctgtcgcagcttcaggaaggcgcagaagcaggagaaattcctagcaggtctggatgatgagctaaccaaccagttgatatctggagactacgccgactttgaaaggctggttgacaaggcaatccgtcaggaggatcagcgcaacaaaatggacaggaagagaaaggcggcacagtttcggtccagccaaggaaaccatcagcgaccgcgcttcactcccggacagcagggtggacctaccaccatgatcgtccgccagcaccgcccgttcaactcaagcaactttcaccagggcgccagtggtagtcagaaccaccatggaggtcagccccaccgcggtgtagctccacgcccactagtggcaccagcacagtcagctccgcccgcgcaagccaagaaggagaccagaacaaagccagggtcctgcttcaactgtggtgagcttggtcacttcgccgacaaatgcccaaagcctaggcgtgccgggccaaggttcgtccaggctcgtgtcaaccacgcgtctgcagaggaggcgcaagcagcaccagaggtcgtactgggtacgtttcctgttaactcaatccctgcaacagtactttttgattctggtgcaacgcattcgttcatttcaaagaagtttgtggggatgaatgggttaaggaaagaagagcttagtacaccaatgagggttcataccccgggaaatagttcaacctcggtcaattttagcccttcagtgctaatagaaattcaaatatcaccatttctagccaacctcattcttcttaactccaaagacctagatgtcattcttgggatggattga

SEQ ID NO: 13802 - DNA, 2898 bp, Oryza sativa
  Clone ID: TFbOSC26672j.C1.o4.gm
atggtctacaccaggaatggcacccgcacaacaggcgagggcagcaacggcgaagagcgcactgatggtgtgcaccccaacagtgattccgacaatagtccgccaccacttcccgagaatccgacgctggcccaagtgatggcacatcagactcagatgatggcagccatgatgcaacagatgcagcagcagcaccaacagatgcaccagaggatgcaacagcacgccgaacagcatcaccagcagtttggtccccctccccctcaatccaaactgccagaatttctacgtgtcaggccacccactttctccagcaccaccaaccccatggaggcaaatgactgggtccatgccatagagaagaagctgaatctcctgcagtgcaatgatcaggagaaggtcgctttcgccacacaccagctccaaggtcccgcgtcagctcggtgggacaaccacatggccacacgtccgccaggcacggaagtcacttgggcaaagttctgtcgcagcttcaggaaggcgcaggagaaattcctagcaggtctggatgatgagctaaccaaccagttgatatctggagactacgccgactttgaaaggctggttgacaaggcaatccgtcaggaggatcagcgcaacaaaatggacaggaagagaaaggcggcacagtttcggtccagccaaggaaaccatcagcgaccgcgcttcactcccggacagcagggtggacctaccaccatgatcgtccgccagcaccgcccgttcaactcaagcaactttcaccagggcgccagtggtagtcagaaccaccatggaggtcagccccaccgcggtgtagctccacgcccactagtggcaccagcacagtcagctccgcccgcgcaagccaagaaggagaccagaacaaagccagggtcctgcttcaactgtggtgagcttggtcacttcgccgacaaatgcccaaagcctaggcgtgccgggccaaggttcgtccaggctcgtgtcaaccacgcgtctgcagaggaggcgcaagcagcaccagaggtcgtactggaggtcaagaagcaggttgatgagcaactgcagaaatggtgcattcgaacgagtacttcaccttggggtgctccagtcatttttgtggagaaaaaggataagacgaagaggatgtgcgtcgattatcgcgcactcaacgaggagcacgagttatacgccaagtttagcaagtgtgacttctggttgacggaagtcaaatttctgggccatgttattacagctcagggcgtagcagttgatccatctaatgtggagtcagttaccaaatggaccccaccgaagaccgtgtcgcagattcggagttttcttggacttgcgggttattaccgccgattcatcgaaaacttctccaggatcgcccgacccatgactcagttacttaagaaagatgagaagtttaaatggacagctgagtgcgataagagttttgaggagctcaaaaagaaattagtatccgcaccagttttgattctgcccgaccagatgaaagacttccaagtctattgcgacgcatcccgccacgggcttggatggaaagccaatgtggtggcagatgcattaagcaggaaaagttactgcactgccctatgcatcgagggcatgtgtgaggaattgcagcagttgtttgagcgtctcaacgtgggaattgttgaacaggggttcgtagccgctctagaaacacggcctacgctcgtcgatcaagttagagccgctcaagtaaatgatcctgaaatagcagaactgaaaaagaacatgagagtcggaaaagctcgagatttccttgaggatgagcatggcacaatctggatgggggaaagattgtgcgtacctgacgacaaagaactgaaggatatgatactcaccgaggctcatcagacacagtattccattcacccaggcagcaccaaaatgtaccaagacctcaaagaaaagctttggtgggtcagcatgagaagagaaatagttgaatttgtcgcactctgcgatgtttgccagcgagtgaaggcagagcaccaaaggccagcaggcttactccaacctcttaaaatcccggaatggaaatgggaggaaattggaatggattttataacaagactgccccggacatcatcgggcgagcgtcaactgtttggaacagaggtgttagcggaggcagaagagaaagtcataaccatcagggaaaggttgagaattgcccagtctcgacagaagagctacgcggataaccgccgaagggagctcacttttgaagcaggggattacgtgtatcttcgtgttactccgctccggggagtgcaccgttttcaaaccaaaggcaagttggcaccacgcttcgtgggaccctacaaaatcttggaacgaaggggagaagttgcttatcagctagagcttccttccaatatgatcggcatccatgatgtgttccacgtatcccaattaaagaagtgtttgagggtacctgaagaacaggccaattcggagcacatcgatatccaggaggatctgacctacgtggagaagccaattcgcattcttaagaccagtgaaagaagaactagaaacaaggtcaccaggtggggcccacctgtcggacccgtctcccacctcgcgcccgcgccgccgcgccggcaaccgccgccgcgcccacgcctccgcctcctccgggccacggtcgtcgccacaccgcaccgtcgccgccgacgggttcgcgaggccgaactccaccccgtccgcccctcctccgtcgagggcatcccgaagctcgtccgccggttgccgtcgtcctcccgtggctcgccgtcgccgttcgacgtcgtcttcctccgcgccggccaccctcggtga

SEQ ID NO: 13803 - DNA, 5397 bp, Oryza sativa
  Clone ID: TFbOSC26865j.C1.o1.fg
atggccggtcacccacccaaccaccgcggagaaggcatgatcgatttcgtggcagagttggcacgcatgacattggtggtgggctaccccgacgcgccggagtacacgaccatcccaccgctcagtggcgagcttcctcaccgtgtccgcttggaggtccatggttacgtggggacttgcctcgctaacatggcggtcgaggcgtcaggaggcacagcagatcatgcctgtcaggaggcagcctacctgatgatggccagactacgggagcgccacaactacatcttccacgacacggcgtaccgctaccaccccagtcgagcccacggtgatggcgtcagctccttccgtccgacagctggcgagaacgacaccaccttcggtcacatgtgcgcggtgatgaggggtctggacaggatgcactcggatctgcacaaggcgactaaggccttgaatgatgggaagctcatgaggatcgtcgctttgaaggacgagatagcgcgtctgaagaaggagaacgctcagcttaagggtctcccagcgccaggaggagtccggatccgcactacgccccgcaagactacgaaggcacccgtgcgcatccagctcgcgcccaggaacccacctccagcagcagctcccgcagcacctccagttccgcccgcagctcctgcagctccagttcctgcagctccagctccagctcccgcgttcgttctctccttcgccccagcgtcagccgtcagaggtccagccagtggcatcgggggttggttgcctgctacccccagtggcagccgcgatcgcagctccagtggctcgcagacgggcagcagcgagacgtacctgccaggctccaggagtcgttcagagggacctggttgcttgtttgggatggtcaacaccaggactggcaaccgcacgacaggcgagggcagcaacggtgaagaacgcgttgatggtatgcaccccaacggcgatcccggcaacggtccgccaccacttcccgagaatccgacacttgcccaagttatggcgcatcagactcagatgatggcagccatgatgcagcagatgcagcaacagcaccagcagatgcaccagaggatgatgcagtacgctgaacagcagcaccagcagtttggtccccctccccctcagtccaagttgcctgagttcctacgagtcaggccacccaccttctctagcaccaccaaccctatggaggcaaacgactggctccatgcaatagagaagaagctgaatctcctgcagtgcaatgatcaggagaaggtcgctttcgccacacaccagcttcagggtcctgcgtcagcttggtgggacaaccacatggccacccgcccaccgggtacggaagtcacctgggcagagttctgccgtagcttcaggaaggcacaggtgccagatggggtcgtggcacaaaagaagagggaatttcgcgcactccatcagggcaacaggacggtgacagagtacctccacgagttcaatcgcctcgcgcgatatgcaccagaggatgtccgcaccgacgccgagaagcaggagaagttcatggcgggcctggatgacgaactgaccaaccaactgatatctggggactacgccgactttgagaggctagtcgacaaggcaattcgtcaagaggaccaacgcaacaagatggacaggaagaggaaggccgctcagttcagggcacatcagggaagtcaccagaggccgcgtttcactcccggacagcagggtggacctaccaccatgatcgtccgtcagcaccgcccgttcaaccctagcaacttccaccagggcaccagtggcagtcagaaccaccatggaggtcagcccaaccgcggtgcagctccacgcccaccaatggccccggcacagtcaggccagcccacgcaagccaagaaggagactggagcaaaaccagggtcctgcttcaactgtggcgagcttggtcacttcgcggacaaatgcccgaagcccaggcgtgccgggccaaggtttatccaggctcgtgtcaaccacgcatctgcggaggaggcacaagcagcaccagaggtcgtactgggtacgtttcctgttaactcaatccctgcaacagtactttttgattctggtgcaacgcattcgttcatctcaaagaaatttgtcgggatgcatgggttaataagagaagaacttagcacaccgatgcgggttcataccccagggaatagctccacttcggttcaattcagcccttctataacaatagaaatccaaagatcaccatttctagccaacctcatccttctcgactccaaaggcctagatgtcatcctcgggatggattggctgactaagtttaagggagtcatcgattgtgcgaatcgcacagtcaccttaaccaacgagaagggagaaaccgtggtgtacaaatccctagtctcgccaaggaaaggggtctcgttgaatcagattgagacagaaatcccagtggacaccgtagagaagaactcgagaaaattggatgatatacccatagtctgcgagtatccggaagtgttccccgaagacctcactaccatgccacccaagagagagattgaattccggattgacttggcaccgggaaccgctccaatctataagagaccgtacagaatggcggccaacgaattagcggaggtcaagaagcaagttgatgaacagctgcagaaagggtacatacgaccaagcacttcgccttggggcgctccggtcatttttgtggagaaaaaagataagacgaagaggatgtgcgtcgattatcgcgcacttaacgaggtcacaatcaagaataaatatcctttgccgcggatcgacgatttatttgatcaactgaaaggggctaaagtgttttctaagatagacctgcgctcaggctaccaccagttgagaatccgggaagaggatatcccgaagacggccttcaccacgcggtacgggctatatgagtgcacggttatgtccttcggacttaccaacgcacccgcattcttcatgaatctgatgaacaaagtgttcatggaatttctggacaagtttgttgtggtgttcatcgacgacattttgatctattcaaagtccgaggaagaacatgaacaacatctccgtctggtactcgagaagttgaaggagcaccaactatacgccaagttcagcaagtgtgacttctggttgacggaagttaaatttctgggtcatgtcattacagcccagggtgtggcagtcgacccatcgaacgtggagtcagttaccaagtggaccccaccgaagaccgtgtcgcagattcgaagttttctaggattggccggttattaccgccgattcatcgaaaacttctccagaatcgcccgacccatgactcagttgcttaagaaagatgagaagtttaaatggacagctgagtgcgataagagttttgaggagctcaagaagaaattagtatccgcaccggttttgattctgcccgaccagatgaaagacttccaagtctattgcgatgcatcccgtcacggacttggatgtgtcctaatgcaagagggcagagtggttgcatatgcctcgcggcagttgcgtccacacgaaggaaattatccaactcatgacttggaattggcagcagtggttcatgctttgaagatctggaggcactatctgattggcaaccgctgcgaagtatatacggaccataagagtctgaaatacatcttcacccaaccggacctaaaccttcgacaacgaagatggttggagctaatcaaagactatgacatgagtattcactaccacccgggtaaagccaatgtggtggcagacgctttaagccggaaaagttactgcactgccctatgcaccgagggcatgtgtgaggaattgcggcaggagtttgaacatctcaacataggaattgttgaacacgggttcgtagccgctctggaggcacggccgacgctcgtggatcaagttagagccgctcaagtaaatgacccggaaatagcagagctgaaaaagaacatgagagtcggaaaggctcgggatttccttgaggatgagcatggcacaatctggatgggagaaagattgtgtgtacctgacgacaaggaattgaaggatctgatactcaccgaggctcatcagacccagtactccattcaccccggcagcaccaaaatgtatcaagatctcaaagaaaagttttggtgggtcagcatgaggagagaaatagctgagttcgtcgcactctgcgatgtttgccaacgagtgaaggcagagcaccaaagaccagcaggtctactccaacctcttcaaatcccggaatggaaatgggaagagattggaatggattttataacgggactgccccggacatcatcgggacatgattcaatctgggtagtcgtggatcgactcaccaaggtggctcacttcataccagtacataccacctatacgggaaagagattggcagagttgtacctcgcaaggatcatgtgtttgcatggggtacccaggaagatagtatctgaccgagggagtcagttcacctcaaaattctggcagaagttgcaggaagaattggggacccgtttaaatttcagcacggcctatcatccgcaaactgacggtcaaaccgagcgagtaaatcaaatcttggaagatatgttgagagcatgcgctcttgattttggtggagcttgggacaaaagcttgccatatgcggaattctcgtacaacaacagctaccaggccagtctacagatggcaccgtttgaagctttatacggccggaagtgccgcacacctctcttctgggatcagacaggcgagcgtcaactgttcggaacagaagtattagcagaagcagaagagaaagtcagaatcatcagggaaaggttgaggattgcccagtctcgacagaagagctacgcggataaccgtcgaagggagctcacctttgaggcaggagattacgtgtatcttcgtgtcactccgctccggggagtacaccgttttcagacgaaaggcaagttggcaccacgcttcgtgggaccatacaaaattttggaacgaaggggagaagttgcctaccagctagaacttccgtccaacatgatcggcatccatgacgtgttccacgtatcccaattaaagaagtgcttaagggtacctgaggaacaggctgattcggaacacatcgatatccaggaggacctgacctatgtggagaagccggttcgcatacttgataccagcgaaaggaggaccagaaacaaggtcaccaggttttgccgagttcaatggagtcatcatccgaagaggaagcaacctgggaaagggaagatgagttga

SEQ ID NO: 13804 - DNA, 3477 bp, Oryza sativa
  Clone ID: TFbOSC26925j.C1.o1.fg
atggcaccggcacagtcaggcccgtccgtgcaagccaagaaggagactggagcaaaaccagggtcctgcttcaactgtggcgagcttggccacttcgctgacaaatgcccgaagcctaggcgtgccgggccaaggtttgtccaggctcgtgtcaaccacgcatctgcggaggaggcacaagcagcaccagaggtcgtactgggtacgtttcctgttaactcaatccctgcaacagtactttttgattctggtgcaacccattctttcatttcaaagaaatttgtggggatgcatgggttaaggaaagaagagcttagcacaccaatgagggttcataccccgggaaatagttcaaccttagtcagttttagcccttcagtgctaatagaaatccaaagatcaccatttctagccaacctcattcttctcgaatccaaagacctagatgtcattcttgggatggattggctgaccaagtttaagggagtcatcgattgtgcgaatcgcacagtcaccttgaccaacgagaagggagaagccgtggtgtacaaatcactagtctcaccaaagcaaggggtctccttgaatcagattgaggcggaaatcccagtggacaccgtggagaagaatttgaggaaattggaagacatacccatagtctgcgagtatccagaagtgttccccgaagaccttactaccatgccacccaagagagagattgaattccgaattgacttggcaccgggaaccgctccaatttacaaaagaccgtacagaatggcggccaacgaactagcagaggtcaagaagcaggttgatgagcagctgcagaaagggtacattcgaccaagtacttcaccttggggtgctccggtcatttttgtggagaaaaaggataagacgaagaggatgtgcgttgattatcgcgcacttaacgaggtcacaatcaagaacaaatatcccttgccgcgaatcgatgatttgtttgatcaactgaaaggagctaaagtgttttctaagatagacctgcgatcaggctaccaccagttgaggattcgggaagaggatattccaaagacggccttcaccacccggtacgggctatatgagtgcacggttatgtctttcggacttaccaacgcacctgcattcttcatgaatctgatgaacaaagtgttcatggaatttctggacaagtttgttgtggtattcatcgacgacatacttatctattcaaagtccgaagaagaacatgagcaacatctccgtctggtactcgagaagttgaaggagcaccagctatatgccaagttcagcaagtgtgacttctggttgacggaagtcaaatttttgggccatgtcattacagctcagggttattaccgccgattcatcgaaaacttctccaggatcgcccgacccatgactcaattgcttaagaaagatgagaagtttaaatggacagctgagtgcggtaagagttttgaggagctcaaaaagaagttagtatccgcaccagttttgattctgcccgaccagatgaaagacttccaagtctattgcgatgcatcccgccacggacttggatgtgtcctaatgcaggagggcagagtggttgcgtatgcctcgcggcagttgcgtccacacgaagggaattatccaactcatgacctggaattggcagcagtggttcatgctttgaagatctggaggcactatctgattggcaaccgctgcgaagtatatacggaccataagagtctgaaatacatcttcacccaaccggacctaaatctccgacaacgaagatggttggaactaatcaaagactatgacatgagcattcactaccacccgggtgaagccaacgtggtggcagatgcattaagcaggaaaagttactgcactgccctatgcatcgagggcatgtgtgaggaattgcggcaggagtttgagcatctcaacgtaggaattgttgaacacaggttcgtagccgctttggaggcacggcctacgctcgtggatcaagttagagccgctcaagtgaatgatgccgaaatagcagagctaaaaaagaacatgagagtcggaaaggctcggaatttccttgaggatgaacacggcacaatctggttgggagaaagattgtgtgtacctgacgacaaggaactgaaggatctgatactcaccgaggctcatcagacccagtactccattcatccaggcagcaccaaaatgtatcaagacctcaaagaaaagttttggttggtcagcatgaggagagaaatagctgaattcgtcgcactctacgatgtttgccaacgagtgaaggcagggcaccaaagaccagcaggtctactccaacctcttcaaatcccggaatggaaatgggaggagattggaatggactttataacaggactgccccggacatcgtcgggtcatgattccatctgggtagtcgtggatcgacttactaaggttgctcacttcataccagtacataccacgtatacgggcaaaaggttggtggagctttacctttcgagaatcatgtgtctacatggagtacccaaaaagattgtatctgatcgagggagtcagttcacctcaaaattctggcagaagctgcaggaagaattggggacccatttaaattttagcacggcctatcacccgcaaactgatggtcagaccgagcgagtcaatcaaatcctggaagatatgttgagagcttgcgctctcgattttggtggagcttgggacaaaaacttgccatatgcggaattctcgtacaacaacagctaccaggccagtctacagatggcaccgtttgaagctttatacggccggaagtgccgcacacctctcttctgggatcagacaggcgagcgtcaactgttcgggacagaggtattaacggaagcggaagagaaagtcagaatcatcagggaaaggttgaggattgcccagtctcgacagaagagctacgcggataaccgccgaagggagctcacttttgaggcaggagattacgtgtatcttcgtgtcactccgctccggggagtacaccgttttcagacgaaaggcaagttggcaccatgcttcgtgggaccctacaaaatcttggaacgaaggggagaagttgcttatcagttagaacttccatccaatatgatcggcatccatgacgtgttccacgtgtcccaattaaagaagtgcttaagggtacttgaagaacaggctgattcggaacacattgatatccaggaggatctaacatatgtggagaagccggttcgtatacttgataccagcgaaagaagaaccagaaacaaggtcaccaggttttgccgagttcagtggagtcaccattcagaagaggaagcaacctgggaaagggaagatgagttgaaagccgcccatccgcacctcttcgccagctcctccgaatctcggggccgagattccgtataa

SEQ ID NO: 13805 - DNA, 1708 bp, Oryza sativa
  Clone ID: TFbOSC27102j.C1.o1.gm
atggcacatcagacccagatgatggcagccatgatgcagcaccagcaccagcagatgcaccagcggatgctgcagcacgccgaacagcagcatcaacagtttggtccccctccccctcagtccaagttgccagagtttctacgtgtcaggccacccaccttctccagcaccaccaaccctatggaggcgaatgactggctccatgccatagagaagaagctgaatctcctgcaatgcaatgatcaggagaaggttgctttcgccacacaccagcttcaaggtcccgcgtcagcttggtgggacaatcacatggccacccgcccaccaggcaacaggactgtgacagagtacctccacgagttcaatcgcctcgcgcgatatgcaccagagaatgtccgcaccgacgcccaaaagcaggaaaagttcatggcggagatccacgccaccaagatggacaggaaaaagaaagccgcacagttcagggcacctcagggaagtcaccaaaggccgcgcttcgctcccaggcagcagggtggacctaccaccatgatcgttggtcagcaccgcccgttcaaccctagcaactttccccagggcgccagtggcagtcagaaccaccatggaggtcagtccaaccgcggtgcagctccacgcccaccaatggcaccggcacagtcaggcccgcccgcgcaagccaagaaggagactggagcaaaaccagggtcctgcttcaactgtggtgagcttggccacttcgctgacaaatgcccgaagcctaggcgtgccgggccaaggtttatccaggctcgtgtcaaccacgcatctgcggaggaggcacaagcagcaccagaggttgtactggtcaccttgaccaacgagaagggagaaaccgtggtgtacaaatcactagtctcaccaaagcaaggggtctctttgaatcagattgaagcagaaatcccagtggacaccgtggagaagaatttgaggaaattggaagatatacccatagtctgcgaaatggcggccaacgaattagccgaggtcaagaagcaggttgatgagcagctgcagaaagggtacattcgaccaagtacttcaccttggggtgctccggtcatttttgtagagaaaaaggataagacgaagaggatgtgcgttgattatcgcgcactcaacgaggtcaccatcaagaacaaatatcctttgccgcgaatcgatgatttgtttgatcaactgaaaggagctaaagtgttttctaagatagacctgcgatcaggctaccaccagttgagaattcgggaggaggatattccgaagacggccttcaccactcggtacgggctatatgagtgcacggttatgtcgttcggacttaccaacgcacccgcattcttcatgaatctgatgaacaaagtgttaatggaatttctggacaagtttgttgtggtgttcatcgacgacattcttatctattcaacgtccgaagaagaacatgaacaacatctccgtctagtactcgagaagttaaaggagcaccagctatacgccaagttcagcaagtgtgacttctggttgacggaagtcaaatttctgggccatgtcattacagctcagggtgtggcagttgatccatcaaacgtggagtcagttaccaaatggaccccgccgaagaccgtgtcgcagattcgaagttttcttggacttgcag

SEQ ID NO: 13806 - DNA, 2625 bp, Oryza sativa
  Clone ID: TFbOSC27726j.C1.o2.gm
atggtctacaccaggaatggcacccgcacaacaggcgagggcagcaacggcgaagagcgcactgatggtgtgcaccccaacagtgattccgacaatagtccgccaccacttcccgagaatccgacgctggcccaagtgatggcacatcagactcagatgatggcagccatgatgcaacagatgcagcagcagcaccaacagatgcaccagaggatgcaacagcacgccgaacagcatcaccagcagtttggtccccctccccctcaatccaaactgccagaatttctacgtgtcaggccacccactttctccagcaccaccaaccccatggaggcaaatgactgggtccatgccatagagaagaagctgaatctcctgcagtgcaatgatcaggagaaggtcgctttcgccacacaccagctccaaggtcccgcgaaggcgcaggtgccagacggggtcgtggcacaaaagaagagggaattccgggcactccatcagagcaacaggacagagaaattcctagcaggtctggatgatgagctaaccaaccagttgatatctggagactacgccgactttgaaaggctggttgacaaggcaatccgtcaggaggatcagcgcaacaaaatggacaggaagagaaaggcggcacagtttcggtccagccaaggaaaccatcagcgaccgcgcttcactcccggacagcagggtggacctaccaccatgatcgtccgccagcaccgcccgttcaactcaagcaactttcaccagggcgccagtggtagtcagaaccaccatggaggtcagccccaccgcggtgtagctccacgcccactagtggcaccagcacagtcagctccgcccgcgcaagccaagaaggagaccagaacaaagccagggtcctgcttcaactgtggtgagcttggtcacttcgccgacaaatgcccaaagcctaggcgtgccgggccaaggttcgtccaggctcgtgtcaaccacgcgtctgcagaggaggcgcaagcagcaccagaggtcgtactggaggtcaagaagcaggttgatgagcaactgcagaaatggtgcattcgaacgagtacttcaccttggggtgctccagtcatttttgtggagaaaaaggataagacgaagaggatgtgcgtcgattatcgcgcactcaacgaggtcacaatcaagaataaatatcctttaccacggatcgatgacttgttcgatcaactgaagggagctaaggagcacgagttatacgccaagtttagcaagtgtgacttctggttgacggaagtcaaatttctgggccatgttattacagctcagggcgtagcagttgatccatctaatgtggagtcagttaccaaatggaccccaccgaagaccgtgtcgcagattcggagttttcttggacttgcgggttattaccgccgattcatcgaaaacttctccaggatcgcccgacccatgactcagttacttaagaaagatgagaagtttaaatggacagctgagtgcgataagagttttgaggagctcaaaaagaaattagtatccgcaccagttttgattctgcccgaccagatgaaagacttccaagtctattgcgacgcatcccgccacgggcttggatggaaagccaatgtggtggcagatgcattaagcaggaaaagttactgcactgccctatgcatcgagggcatgtgtgaggaattgcagcagttgtttgagcgtctcaacgtgggaattgttgaacaggggttcgtagccgctctagaaacacggcctacgctcgtcgatcaagttagagccgctcaagtaaatgatcctgaaatagcagaactgaaaaagaacatgagagtcggaaaagctcgagatttccttgaggatgagcatggcacaatctggatgggggaaagattgtgcgtacctgacgacaaagaactgaaggatatgatactcaccgaggctcatcagacacagtattccattcacccaggcagcaccaaaatgtaccaagacctcaaagaaaagctttggtgggtcagcatgagaagagaaatagttgaatttgtcgcactctgcgatgtttgccagcgagtgaaggcagagcaccaaaggccagcaggcttactccaacctcttaaaatcccggaatggaaatgggaggaaattggaatggattttataacaagactgccccggacatcatcggaggtgttagcggaggcagaagagaaagtcataaccatcagggaaaggttgagaattgcccagtctcgacagaagagctacgcggataaccgccgaagggagctcacttttgaagcaggggattacgccaattcggagcacatcgatatccaggaggatctgacctacgtggagaagccaattcgcattcttaagaccagtgaaagaagaactagaaacaaggtcaccagggtcgtcgccacaccgcaccgtcgccgccgacgggttcgcgaggccgaactccaccccgtccgcccctcctccgtcgagggcatcccgaagctcgtccgccggttgccgtcgtcctcccgtggctcgccgtcgccgttcgacgtcgtcttcctccgcgccggccaccctcggtga

SEQ ID NO: 13807 - DNA, 1097 bp, Oryza sativa
  Clone ID: TFbOSC27726j.C1.o2.np
atgcgtcagctagagaaaagctacactacaagcccagccgttgcccacgctggcttgtgggctgacgtcatcaaggggggcagcgccgacaggcggggcccgcatgtcagtggcgcaagggcggccggtccaccgtggaccggaccacgtgggtggtccaccgccggtccacgggaccgacggcccagatcgacccggggccgatcggacgggcggcggcggcctcgctcggctcggctcggcacaaggccggccgaccggccacggcaagggcggcggcgcgcgcgcgcacgcgttgccggcgacggcaaccggcggcggatgcggcggcgcaaaggcggcgcgaaagcggcggcgctaaagcggcggctaggaaggagagggaggggaatagaggggaggggatgcctcaccgagggtggccggcgcggaggaagacgacgtcgaacggcgacggcgagccacgggaggacgacggcaaccggcggacgagcttcgggatgccctaaggaaggaaaagagatagattagagggagggagatgaaccacggcggccggaatccatggccgaaggcggcggtaggggtagagctcaccggagtgcgaggggatgcgggttccggcgacggacctcgacggaggaggggcggacggggtggaggacgtggccggtaggggcgggatttcgccagccaatgtggggagtgggggaggagagagaggcgggattcgaaaatcgaatcccggccatctcgcgcgcgggcgcgggcgagagagagggggagtgggcgcgggaggtgcggcgcatgcgcgggcgtggccgacgtggcccggaggaggcggaggcgtgggcgcggcggcggttgccggcgcggcggcgcgggcgcgaggtgggagacgggtccgacaggtgggccccacctgtcagcgaccccgggtgagaggagggaggcggccggcccgcgcggcttagctgggccttggccttcggccggcccagcgggaggggaggggaggaaggagaatgggccggcggcccattcaaaagaaaagagaaaggaaaataaggaaaaggaaaaagaattttccagggatt

SEQ ID NO: 13808 - DNA, 3387 bp, Oryza sativa
  Clone ID: TFbOSC29445j.C1.o1.fg
atgatcgtccgccagcaccgcccgttcaaccctagcaacttccatcagggcactagtggcagtcagaaccaccatggaggccagcccaaccgcggtgcagctccacgcccaccaatggcaccggcacagtcaggccagcccgcacaagccaagaaggagacgggagcaaaaccagggtcctgcttcaactgtggcgagcttggccacttcgctgacaaatgcccgaagcccaggcgtgccggaccaaggtttatccaggctcgtgtcaaccacgcatctgcggaggaggcacaagcagcaccagaggtcgtactgggtacgtttcctgttaactcaatccctgcaacagtactttttgattctggtgcaacgcattctttcatctccaagaaatttgtcgggatgcatgggttaataagagaggaacttagcacaccgatgcgggttcataccccagggaatagctccacttcggttcaattcagcccttctataacaatagaaattcaaaggtcaccgtttctagccaacctcatccttctcgaatccaaagacctagatgtcattcttgggatggattggctgaccaagtttaagggagtcatcgattgtgcgaatcgcacagtcaccctgaccaatgagaaaggagaaaccgtggaaccgctccaatctataagagaccgtatagaatggcggctcaacgaattagcggaggtcaagaagcaagttgatgaacagctgcagaaagggtacatacgaccaagcacttcaccttggggcgctccggtcatttttgtggataaaaaggataagacaaagaggatgtgcgtcgattatcgcgcacttaacgaggtcacaatcaagaataaatatcctttgccgcgaatcgacgatttatttgatcaactgaaaggagctaaagtgttctataagatagacctgcgatcaggctaccaccatttgagaatccgggaagaggatattcccaagacggccttcaccactcggtacgggctatatgagtgtacggttatgtccttcggacttactaacgcacccgcattcttcatgaatctgatgaacaaagtgttcatggaatttctggacaagtttgttgtggtgttcatcgacgacatacttatctactcaaaatccgaggaagaacatgagcaacatctccgtttgccccagggtgtagcagttgatccatcgaacgtggagtcggttaccaagtggaccccaccgaagacagtgtcgcagattcgaagttttctaggactggctggttattaccgtcgtttcatcgaaaacttctcaagaatcgcccgacccatgactcagttgcttaagaaagacgagaagtttaaatggacagctgagtgcgacaagaactttgaggagctcaaaaggaaattagtatccgcaccggttttgatcctgcccgaccagacgaaagacttccaagtctattgcgatgcatcccgtcacggacttggatgtgtcctaatgcaagagggcagagtggttgcatatgcctcgcggcagttgcgtccacacgaaggaaattatccaactcatgacttggaattggcagcagtggttcatgctttgaagatctggaggcactatctgattggcaaccgctgcgaagtatatacggaccataagagtctgaaatacatcttcacccaaccagacctaaaccttcgacaacgaagatggttggaactaatcaaagactatgacatgagtattcactaccacccgggtaaagccaatgtggtggcagacgctttaagccggaaaagttactgcactgctctatgcatcgaggacatgtgtgaggaattgcgacaggagcttgaacatctcaacatgggaattgttgaacacgggttcgtagccgctctggaggcacggcctacgctcgtggatcaagttagagccgctcaagtaaatgatccggaaatagcagaactgaaaaagaacatgagagtcggaaaggctcgggatttccttgaggatgagcatggcacaatctggatgggagaaagattgtgtgtaccggacgacaaggaattgaaggatctgatactcaccgaagctcatcagacccagtactccattcatccaggcagcactaaaatgtatcaagacctcaaagagaagttttggtgggtcagcatgaggagagaaatagctgaattcgtcgcactctgcgatgtttgccagcgagtgaaagcagagcaccaaagaccagcaggtttactccaacctcttcaaatcccggaatggaaatgggaggagattggaatggactttataacgggactgccccggacatcatcgggacatgattcaatctgggtagtcgtggaccgactcaccaaggtggctcactttataccagtacataccacctatacgggaaagagattggcagaattgtatctcgcaaggatcatgtgtttgcatggggtacccaagaagatagtatccgaccgaggtagtcagttcacctcaaagttctggcagaagctgcaggaagaattggggacccgtttgaatttcagcacggcctatcacccgcaaactgatggtcagaccgagcgagtcaatcaaatcctggaagatatgttaagagcttgcgctcttgattttggtggagcttgggacaaaagcttaccatatgcggaattctcgtataacaacagctaccaggccagtctacagatggcaccgtttgaagctctatacggccggaagtgccgcacacctcttttctgggatcagacaggcgaacgtcaactgttcggaacggaagtattagcggaagcagaagagaaagtcagaatcatcagggaaaggttgagaattgctcagtctcgacagaagagctacgcggataaccgccgaagggagctcacttttgaggcaggagattacgtgtatcttcgtgtcaccccgctccggggagtacaccgctttcagacaaaaggcaagttggcaccacgcttcgtgggaccatacaaaatcttggaacgaaggggagaagttgcttatcagctagaacttccatccaatatgatcggcatccatgacgtgttccacgtgtcccaattaaagaagtgtttaagggtacccgaagaacaggctgattcggaacacattgatatccaggaggacctgacatatgtggagaagccggttcgcatacttgataccagtgaaaggagaaccagaaacaaggtcacccggttttgccgagttcagtggagtcatcattcggaagaggaagcaacctgggaaagggaagatgagttgaaagccgcccatccgcacctcttcaccagctcctccgaatctcggggccgagattccgtttaa

SEQ ID NO: 13809 - DNA, 3192 bp, Oryza sativa
  Clone ID: TFbOSC30155j.C1.o4.gm
atggtctacaccaggactggtagccgcgcaacaggcgagggcagcaacggtgaagaacgcgctgatggtgtgcaccccaacggtgattctggcaatggtccgccaccacttcccgagaatccgacgcttgcccaagttatggcacatcagactcagatgatggccgcgatgatgcagcagatgcagcagcagcaccagcagatgcatcagaggatgatgcagcacgccgaacagcagcaccagcagtttggtccccctccccctcagtccaagttgcctgagtttctacgtgtcaggccacccaccttctccagcaccaccaaccctatggaggcaaatgactggctccatgcgatagagaagaagctgaatctcctgcagtgcaatgatcaggagaaggtcgctttcgccacacaccagcttcaggagttctgccgtagctttaggaaggcacaggtgccagacggggttgtagcgcaaaagaagagggaattccgggcgctccatcagggcaacaggacagtgacagagtacctccacgagttcaatcgcctcgcgcgatatgcaccagaggatgtccgcactgacgccgagaaacaggaaaagtttatggcaggcctggatgacgagctgaccaaccaactgatatccggggactacgctgactttgaaaggctggtcgacaaggcaatccgtcaggaggatcagcgcaacaaaatggacaggaaaagaaaggcggcgcagttccgatccaaccaaggtagtcagcaccgaccgcgcttcactcccggacagcagggtggacctaccaccatgatcgtccgacagcaccgcccgttccactctagcaacttccaccagggcgctagcggcagtcagaaccaccagggaggccagcccaaccgcggtgcagctccacgcccaccaatggcaccggcacagtcagcccagcccgcgcaagccaagaaggagacgggagcaaaaccagggtcttgcttcaactgtggcgagcttggccacttcgctgacaaatgcccgaagcccaggcgtgccgggctaaggtttatccaggctcgtgtcaaccacgcgtctgcggaggaggcacaagcagcaccagaggtcgtactggtcaccctgaccaatgagaaaggagaaaccgtggtgtacaaatctctagtctcgccaaagaaaggagcctcgttgaatcagattgagacggaaatcccagtggacaccgaagagaagaacttgagaaaattggaggacatacccatagtctgcgagtatccagaggtgttccccgaagacctcaccaccatgccacccaagagggagattgaattccggattgatttggcaccaggaaccgctccaatctataagagaccgtacagaatggcggccaacgaattagcggaggtcaagaagcaagttgatgaacagctgcagaaagggtacatacgaccaagcacttcaccttggggcgctccggtcatttttgtggagaaaaaggataagacgaagaggatgtgcgtcgattatcgcgcacttaacgaggtcacaatcaagaataaatatcctttaccgcggatcgacgatttgtttgatcaactgaaaggagctaaagtgttttctaagatagacctgcgatcaggttaccaccagttgagaatccgggaagaggatattccgaagacggccttcaccactcggtacgggctatacgagtgcacggttatgtctttcggacttactaacgcacccgcattcttcatgaatctgatgaacaaagtgttcatggaatttctggacaagtttgttgtggtattcatcgacgacattcttatctattcaaagtccgaagaggaacatgaacaacatctccgtctggtactcgagaagttgaaggagcaccagctatacgccaagttcagcaagtgtgacttctggttgacggaagtcaaatttctgggtcatgtcattacagctcagggtgtagcagttgatccatcgaacgtggagtcagttacaaaatggaccccaccaaagaccgtgtcgcagattcggagttttctaggactggcaggttattaccgccgattcatcgaaaacttctccagaatcgcccgacccatgactcagttgcttaagaaagacgagaagtttaaatggacagctgagtgcgacaagagctttgaggagctcaaaaggaaattagtatccgcaccggttttgatcctgcccgaccagacgaaagacttccaagtctattgcgatgcatcccgtcacggacttggatgtgtcctaatgcaagagggcagagtggttgcatatgcctcgcggcagttgcgtccacacgaaggaaattatccaactcatgacttggaattggcagcagtggtccacgctttgaagatctggaggcactatctgatcggcaaccgctgcgaagtatatacggaccataaaagtctgaaatacatcttcacccaaccagatctaaaccttcgacaacgaagatggttggaactaatcaaagactatgacatgagtattcactaccacccgggtaaagccaatgtggtggcagacgctttaagccggaaaagttactgcactgctctatgcatcgagggcatgtgtgaggaattgcggcaggagtttgaacatctcaacgttggaattgttgaacacgggttcgtagccgctctggaggcacggcctacgctcgtggatcaagttagagccgctcaagtaaatgatccggaaatagcagaactgaaaaagaacatgagagtcggaaaagctcgggatttccacgaggatgagcatggcacaatctggatgggagaaagattgtgtgtaccggacgacaaggaattgaaggatctgatactcaccgaagctcatcagacccagtactccattcacccaggcagcaccaaaatgtaccaagaccttaaagaaaaattttggtgggtcagcatgaggagagaaatagctgaattcgtcgcactctgcgatgtttgccaacgagtgaaagcagagcaccaaagaccagcaggtttactccaacctcttcaaatcccggaatggaaatgggaggagattggaatggactttataacaggactgccccggacatcatcgggacatgattcaatctgggtagtcgtggatcgacttaccaag

SEQ ID NO: 13810 - DNA, 5392 bp, Oryza sativa
  Clone ID: TFbOSC32699j.C1.o2.np
atggccggtcacccacccaaccaccgcggtgaaggcatgatcgactttgtggcagagctggcacgcatgacactggtagtgggctaccccgacgcgccggagtacacgacgattccgccgctcagtggcgagcttcctcaccgtgtccgcttggaggtccatggttacgtggggacttgcctcgctaacatggcggtcgaggcgtcaggaggcacagcagatcacgcttgtcaggaggcagcctacctgatgatggccagactacgggagcgccacaactacattttccacggcacggcgtaccgctaccaccccagtcgagcccacggtgatggcgtcagctccttccgtccaacagctggcgagaacgacaccacctttggccacatgtgtgcggtgatgaggggtttggacaggatgcactcggatctgcacaaggcgaccaaggccttgaatgatgggaagctcatgaggatcgtcgctctgaaggacgagatagcgcgtctgaagaaggagaacgctcagctgaagggtctcccagcgccaggaggagtccggatccgcactacgccccgtaagaggacgactgcacctgtgcgcatccagcttgcgcccaggaacccacctccaccagcagcccccgcagcagctccagctccgcccgcagttcctgcagctccagctccagctcccgcgttcactctctccttcgctccagcatcagccgccagaggttcagccagtggtaccggaggttggctgtctgctactcccagtggcagcggcgagactgatccgtcagactccaggagtcgctcagagggaccggatggtctacaccaggactggtaaccgcacgacaggcgagggcagcaacggtgaagaacgcgttgatggtgtgcatcccaacggcgatcccggcaacggtccgccaccacctcccgagaatccgaccctggcccaagttatggcgcatcagactcagatgatggcagccatgatgcagcagatgcagcagcagcaccagcagatgcaccagaggatgatgcagtacgctgaacagcagcaccagcagtttggtccccctcccccgcaatccaagttgcctgagttcctgcgagtcaggccacccaccttctccagcaccaccaaccccatggaggcaaacgactggctccatgcaatagagaagaagctgaatctcctgcagtgcaatgatcaggagaaggtcgctttcgccacacaccagcttcagggtcctgcgtccgcttggtgggacaaccacatggccacccgcccaccgggtactgaagtcacatgggcagagttctgccgtagcttcaggaaggcacaggtgccagatggggtcgtggcacaaaagaagagggaatttcgtgcactccatcagggcaacaggacggtgacagagtacctccacgagttcaatcgcctcgcgcgatatgcaccggaggatgtccgcactgacgccgagaaacaagaaaagtttatggcaggcctggatgacgagctgaccaaccaactgatatccggggactacgctgactttgaaaggctggttgacaaggcaatccgtcaggaggatcagcgcaacaaaatggacaggaaaagaaaggcggcgcagttccggtccaaccaaggtagtcagcaccgaccgcgcttcactcctggacagcagggtggacctaccaccatgatcgtccgtcagcaccgcccgttccactctggcaacttccaccagggcgctagcggcagtcagaaccaccagggaggccagcccaaccgcggtgcagctccacgcccaccaatggcaccagcacagtcagcccagcccgcgcaagccaagaaggagacgggagcaaaaccagggtcctgcttcaactgtggcgagcttggccacttcgctgacaaatgcccgaagcccaggcgtgccggaccaaggtttatccaggctcgtgtcaaccacgcatctgcggaggaggcacaagcagcaccagaggtcgtactgggtacgtttcctgttaactcaatccctgcaacagtactttttgattctggtgcaacgcattctttcatctccaagaaatttgtcggggtgcatgggttaataagagaggaacttagcacaccgatgcgggttcataccccagggaatagctcctcttcggttcaattcagcccttctataacaatagaaattcaagggtcaccgtttctagccaacctcatccttctcgaatccaaagacctagatgtcattcttgggatggattggctgaccaagtttaagggagtcatcgattgtgcgaatcgcacagtcaccctgaccaatgagaaaggagaaaccgtggtgtacaaatctctagtctcgccaaagaaaggagcctcgttgaatcagattgagacggaaatcccagtggacaccgaagagaagaacttgagaaaattggaggacatacccatagtctgcgagtatccagaggtgttccccgaagacctcaccaccatgccacccaagagggagattgaattccggattgatttggcaccaggaaccgctccaatctataagagaccgtacagaatggcggccaacgaattagcagaggtcaagaagcaagttgacgaacagctgcagaaagggtacattcgaccaagcacttcaccttggggcgctccggtcatttttgtggagaaaaaggataagacaaagaggatgtgcgtcgattatcgcgcacttaacgaggtcacaatcaagaataaatatcctttgccgcgaatcgacgatttatttgatcaactgaaaggagctaaagtgttctctaagatagacctgcgatcaggctaccaccagttgagaatccgggaagaggatattccgaagacggccttcaccactcggtacgggctatatgagtgcacggttatgtccttcggacttactaacgcacccgcattcttcatgaatctgatgaacaaagtgttcatggaatttttggacaagtttgttgtggtattcatcgacgacattcttatctattcaaagtccgaagaggaacatgaacaacatctccgtctggtactcgagaagttgaaggagcaccagctatacgccaagttcagcaagtgtgacttctggttgacggaagtcaaatttctgggtcatgtcattacagctcagggtgtagcagttgatccatcgaacgtggagtcagttaccaagtggaccccaccgaagacagtgtcgcagattcgaagttttctaggactggctggttattaccgtcgtttcatcgaaaacttctcaagaatcgcccgacccatgactcagttgcttaagaaagacgagaagtttaaatggacagctgagtgcgacaagagctttgaggagctcaaaaggaaattagtatccgcaccggttttgatcctgcccgaccagacgaaagacttccaagtctattgcgatgcatcccgtcacggacttggatgcgtcctaatgcaagagggcagagtggttgcatacgcctcgcggcagttgcgtccacacgaaggaaactatccaactcatgacttggaattggcagcagtggtccatgccctgaagatctggaggcactatctgatcggcaaccgctgcgaagtatatacggaccataaaagtctgaaatacatcttcacccaaccggacctaaaccttcgacaacgaagatggttggaactaatcaaagactacgacatgagtatccactaccacccgggtaaagccaatgtggtggcagacgctttaagccggaaaagttactgcactgctctatgcatcgagggcatgtgtgaggaattgagacaggagcttgaacatctcaacatgggaattgttgaacacgggttcgtagccgctctggaggcacggcctacgctcgtggatcaagttagagccgctcaagtaaatgatccggaaatagcagaactgaaaaagaacatgagagtcggaaaggctcgggatttccttgaggatgagcatggcacaatctggatgggagaaagattgtgtgtaccggacgacaaggaattgaaggatctgatactcaccgaagctcatcagacccagtactccattcatccaggcagcactaaaatgtaccaagaccttaaagaaaaattttggtgggtcagcatgagaagggaaatagctgagttcgtcgcactctgcgatgtttgccaacgagtgaaagcagagcaccaaagaccagcaggtttactccaacctcttcaaatcccggaatggaaatgggaggagattggaatggactttataacgggactgccccggacatcatcgggacatgattcaatttgggtagtcgtggatcgactcaccaaggtggctcactttataccagtacataccacctatacgggaaagagattggcagaattgtacctcgcaaggatcatgtgtttgcatggggtacccaagaagatagtatccgaccgaggtagtcagttcacctcaaagttctggcagaagctgcaggaagaattggggacccgtttaaacttcagcacggcctatcacccgcaaactgatggtcagaccgagcgtgtcaatcaaatcttggaggatatgttgagagcttgcgctcttgattttggtggagcttgggacaaaagcttaccatatgcggaattctcgtacaacaacagctactaggccagtctacagatggcaccgtttgaagctctatacggccggaagtgccgcacaccgcttttctgggatcagacaggcgaacgtcaactgttcggaacagaagtattagcggaagcagaagagaaagtcagaatcatcagggaaaggttgaggattgctcagtctcgacagaagagctacgcggataaccgccgaagggagctcacttttgaggcaggagattacgtgtatcttcgtgtcaccccgctccggggagtacaccgctttcagacaaaaggcaagttggcaccacgcttcgtgggaccatacaaaattttggaacgaagaggagaagttgcctatcaactagaacttccgtccaacatgatcggcatccatgacgtgttccacgtatcccaattaaagaagtgtttaagggtacctgaagaacaggctgattcggaacacattgatatccaggaggacctaacatatgtggagaagccggttcgtatacttgacactagcgaaaggagaaccagaaataaggtcaccaggttttgccgtgttcagtggagccatcattcagaagaggaagcaacctgggaaagggaagatgagttgaaagccgcccatccgtacctcttcaccagctcctccgaatctcggggccgagattccgtt

SEQ ID NO: 13811 - DNA, 4707 bp, Oryza sativa
  Clone ID: TFbOSC32884j.C1.o1.fg
atgaggggattggacaggatgcactcggacctgcacaaggcgaccaaggccttgaacgatgggaagctcatgaggatcgttgctctgaaggacgagatagcgcgcctgaagaaggagaacgctcagctaaagggtcttccagcgccaggaggagtccggatccgcactacgccccgcaagactacgacggcacccgtgcgcatccagcttgcgcccaggaacccacctccagcagcaactcccgcagcacctccagttccgcccgcagttcctgcagctccagctccagctcccgagtccgctctctccttcgctccagcatcagccgccagaggtccagccagtggcaccggaggttgcttgtttgggatggtctacaccaggactggtagccgcgcaacaggcgagggcagcaacggcgaagaacgcgctaatggtgtgcaccccagcagtgattccggcaatggtccgccaccacttcctgagaatccgacgctagcccaagttatggcacatcagactcagatgatggcagccatgatgcagcagatgcagcagcagcaccagcagatgcaccagaggatgatgcagcacgccgaacagcagcaccagcagtttggtccccctccccctcagtccaagttgcctgagttcctacgtgtcaggccacccaccttctccagcaccaccaaccctatggaggcaaatgactggctccatgcgatagagaagaagctgaacctcctgcagtgcaatgatcaggagaaggtcgctttcgccacacaccagcttcagggtcctgcgtcagcctggtgggacaatcacatggccacccgcccaccgggtactgaagtcacttgggtagagttctgccgtagcttcaggaaggcacaggtgccagatggggtcatggcacaaaagaagagggaatttcgtgcactccatcagggcaacaggactgtgacagagtacctccacgagttcaatcgcctcgcgcgatatgcaacagagaatgtccgcaccgacgccgagaagcaggaaaagttcatggcgggtttggatgatgagctgaccaaccaactgatatccggggactacgctgactttgagtggctggttgacaaggcaatccgccaggaggatcaacgcaacaagatggacaggaagaggaaggccgctcagttcagggcacctcagggaagtcaccagaggccgcgcttcactcccggacagcagggtggacctaccaccatgatcgtccgtcagcaccgcccgttcaactccagcaacttccaccagggctctagtggcagtcagaaccaccatggaggtcagcccaaccgcggtgcagctccacgcccacccatggcaccggcacagtcaggcccgcccgcgcaagccaagaaggagacgggagcaaaaccagggtcctgcttcaactgtggtgagcttggccacttcgctgacaaatgcccgaagcccaggcgtgccgggccaaggtttatccaggctcgtgtcaaccacgcgtctgcagaggaggcacaaacagcaccggaggtcgtactaggtacgttccctgttaactcaatccctgcaacagtactttttgattctggtgcaacgcattctttcatttcaaagaaatttgtggggatgtatgggttaaggaaagaagagcttagcacaccaatgagggttcataccccggggaatagttcaacctcagtcagttttagcccttcagtgctaatagaaattcaaagattaccatttctagccaacctcattcttcttgaatccaaatacctagatgtcattcttgggatggattggctgactaagttcaagggagtcatcgattgtgcgaatcgcacagtcaccttgaccaacgagaagggagaaacggtagtgtacaaatcactagccccgccaaagcaaggggtctccttgaaccagatcgagatggaagtcccagtggtcaccgaggagaagaatttgaagaaattggaagacatacccatagtctccgagtatccagaagtgttccctgaagacctcactaccataccacccaagagggagattgaattccggattgacttggcaccgggaaccgctcccatttacaagagaccgtacagaatggcggccaacgaattagccgaggtcaagaagcaggttgatgagcagctgcagaaagggtacatccgaccaagtacttcaccttggggtgctccggtcatttttgtggagaaaaaggataagacgaagagaatgtgcgttgattatcgcgcactcaacgagttgagaatccgggaagaggatattccgaagacggccttcaccactcggtacgggctatatgagtgcacggttatgtctttcggacttaccaacgcacccgcattcttcatgaatctgatgaacaaagtgttcatggaatttctggacaagtttgttgtggtgttcatcgacgacattcttatctattcaaagtccgaggaggaacatgaacaacatctccgtctagtactcgagaagttgaaggagcaccagctatacgccaagttcaacaagtgtgacttctggttgacggaagtaaaatttctgggtcatgtcattacagctcagggtgtggcagtcgacccatcgaacgtggagtcagttaccaaatggaccccacctaagaccgtgtcgcagattcggagttttcttggacttgcgggttattaccgccgattcatcgaaaatttctccagaatcgcccgacccatgactcagttgcttaagaaagatgagaagtttaaatggacagctgagtgcgataagagtttcgaggagctcaagaagaaattagtatccgcaccagttttgattctgcccgacccgacgaaagacttccaagtctattgtgatgcatcccgtcacggacttggatgtgtcctaatgcaagagggcagagtggttgcgtatgcctcgcggcagttgcgtccacacgaaggaaattatccaacgcatgacttggaattggcagcagtggttcatgctttgaagatctggaggcactatctgattggcaaccgctgcgaaatatatacggaccataagagtctgaaatacatcttcacccaaccggacctaaatctccggcaacgaagatggttggaactaatcaaagactatgacatgagtattcactaccacccgggtaaagccaatgtggtggcagacgctttaagccggaaaagttactgcactgccctatgcatcgagggcatgtgtgaggaattgcggcaggagtttgggcatctcaacgtgggaattgttgaacacaggttcgtagccgctctggaggcacggcctacgctcgtggatcaagttagagccgctcaagtaaatgatccggaaatagcagagctgaaaaagaacatgagagtcggaaaggctcgggatttccttgaggatgagcatggcacgatctggatggtagaaagattgtgtgtacctgacgacaaggaattgaaggatctgatactcaccgaggctcatcagacccagtactccattcacccaggcagcactaaaatgtatcaagacctcaaagaaaagttttggtgggtcagcatgaggagagaaatagctgaattcgtcgcactctgcgatgtttgccaacgagtgaaggcagagcaccaaagaccagcaggtggctcactttataccagtgcataccacctatacggaaagagattggcagaattgtacctcgcaaggatcatgtgtttgcatggggtacccaagaagatagtatccgaccgaggtagtcagttcacctcaaaattttggcagaagctacaggaagaattggggacccgtttaaatttcagcacggcctatcacccgcaaactgatggtcagaccgagcgagtcaatttaatcttggaagatatgttgagagcttgcgctcttgattttggtggagcttgggacaaaagcttgccatatgcggaattctcgtacaacaacagctaccaggccagtctacagatggcaccgtttgaagctttatacggtcggaagctttatacagccatatgcgctttattctgggatcagacaggcgaacgtcaactgttcggaacagaggtattagcggaagtagaagagaaagtcagaatcatcagggaaaggttgagaattgctcagtctcgacagaagagctacgcggataaccgtcgaagggagctcacttttgaggaaggagattacgtgtatcttcgtgtcactccgctccggggagtacaccatttccagacaaaaggcaagttggcaccacgcttcgtgggaccatacaaaattttggaacgaaggggagaagttgcttatcagctagaacttccatcaaacatgatcggcatccatgacgtgttccatgtgtcccaattaaagaagtgcttaagggtacctgaagaacaggttgattcggagcacattgatatccaagaggacctaacctatgtggagaagccggttcgtatacttgataccagcgaaagaagaaccagaaataaggtcaccaggttttgccgagttcagtggaatcatcattcagaagaggaagcaacctgggaaagggaagatgagttgaaagccgcccatccgcacctcttcaccagctcctccgaatctcggggccgagattccgtttaa

SEQ ID NO: 13812 - DNA, 5160 bp, Oryza sativa
  Clone ID: TFbOSC34305j.C1.o1.fg
atggcggtcgaggcatctggaggcacagcagatcacgcctgtcaggaggcagcctacttgatgatggccagactacgggagcgccacaactacatcttccacgacacggcgtaccgctaccaccccagtcgagccaacggtgatggcgtcagctccttccgtccgacagctggcgagaacgacaccaccttcggtcacatgtgtgctgtgatgaggggattggacaggatgcactcggacctgcacaaggcgaccaaggccttgaacgatgggaagctcatgaggatcgtcgctttgaaggacgagatagcgcgcctgaagaaggagaacgctcagctaaagggtcttccagcgccaggaggagtccggatccgcaccacgccccgcaagacgacgacggcacccgtgcgcatccagcttgcacccagaaacccacctccagcagcagctcccgcagcacctccagttccgcccgcagttcctgcagctccagctccagctccagctccagctcccgcgtccgctctctccttcgctccagcgtcagccgccagaggtccagccagtggcaccgggggttggttgtctgctactcccagtggcagccgcgatctcagcagcagcagctccagtggctcgcagtcaggcagcggcgagacgtatctgccaggctccaggagtcgctcagagggacctggttgtttgtttgggtcagacgacggtcgatatcatgtgcctatgatggtctacaccaggactggcaaccgcacgacaggcgagggcagcaacggcgaagaacgcgttgatggcgtgcaccccaacagtgattccggcaatggtccgccaccacttcccgagaatccgacccttgcccaagttatggcgcatcagactcagatgatggcagccatgatgcagcagatgcagcaacaacaccagcaaatgcaccagaggatgatgcagcacgtcgaacagcagcaccagcactttggtccccctccccctcaatccaaattgcctgagttcctaggagtcaggccacccaccttctccagcaccaccaaccctatggaggcaaatgactggctccatgcaatagagaagaagctgaatctcctgcagtgcaatgatcaggagaaggtcgctttcgccacacaccagcttcagggtcctgcgtcagcttggtgggacaaccacatggccacccgcccaccgggtactgaagtcacatgggcagagttctgccgtagcttcaggaaggcacaagtgccagatggggtcgtggcacaaaagaagagggaatttcgtgcactccatcagggtaacaggacggtgacagagtacctccacgagttcaatcgcctcacgcgatatgcaccagaggatgtccgcaccgacgccgagaagcaggagaagttcatggcgggcctggatgatgagctgaccaaccagctgatatccgggtactacgctgactttgagaggctggttgacaaggcaatccgtcaggaggaccaacgcaacaagatggacaggaagaggaaggccgctcagttcagggcacatcagggaagtcaccagaggccgcgcttcactcccggacagcagggtggacctaccaccatgatcgtccgtcagcaccgcccgttcaaccctagcaacttctaccagggcaccagtgacagtcagaaccaccatggaggtcagcccaaccgcggtgcagctccacgcccaccagtggcatcggcacagtcaggccagcccgcgcaagccaagaaggagacggaagcaaaaccagggtcttgcttcaactgtggcgagcttggccacttcgctgacaaatgcccgaagcctaggcgtgccgggccaaggtttatccaggctcgtgtcaaccacgcatctgcggaggaggcacaagcagcaccagaggttgtactgggtacgtttcctgttaactcaatccctgcaacagtactttttgattctggtgcaacgcattctttcatctcaaagaaatttgtcgggatgcatgggttaataagagaggaacttagcacaccgatgcgggttcataccccagggaatagctccacttcggttcaattcagcccttctataacaatagaaattcaaaggtcaccggttctagccaacctcatccttctcgaatccaaagacctagatgtcattcttgggatggattggctgaccaagtttaagggagtcatcgattgtgcgaatcgcacagtcaccctgaccaacgagaagggagaaaccgtggtgtacaaatctctagtctcgccaaagaaaggagtctcgttgaatcagattgagacggaaatcccagtggacaccgtagagaagaacttgagaaaattggatgatatacccatagtctgcgagtatccagaggtgttccccgaagacctcactaccatgccacccaagagagagattgaattccggattgatttggcaccgggaaccgctccaatctataagagaccgtacagaatggcggccaacgaattaacggaggtcaagaagcaagttgatgaacagctgcagaaagggtacatacgaccaagcacttcaccttggggcgctccggtcatttttgtggagaaaaaggataagacgaagaggatgtgcgtcgattatcgcgcacttaacgaggtcacaatcaagaataaatatcctttgccgcgaatcgacgatttatttgatcaactgaaaggggctaaagtgttttctaagatagacctgcgctcaggctaccaccagttgagaatccgggaagaggatatcccgaagacggccttcaccactcggtacgggttatatgagtgcacggttatgtccttcggacttactaacgcgcctgcattcttcatgaatctgatgaacaaagtgttcatagaatttctggacaagtttgttgtggtattcatcgacgacatacttatctactcaaaatccgaagaagaacatgaacaacatctccgtctggtactcgagaagttgaaggagcaccagctatacgccaagttcagcaagtgtgatttctggttgacggaagtcaaatttctgggtcatgtcattacagctcagggtgtggcagtcgacccatcgaacgtggagtcagttaccaagtggaccccaccgaagactgtgtcgcagattcgaagttttctaggactggcaggttattaccgtcgattcatcggaaacttctccagaatcgcccgacccatgactcagttgcttaagaaagatgagaaatttaaatggacagcggagtgcgataagagctttgaggagctcaagaagaaattagtatccgcaccagttttgattctgcccgaccagatgaaagacttccaagtttattgcgatgcatcccgtcacggacttggatgtgtcctaatgcaagagggcagagtggttgcatatgcctcgcggcagttgcgtccacacgaaggaaattatccaactcatgacttggagttggcagcggtggttcatgctttgaagatctggaggcactatctgatcggcaaccgctgcgaagtatatacggaccataaaagtctgaaatacatcttcacccaaccggacctaaactttcgacaacgaagatggttggagctaatcaaagactatgacatgagtattcactaccacccgggtaaggccaatgtggtggcagacgctttaagccggaaaagttactgcactgctctatgcatcgagagcatgtgtgaggaattgcggcaggagtttgaacatctcaacataggaattgttgaacacgggttcgtagccgctctggaggcacggcctacgctcgtggatcaagtcagagccgctcaagtaaatgatccggaaatagcagaactgaaaaagaacatgagagtcggaaaggctcgggatttccttaaggatgagcatggcacaatctggatgggagaaagattgtgtgtacctgacgacaaggaattgaaggatctgatactcaccgaggctcatcagacccagtactccattcacccaggcagcaccaaaatgtatcaagacctcaaagaaaagttttggtgggtcagcatgaggagagaaatagctgaattcgtcgcactctgcgatgtttgccaacgagtgaaggcagagcaccaaagacccacagtacataccacatatacgggcaaaaggttggcggagctttacctttcgagaatcatgtgcctacatggagtactcaaaaagattgtatctgaccgagggagtcagttcacctcaaaattctggcagaagctgcaggaagaattggggacccgtttaaatttcagcacggcctatcacccgcaaactgatggccagaccgagcgggtcaatcaaatcttggaagatatgttgagagcttgcgctcttgattttggtggagcttgggacaaaagcttgccatatgcggaattctcgtacaacaacagctaccaggccagtctacagatggcaccgtttgaagctttatacggccggaagtgccgcacacctctcttctgggatcagacaggcgaacgtcaactattcggaacagaagtattagcggaagcagaagagaaagtcagaatcatcagggaaaggttgaggattgctcagtctcgacagaagagctacgcggataaccgtcgaagggagctcacttttgaggcaggagatcacgtgtaccttcgcgtcactccgctccggggagtacaccgttttcagacgaaaggcaagttggcaccacgcttcgtgggaccatacaaaatcttggaacgaaggggagaagtggcttatcagctagaacttccatccaacatgatcggcatccatgacgtgttccacgtgtcccaactaaagaagtgcttaagggtacctgaagaacaggctgattcggaacacattgatatccaggaagacctaacttatgttgagaagccggttcgtatactggataccagcgaaaggagaaccagaaacaaggtcacccggttttgccgagttcagtggagtcatcattcggaagaggaagcaacctgggaaagggaagatgagttgaaagccgcccatccgcacctcttcaccagctcctccgaatctcggggccgagattccgtttaa

SEQ ID NO: 13813 - DNA, 3340 bp, Oryza sativa
  Clone ID: TFbOSC34569j.C1.o1.gm
atggtctacaccaggactggcaaccgcacgacaggcgagggcagcaacggtgaagaacgcgctgatggtgtgcaccccaacagtgattccggcaatggtccgccaccacttcccgagaatccgacccttgcccaagttatggcacatcaaactcagatgatggcagccatgatgcagcagatgcagcagcagcaccagcagatgcaccagaggatgatgcagcacgccgaacagcagcaccagcagtttggtccccctccccctcagtccaagttgccagaatttctacgcgtcaggccacccaccttctccagcaccaccaaccccatggaggcgaatgactggctccatgcaatagagaagaagctgaacctcctgcagtgtaatgatcaggagaaggtcgcttttgccacacaccagcttcagggtcctgcgtcagcttggtgggacaaccacatggccacccgcccaccgggtactgaagtcacatgggcagagttctgccgtagcttcaggaaggcacaggtgccagacggggtcgtggcacaaaagaagagggaattccgggagctccatcagggcaacaggactgtgacagagtacctccatgagttcaatcgcctcgcgcgatatgcaccagaggatgtccgcaccgacgccgagaagcaggagaagttcatggcgggtctggatgacgagctgaccaaccaactgatatctggggactacgccgactttgagaggctggttgacaaggcaatccgccaggaggatcaacgcaacaagatggataggaagaggaaggccgctcagttcagggcacatcagggaagtcaccagaggctgcgcttcactcccgggcagcagggtggacctaccaccatgatcgtccgtcagcaccgcccgttcaaccccagcaacttccaccagggctccagtggcagccagaatcaccatggaagtcagcccaaccgcggtacagctccacgcccaccgatggcaccggcacagtcaggcccgcccgcacaagccaagaaggagacgggagcaaagccagggtcctgcttcaactgtggcgagcttggccacttcgctgacaaatgcccgaagcccaggcgtgccgggccaaggtttatccaggctcgtgtcaaccacgcatctgcggaggaggcacaagcagcaccagaggttgtactggtcaccctgaccaatgagaaaggagaaaccgtggtgtacaaatctctagtctcgccaaagaaaggagcctcgttgaatcagattgagacggaaatcccagtggacatcgaagagaagaacttgagaaaattggaggacatacccatagtctgcgagtatccagaggtgttccccgaagacctcaccaccatgccacccaagagggagattgaattccggattgatttggcaccaggaaccgctccaatctataagagaccgtacagaatggcggccaacgaattagcggaggtcaagaagcaagttgatgagcagctgcagaaagggtacatacgaccaagcacttcaccttggggcgctccggtcatttttgtggagaaaaaggataagacgaagaggatgtgcgtcgattatcgcgcacttaacgaggtcacaatcaagaataaatatcccttaccgcgaatcgacgatttatttgatcaactgaaaggagctaaagtgttctctaagatagacctgcgatcaggctaccaccagttgagaacccgggaagaggatattccgaagacggccttcaccactcggtacgggctatatgagtgcacggttatgtctttcggacttaccaacgcacccgcattcttcatgaatctgatgaacaaagtgttcatggaatttctggacaagtttgttgtggtattcatcgacgacattcttatctattcaaagtccgaggaagaacatgaacaacatctccgtctggtactcgagaagttgaaggagcaccagctatacgccaagttcagcaagtgtgacttctggttgacggaagtaaaatttctgggtcatgtcattacagctcagggtgtggcagtcgacccatcgaacgtggagtcagttaccaaatggaccccacctaagaccgtgtcgcagattcgaagttttctaggactggctggttattaccgtcgtttcatcgaaaacttctcaagaatcgcccgacccatgactcagttgcttaagaaagacgagaagtttaaatggacagctgagtgcgacaagagctttgaggagctcaaaaggaaattagtatccgcaccggtgttgatcctgcccgaccagacgaaagacttccaagtctattgcgatgcctcccgtcacggacttggatgtgtcctaatgcaagagggcagagtggttgcatatgcctcgcggcagttgcgtccacacgaaggaaattatccaactcatgacttggaattggcagcagtggttcatgctttgaagatctggaggcactatctgattggcaaccgctgcgaagtatatacggaccataagagtctgaagtacatcttcacccaaccggacctaaatctccgacaacgaagatggttggaactaatcaaagactacgacatgagtattcactaccacccgggtaaagccaatgtggtggcagacgctttaagccggaaaagttactgcactgccctatgcatcgagggcatgtgtgaggaattgcggcaggagtttgagcatctcaacgtgggaattgttgaacacgggttcgtagccgctctggaggcacggcctacgctcgtggatcaagttagagccgctcaagtaaatgatccggaaatagcagaactgaaaaagaacatgagagtcggaaaggctcgggatttccttgaggatgagcatggcacaatctggatgggagaaagattgtgtgtaccggacgacaaggaattgaaggatctgatactcaccgaagctcatcagacccagtactccattcatccaggcagcactaaaatgtatcaagacctcaaagagaagttttggtgggtcagcatgaggagagaaatagctgaattcgtcgcactctgcgatgtttgccaacgagtgaaagcagagcaccaaagaccagcaggtttactccaacctcttcaaatcccggaatggaaatgggaggagattggaatggactttataacaggactgccccggacatcatcgggtgggggccccaccctgtcggaccccgggttccctccttcccgccgttccccgctcgcggcctcccacccggcgctgccggacgccgtcgccggaggcctccgttttcttccggggcacg

SEQ ID NO: 13814 - DNA, 5358 bp, Oryza sativa
  Clone ID: TFbOSC400177j.C1.o45.fg
atggccggtcacccacccaaccaccgcggagaaggcatgattgatttcgtggcagagttggcacgcatgaccctggtggtgggctaccccgacgcgccggagtacacgacgattccgccgctcagtggcgagcttcctcaccgtgtccgcttggaggtccatggttacgtggggacttgcctcgctaacatggcggtcgaggcatctggaggcacagcagatcacgcctgtcaggaggcagcctacttgatgatggccagactacgggagcgccacgactacatcttccacgacacggcgtaccgctaccacccccgtcgagcccatggtgatggcgtcagctccttccgtccgacagctggcgagaacgacaccaccttcggtcacatgtgtgctgtgatgaggggattggaccggatgcactcggacctgcacaaggcgaccaaggccttgaatgatgggaagctcatgaggatcgtcgctctgaaggacgagatagcgcgcctgaagaaggagaatgctcagttgaagggtcttccagcaccaggaggagtccggatccgcactacgccccgtaagaggacgactgcacccgtgcgcatccagcttgcgcccaggaacccacctccaccagcagctcccgcagcacctccagttccgcccgcagctccggcagttcccgcagttcctccagctccagctccagctccagctcccgcgttcactctctccttcgctccagcatcagccgccagaggtccagccagtggtaccggaggttgcttgtttgggatggtttacaccaggactggcaaccgcacgacaggcgagggcagcaacggcgaagaacgcgtggatggtgtgcaccccaacagtgattctggcaatggtccgccaccacttcccgagaatccgacccttgcccaagttatggcacatcagactcagatgatggcagccatgatgcagcagatgcagcagcagcaccagcagatgcaccagaggatgatgcagcacgccgaacagcagcaccagcagtttggtccccctccccctcagtccaagttgccggagtttctacgtgtcaggccacccaccttctccagcaccaccaaccctatggaggcaaatgactggctccatgcgatagagaagaagctgaatctcctgcagtgcaatgatcaggagaaggtcgctttcgccacacaccagcttcagggtcccgcgtcagcttggtgggacaaccacatggccacccgcccaccgggtactgaagtcacgtgggcagagttctgccgtagcttcaggaaggcacaggtgccagacggggtcgtggcacaaaagaagagggaattccgggcgctccatcagggcaacaggactgtgacagagtacctccatgagttcaatcgcctcgcgcgatatgcaccagaggatgtccgcaccgacgccgagaagcaggagaagttcatggcgggtctggatgacgagctgaccaaccaactgatatctggggactacgccgactttgagaggctggttgacaaggcaatccgccaggagaatcaacgcaacaagatggacaggaagaggaaggccgctcagttcagggcaccccaggaaagtcaccagaggtcgcgcttcactcccgggcaacagggtggacctaccaccatgattgttcgtcaacaccgcccgttcaaccccagcaacttccaccagggctccagtggcagccagaatcaccatggaagtcagcccaaccgcggtacagctccacgcccaccgatggcaccggcacagtcaggccagcccgcacaagccaagaaggagacgggagcaaaaccagggtcctgcttcaactgtggcgagcttggccacttcgctgacaaatgcccgaagcccaggcgtgccggaccaaggtttatccaggctcgtgtcaaccacgcatctgcggaggaggcacaagcagcaccagaggtcgtactgggtacgtttcctgttaactcaatccctgcaacagtactttttgattctggtgcaacgcattctttcatctccaagaaatttgtcgggatgcatgggttaataagagaggaacttagcacaccaatgcgggttcataccccagggaatagctccacttcggttcaattcagcccttctataacaatagaaattcaaaggtcaccgtttctagccaacctcattcttctcgaatccaaagacctagatgtcattcttgggatggattggctgaccaagtttaagggggtcattgattgtgcgaatcgcacagtcaccctgaccaatgagaaaggagaaaccgtggtgtacaaatctctagtctcgccaaagaaaggagcctcgttgaatcagattgagacggaaatcccagtggacgccgaagagaagaacttgagaaaattggaggacatacccatagtctgcgagtatccagaggtgttccccgaagacctcaccaccatgccacccaagagggagattgaattccggattgatttggcaccaggaaccgctccaatctataagagaccgtacagaatggcggccaacgaattagcggaggtcaagaagcaagttgatgaacagctgcagaaagggtacatacgaccaagcacttcaccttggggcgctccggtcatttttgtggagaaaaaggataagacaaagaggatgtgcgtcgattatcgcgcacttaacgaggtcacaatcaagaataaatatcctttgccgcgaatcgacgatttatttgatcaactgaaaggagctaaagtgttctctaagatagacctgcgatcaggctaccaccagttgagaatccgggaagaggatattccgaagacggccttcaccactcggtacgggctatatgagtgcacggttatgtccttcggacttactaacgcacccgcattcttcatgaatctgatgaacaaagtgttcatggaatttctggacaagtttgttgtggtattcatcgacgacattcttatctattcaaagtccgaggaagaacatgaacaacatctccgtctagtactcgagaagttgaaggagcaccagctatacgccaagttcagcaagtgtgacttctggttgacggaagtcaaatttctgggccatgtcattacagctcagggtgtagcagttgatccatcgaacgtggagtcagttaccaagtggaccccaccgaagacagtgtcgcagattcgaagttttctaggactggctggttattaccgtcgtttcatcgaaaacttctcaagaatcgcccgacccatgactcagttgcttaagaaagacgagaagtttaaatggacagctgagtgcgacaagagctttgaggagctcaaaaggaaattagtatccgcaccggttttgatcctgcccgaccagacgaaagacttccaagtctattgcgatgcatcccgtcacggacttggatgtgtcctaatgcaagagggcagagtggttgcatatgcctcgcggcagttgcgtccacacgaaggaaattatccaactcatgacttggaattggcagcagtggtccatgctttgaagatctggaggcactatctgatcggcaaccgctgcgaagtatatacggaccataaaagtctgaaatacatcttcacccaaccagacctaaaccttcgacaacgaagatggttggaactaatcaaagactatgacatgagtattcactaccacccgggtaaagccaatgtggtggcagacgctttaagccggaaaagttactgcactgctctatgcatcgagggcatgtgtgaggaattgcgacaggagcttgaacatctcaacatgggaattgttgaacacgggttcgtagccgctctggaggcacggcctacgctcgtggatcaagttagagccgctcaagtaaatgatccggaaatagcagaactgaaaaagaacatgagagtcggaaaggctcgggatttccttgaggatgagcatggcacaatctggatgggagaaagattgtgtgtaccggacgacaaggaattgaaggatctgatactcaccgaagctcatcagacccagtactccattcatccaggcagcactaaaatgtatcaagacctcaaggaaaaattttggtgggtcagcatgaggagagaaatagctgaattcgtcgcactctgcgatgtttgccaacgagtgaaagcagagcaccaaagaccagcaggtttactccaacctcttcaaatcccggaatggaaatgggaggagattggaatggactttataacaggactgccccggacatcatcgggtcacgattcaatctgggtagtcgtggatcgactcactaaggtggctcactttataccagtacataccacctatacgggaaagagattggcagaattgtacctcgcaaggatcatgtgtttgcatggggtacccaagaagatagtatccgaccgaggtagtcagttcacctcaaagttctggcagaagctgcaggaagaattggggacccgtttaaacttcagcacggcctatcacccgcaaactgatggtcagaccgagcgtgtcaatcaaatcttggaggatatgttgagagcttgcgctcttgattttggtggagcctgggacaaaagcttaccatatgcggaattctcgtataacaacagctaccaggccagtttacagatggcaccgtttgaagctctatacggccggaagtgccgcacacctcttttctgggatcagacaggcgaacgtcaactgttcggaacagaagtattagcgggagcagaagagaaagtcagaatcatcagggagagattgaggattgctcagtctcgacagaagagctacgcggataaccgtcgaagggagctaacttttgaggccggagactacgtgtatcttcgtgtcactccgctccggggagtacaccgtttccagacgaaaggcaagttggcaccacgcttcgtgggaccatacagaatcttggaacgaaggggagaagttgcttatcagctagaacttccatccaatatgatcggcatccatgacgtgttccacgtgtcccaattaaagaagtgtttaagggtacctgaagaacaggctgattcggaacacatcgatatccaggaggacctgacatatgtggagaagccggttcgcatacttgataccagtgaaaggagaaccagaaacaaggtcacccggttttgccgagttcagtggagtcatcattcggaagaagaagcgacctgggaaagggaagatgagttgaaagccgcccatccgtacctcttcaccagctcctccgaatctcggggccgagattccgtttaa

SEQ ID NO: 13815 - DNA, 4566 bp, Oryza sativa
  Clone ID: TFbOSC400177j.C1.o63.fg
atggtctacaccaggactggcaaccgcacgacaggcgagggcagcaacggtgaagaacgcgctgatggtgtgcaccccaacagtgattctggcaatggtccgccaccacttcccgagaatccgacccttgcccaagttatggcacatcagactcagatgatggcagccatgatgcagcagatgcagcagcagcaccagcagatgcaccaaaggatgatgcagcacgccgaacagcagcaccagcagtttgatccccctccccctcagtccaagttgccggagtttctacgggtcaggccacccaccttctccagcaccaccaaccctatggaggcgaacgactggctccatgcgatagagaagaagctgaatctcctgcagtgcaatgatcaggagaaggtcgctttcgccacacaccagcttcagggtcctgcgtcagcttggtgggacaaccacatggccacccgcccaccgggtactgaagttacatgggcagagttctgccgtagcttcaggaaggcacaggtgcccgacggggtcgtggcacaaaagaagagggaattccgggcgctccatcagggcaacaggactgtgacagagtacctccatgagttcaatcgcctcgcgcgatatgcaccagaggatgtccgcaccgacgctgagaagcaggagaagttcatggcgggtttggatgacgagttgaccaaccaactgatatccggggactacgctgactttgaaaggttggttgacaaggcaatccgtcaggaggatcagcgcaacaaaatggacaggaaaagaaaggcggcgcagttccggtccaaccaaggtagtcagcaccgaccgcgcctcactcccggacagcagggtggacctaccaccatgatcgtccgtcagcaccgcccgttcaactccagcaacttccaccagggcactagtggcagtcagaaccaccatggaagtcagcccaaccgcggtacagctccacgcccaccgatggcaccggcacagtcaggccagcccgcacaagccaagaaggagacgggagcaaaaccagggtcctgcttcaactgtggcgagcttggccacttcgctgacaaatgcccgaagcccaggcgtgccggaccaaggtttatccaggctcgtgtcaaccacgcatctgcggaggaggcacaagcagcaccagaggtcgtactgggtacgtttcctgttaactcaatccctgcaacagtactttttgattctggtgcaacgcattctttcatctccaagaaatttgtcgggatgcatgggttaataagagaggaacttagcacaccgatgcgggttcataccccagggaatagctccacttcggttcaattcagcccttctataacaatagaaattcaaaggtcaccgtttctagccaacctcattcttctcgaatccaaagacctagatgtcattcttgggatggattggctgaccaagtttaagggggtcattgattgtgcgaatcgcacagtcaccctgaccaatgagaaaggagaaaccgtggtgtacaaatctctagtctcgccaaagaaaggagcctcgttgaatcagattgagacggaaatcccagtggacgccgaagagaagaacttgagaaaattggaggacatacccatagtctgcgagtatccagaggtgttccccgaagacctcaccaccatgccacccaagagggagattgaattccggattgatttggcaccaggaaccgctccaatctataagagaccgtacagaatggcggccaacgaattagcggaggtcaagaagcaagttgatgaacagctgcagaaagggtacatacgaccaagcacttcaccttggggcgctccggtcatttttgtggagaaaaaggataagacaaagaggatgtgcgtcgattatcgcgcacttaacgaggtcacaatcaagaataaatatcctttgccgcgaatcgacgatttatttgatcaactgaaaggagctaaagtgttctctaagatagacctgcgatcaggctaccaccagttgagaatccgggaagaggatattccgaagacggccttcaccactcggtacgggctatatgagtgcacggttatgtccttcggacttactaacacacccgcattcttcatgaatctgatgaacaaagtgttcatggaatttctggacaagtttgttgtggtattcatcgacgacattcttatctattcaaagtccgaggaagaacatgaacaacatctccgtctagtactcgagaagttgaaggagcaccagctatacgccaagttcagcaagtgtgacttctggttgatggaagttaaatttctgggccatgtcattacagctcagggtgtagcagttgatccatcgaatgtggagtcagttaccaagtggaccccaccgaagacagtgtcgcagattcgaagttttctaggactggctggttattaccgtcgtttcatcgaaaacttctcaagaatcgcccgacccatgactcagttgcttaagaaagacgagaagtttaaatggacagctgggtgcgacaagagctttgaggagctcaaaaggaaattagtatccgcaccggttttgatcctgcccgaccagacgaaagacttccaagtctattgcgatgcatcccgtcacggacttggatgtgtcctaatgcaagagggcagagtggttgcatatgcctcgcggcagttgcgtccacacgaaggaaattatccaactcatgacttggaattggcagcagtggtccatgctttgaagatctggaggcactatctgatcggcaaccgctgcgaagtatatacggaccataaaagtctgaaatacatcttcacccaaccagacctaaaccttcgacaacgaagatggttggaactaatcaaagactatgacatgagtattcactaccacccgggtaaagccaatgtggtggcagacgctttaagccggaaaagttactgcactgctctatgcatcgagggcatgtgtaaggaattgcgacaggagcttgaacatctcaacatgggaattgttgaacacgggttcgtagccgctctggaggcacggcctacgctcgtggatcaagttagagccgctcaagtaaatgatccggaaatagcagaactgaaaaagaacatgagagtcggaaaggctcgggatttccttgaggatgagcatggcacaatctggatgggagaaagattgtgtgtaccggacgacaaggaattgaaggatctgatacttaccgaagctcatcagacccagtactccattcatccaggcagcactaaaatgtatcaagacctcaaagagaaattttggtgggtcagcatgaggagagaaatagctgaattcgtcgcactctgcgatgtttgccaacgagtgaaagcagagcaccaaagaccagcaggtttactccaacctctccaaatcccggaatggaaatgggaggagattggaatggactttataacaggactgccccggacatcatcgggacatgattcaatctgggtagtcgtggatcgactcaccaaggtggctcacttgataccagtacataccacctatacgggaaagagattggcagaattgtacctcgcaaggatcatgtgtttgcatggggtacccaagaagatagtatccgaccgaggtagtcagttcacctcaaagttctggcagaagctgcaggaagaattggggacccgtttaaacttcagcacggcctatcacccgcaaactgatggtcagaccgagcgtgtcaatcaaatcttggaggatatgttgagagcttgcgctcttgattttggtggagcctgggacaaaagcttaccatatgcggaattctcgtacaacaacagctaccaggccagtctacagatggcaccgtttgaagctctatacggccggaagtgccgcacacctcttttctgggatcagacaggcgaacgtcaactgttcggaacagaagtattagcggaagcagaagagaaagtcagaatcatcagggagagattgaggattgctcagtctcgacagaagagctacgcggataaccgtcgaagggagctaacttttgaggccggagactacgtgtatcttcgtgtcactccgctccggggagtacaccgtttccagacgaaaggcaagttggcaccacgcttcgtgggaccatacaaaatcttggaacgaaggggagaagttgcttatcagctagaacttccatccaatatgatcggcatccatgacgtgttccacgtttcccagttaaagaagtgcttaagggtacctgaagagcaggctgattcggaacacatcgatatccaggaggacctgacttatgtggagaagccggttcgcatacttggtaccagtgaaaggagaaccagaaacaaggtcacccggttttgccgagttcagtggagtcatcattcggaagaggaagcgacctgggaaagggaagatgagttgaaagccgcccatccgtacctattcaccagctcctccgaatctcggggccgagattccgcttaa

SEQ ID NO: 13816 - DNA, 3417 bp, Oryza sativa
  Clone ID: TFbOSC400432j.C1.o20.fg
atggaggcgaatgactggctccatgacatagagaagaaactgaatctcctgcagtgcaatgatcaggagaaggttgctttcgccacacaccagcttcaaggtcctgcgtcagcttggtgggacaatcacatggccacccgcccgccaggcactgaagtcacttgggcggagttctgtcgtagcttcaggaaggcgcaggtgccagacggggtcgtggcacaaaagaagagggaatttcgggcactccatcagggcaacaggactgtgacagagtatctccatgagttcaatcgcctcgcgcgatatgcaccagaggatgtccgcaccgacgccgagaagcagaaaaagttcatggcaggtctggatgacgagctgaccaaccaactgatatctggggactacgcggattttgaaaggctggtggacaaggcaatccgtcaggaggatcagcgaaacaaaatggataggaagagaaaggcggcacagttccggtccaaccaaggaaaccatcagcgaccgcgcttcgctcccgggcagcagggtggacctaccaccatgatcgtccgccagtaccgcccgttcaaccctagcaacttccaccagggcgccagtggcagtcagaaccaccatggaggtcagcccaaccgcggtgcagctccacgcctaccagtggcaccggcacagtcaggcccgtccgcgcaagccaagaaggagactggaacaaaaccagggtcctgcttcaactgtggcgagcttggccacttcgctgacaaatgcccaaagcccaggtgtgccgggccaaggtttgtccaggctcgtgtcagccacgcgtctgcagaggaggcgcaagcagcaccagaggtcgtactgggtacatttcctgttaactcaatccctgcaacagtactttttgattctggtgcaacgcattctttcatttcaaagaaatttgtggggatgcatgggttaaggaaagaagagcttaatacaccaatgagggttcataccccgggaaatagttcaacctcggtcagttttagcccttcagtgctaatagaaatccaaagatcaccatttctagccaacctcattcttcttgaatccaaagacctagatgtcattcttgggatggattggctgaccaagttcaagggagtcattaattgtgcgaatcgcatagtcaccttgaccaacgagaagggagaaaccgcagtgtacaaatcactagtctcaccaaagcaaggggtcgccttgaatcagatggaggcggaaatcccagtggtcaccgaggagaagaatccgaggaaattggaagagattcccatagtttgcgagtacccagaagtctttcccgaagacctcactaccatgccacccaagcgagagattgaattccgaattgatttggcaccgggaaccgcgccaatttacaagagaccgtacaggatggcggccaacgagctagcagaggtcaagaagcaagttgatgagcagctgcagaaagggtacattcgaccaagtacttcaccttggggtgctccggtcatttttgtggagaaaaaggataagacaaagaggatgtgcgttgattatcgcgcactcaatgaggtcacaatcaagaataaatatcctttaccgcggatcgatgatttgtttgatcaactgaagggagctaaggtgttctctaagatagacatgagatcaggctatcaccagttgagaattcgggaagaggatatttcaaagacggccttcaccactcggtacgggctatatgagtgcacggttatgtctttcggacttaccaacgcacccgcattcttcatgaatttaatgaacaaagtgttcatggaatttctggacaagtttgttgtggtattcatcgacgacatacttatctatccaaagtctgaagaagaacatgagcagcatctccatttggtactcgagaagttgaaggagcaccagttatacgccaagttcagcaagtgtgatttttggttgacggaagtcaaatttctgggccatgttattacagctcaagttcagcaaactgagccacaaactaagccttacccactagacatgtggaagtacggtagtgctttgcaacagaggcccgagcttaatccttatagtacccgagctcagggtgtggcagttgatccatcgaacgtggagtcagttaccaaatggaccccaccgaagaccgtgtcacagattcgaagttttcttggacttgtaggttattaccgccgattcatcgaaaacttctccaggatcgcccgacccatgactcaattgcttaagaaagatgagaagtttaaatggacagctgagtgcgacaagagttttgaggagctcaaaaagaaattagtatccgcaccagttttgattctgcccgaccagatgaaagacttccaagtctattgcgatgcatcccgccacggacttggatgtgtcctaatgcaagagggcagagtggttgcgtatgcctcgcgacagttgcgtccacacgaagggaattatccaactcatgacctggaattggcagcagtggttcatgctttgaagatccggaggcactatctgattggcaaccgctgcgaagtatatatggaccataagagtctgaaatacatcttcacccaaccggacctaaatctccgacaacgaagatggttggaattaatcaaagactatgatatgagcattcactaccacccggagaaagccaatgtggtagcagacgcattaagcaggaagagttactgcactgccctaggcatcgagggcatgtgtgaggaattgcggcaggagcttgagcgtctcaacgtgggaattgttgaacacggattcgtagccgctctggaagcacggcctacgctcgcggatcaagtcagagcggctcaagtaaatgatcctgaaatagcagagctgaaaaagaatatgagagtcagaaaagcccgggattttcatgaagatgaacacggcacaatttggttgggagaaagattgtgtgtacctgacgacaaggaactgaaagatctgatactcaccgaggctcatcagactcagtactccattcatccaggcagcaccaaaatgtatcaagacctcaaagaaaagttttggtgggtcagcatgaggagagaaatagctgaattcgtcgcactctgcgatgtttgccaacgagtgaaggcagagcaccaaagaccagtaggtttactccaacctcttcaaatcccggaatggaaatgggaggagattggaatggactttataacaggactgccccggacatcatcgggtcacgattcaatctctgtcgtgaatgttaccccaacggtgctcaagagagtttgcattcctatcagactctgtcgaggagtgatcctctctagcgggaggttgtga

SEQ ID NO: 13817 - DNA, 3732 bp, Oryza sativa
  Clone ID: TFbOSC400477j.C1.o32.fg
atggtctacaccaggaatggtagccgcgcaacaggcgagggcagcaacggcgaagagcgcactgagggtgtgcatcccaacagcaattccgacaatggtccgccaccacttcccgagaatccgacgctagcccaagtgatggcacatcagactcaaatgatggcagccatgatgcagcagatgcagcagcagcaccagcagatgcaccagcggatgctgcagcatgccgaacagcagcatcagcagtttggtccccctccccctcagtccaaattgccagagtttctacgtgtcaggccacctactttctccagcaccaccaaccctatggaggcgaatgactggctccatgccatagagaagaagctgaatctcctgcagtgcaatgatcaggagaaggttgctttcgccacacaccagcttcaaggtcctgcgtcagcttggtgggacaatcacatggccacccgcccgccaggcactgaagtcacttgggcagagttctgtcatagcttcaggaaggcgcaggtgccagatggggtcgtggcacaaaagaagagagaattccgagcactgcaccaaggcaacaggacggtgacggagtatctccatgagttcaatcacctcgcgcgatatgcaccggaggatgtccgtactgacgccgagaagcaggaaaaattcctagcaggtctggatgatgagctaaccaaccagttgatatctggagattacgccgatttcgaaaggctggtagacaagacaatccgtcaggaggatcaacgcaacaagatggacaggaagaggaaggccgctcagttcagggcacctcagggaagtcaccagaggccgcgcttcgctcccgagcagcagggtggacctaccaccatgatcgtccgccagtaccgcccgttcaaccctagcaactttccccagggcgcaagtggcagtcagaaccaccatggaggtcagcccaaccgcggtgcagctccgctcccaccaatggcaccggcacagtcaggcccgtccgcgcaagccaaggaggagactggagcaaaaccagggtcctgcttcaactgtggcgagcttggccacttcgctgacaaatgcccgaagcctaggcgtgccgggccaaggtttatccaggctcgtgtcaaccacgcatctgcgaaggaggcacaagcagcaccagaggttgtactgggtacgtttcctgttaactcaatccctgcaacagtactttttgattctggtgcaacgcattcgttcatttcaaagaagtttgtcgggatgcatgggttaataagagaggaacttagcacaccaatgcgggttcataccccagggaatagctccacttcggttcaattcagcccttctataacaatagaaattcaaagatcaccatttctagccaacctcattcttctcgaatccaaagacctagatgtcattcttgggatggattggctgaccaagtttaagggagtcatcgattgttcgaatcgcacagtcaccttgaccaacgagaagggagaaacagtagtgtacaaatcaccagactcaccaaagcaagggatctctttgaatcagattgaggcggaaatcccagtggacaccgtggagaagaatttgaggaaattggaagatatacccatagtctgcgagtatccagaaatgttccccgaagaccttactaccatgccacccaagagagagattgaattccggattgacttggcaccgggaatcgctccaatttacaagagaccgtacagaatggcggccaacgaactagcagaggtcaagaagcaggttgatgagcagctgcagaaaggagctaaagtgttttctaagatagatctgcgatcaggctaccaccagttgagaattcgggaagaggatattccaaagacggccttcaccactcggtacgggctatatgagtgcacggttatgtctttcggacttaccaatgcacccgcattcttcatgaatctgatgaacaaagtgttcatggaatttctggacaagtttgttgtggtattcatcgacgacatacttatctattcaaagtccgaagaagaacatgagcaacatctccgtctggtactcgagaagttgaaggagcaccagctatacgccaagttcacttctggttattaccgccgattcatcgaaaacttctccaggatcgcccgacccatgactcagctgcttaagaaagatgagaagtttaaatggacagctgagtgcgataagagttttgaggagctcaagaagaaattagtatccgcactagttttgattctgcccgaccaaatgaaacacttccaagtctattgcgatgcatgtcgtcacggacttggatgtgtcctaatgcaagagggcagagtggttgcgtatgtctcgcggcagttgcgtccacacgaagggaattatccaactcatgacctggaattggcagcagtggttcatgctttgaagatctggaggcactatctgattggcaaccgctgcgaagtatatacggaccataagagtctgaaatacatcttcacccaaccggacctaaatctccgacaacgaagatggttggaactaatcaaagactatgacatcagcattcactaccacccgggtaaagccaatgtggtggcagacgcattaagcaggaaaagttactgcactgccctatgcatcgagggcatgtgtgaggaattgcggcaggagtttgagcatctcaacgtgggaattgttgaacacgggttcgtagccgctctggaggcacggcctacgctcgtggatcaagtcagagcagctcaagtaaatgattctgaaatagcagagctgaaaaagaacatgagagtcggaaaagcccgggatttccacgaagatgaacacggcataatctggttgggagaaagattgtgtgtacctgacgacaaggaactgaaggatctgatactcaccgaggctcatcagacccagtactccattcatccaggcagcaccaaaatgtatcaagacctcaaagaaaagttttggtgggtcagcatgacgagagaaatagctgaattcgtcgcactctgcgatgtttgccaacgagtgaaggcagagcaccaaagaccagcagtacataccacgtatacgggcaaaaggttggcggagctctacctctcgagaatcatgtgtctacatggagtacccaaaaagattgtatctgatcgagggagtcagttcacctcaaaattctggcagaagctgcaggaagaattggggacccgtttaaatttcagcacggcctatcacccgcaaactgatggtcagaccgagcgagtcaatcaaatctgggaagatatgttgagagcttgcgctcttgattttggtggagcttgggacaaaaacttgccatatgcggaattctcgtacaacaacaactaccaggccagtctacagatggcaccgtttgaagctttatacggccggaagtgccacacacctctcttctgggatcagacaggcgagcgtcaactattcgggacagaggtattagcggaagcagaagagaaagtcagaatcatcagggaaaggttgaggattgcccagtctcgacagaagagctacgcggataacccccgaagggagctcacttttgaggcaggagattacgtgtatcttcatgtcactccactcgagtttcgtcgccggaattcgcatcccctcgcgctccggtga

SEQ ID NO: 13818 - DNA, 4143 bp, Oryza sativa
  Clone ID: TFbOSC400498j.C1.o21.fg
atggaggcgaatgactggctccatgccatagagaagaagctgaatctcttgcagtgcaatgatcaggagaaggttgctttcgccacacaccagcttcaaggtcctgcgtcagcttggtgggacaatcacatggccacccgcccaccaggtactgaagtcacttgggtagagttctgccgtagcttcaggaaggcgcaggtgccagacggggtcgtggcacaaaagaagagggaatttcgggcactccatcagggcaacaggactgtgacggagtatctccatgagttcaatcgcctcgcgcgatatgcaccagaggatgtccgcaccgacgccgagaagcaggaaaagttcatggcaggtctggatgacgagctgaccaaccaactgatatctggggactacgccgactttgagaggctggttgacaaggcaatccgtcaggaggatcaacgcaacaagatggacaggaagaggaaggccgctcagttcagggcacatcagggaagtcaccagaggccgcgcttcactcctggacagcagggtggacctaccaccatgatcgtccgccagtaccgcccgttcaaccctagcaactttccccagggcgccagtggcagtcagaaccaccatggaggtcagcccaaccgcggtgcagctccacgcccaccaatggcaccggcacagtcaggcccgtccgcgcaagccaagaagaagactggagcaaaaccagggtcctgcttcaactgtggcgagcttggccacttcgctgacaaatgcccgaagcctaggcgtgccgggccaaggtttatccaggctcgtgtcaaccacgtatctgcggaggaggcacaaacagcaccagaggttgtactgggtacgtttcctgttaactcaatccctgcaacaatactttttgattctggtgcaacgcattcgttcatttcaaagaagtttgtcgggatgcatgggttaataagagaggaacttagcacaccgatgcgggttcataccccagggaatagctccacttcggttcaattcagcccttctataacaatagaaattcaaagatcaccatttctagccaaccttattcttctcgaatccaaagacctagatgtcattcttgggatggattggctgaccaagtttaagggagtcatcgattgtgcgaatcgcaccgtcaccttgaccaacgagaagggagaaacggtagtgtacaaatcaccagactcaccaaagcgaggggtctctttcaatcagattgaggcggaaatcccagtggacaccgtggagaagaatttgaggaaattggaagatatacccatagtctgcgagtatccagaagtgttccccgaagacctcactaccatgccacccaagagagagattgaattccggattgacttggcaccgggaaccgctccaatttacaagagaccgtacagaatggcggccaacgaactagcagaggtcaagaagcaggttgatgagcagcttcagaaagggtacattcgaccaagtacttcaccttggggtgctccggtcatttttgtggagaaaaaggataagacaaagaggatgtgcgttgattatcgcgcactcaacgaggtcacaatcaagaacaaatatcctttgccgcgaatcgatgatttgtttgatcaactgaaaggagctaaagtgttttataagatagatctgcgatcaggctacctccagttgagaattcgggaagaggatattccaaagacggccttcaccactcggtacgggctatatgagtgcacggttatgtctttcggacttaccaacgcacccgcattcttcatgaatctgatgaacaaagtgttcatggaatttctggacaagtttgttgtggtgttcatcgacgacattcttatctattcaaagaccgaagaagaacatgagcaacatctccgtctggtactcgagaagttgaaggagcaccagctatatgccaagttcagcaagtgtgacttctggttgacggaagtcaagtttctgggacatgtcattacagctcagggtgtggcagttgatccatcgaacgtagagtcagttaccaaatggaccccaccgaagaccgtgtcgcagattcgaagttttctaggactggcaggttattaccgccgattcatcgaaaacttctccaggatcgcccgacccatgactcagttgcttaagaaagatgagaagtttaaatggacagctgaatgcaataagagttttgaggagctcaaaaagaagttagtatccgcaccagttttgattctgcccgaccagatgaaagacttccaagtctattgcgatgcatcccgccacggacttggatgtgtcctaatgcaagagggcagagtgaggcactatctgattggcaaccgctgcgaagtatatacggaccataagagtctgaaatacatcttcacccaaccggacctaaatctccgaccacgaagatggttggaactaatcaaagattatgacatgagcattcactaccacccgggtaaagccaatgtggtggcagacgcgttaagcaggaaaagttaccgcactgccctgtgcatcgagggcatgtgtgaggaattgtggcaggagtttgagcatctcaacgtgggaattgttgaacacgggttcgtagccgctctggaggcacgacctacgctcgtggatcaagtcagagcagctcaagtaaatgattctgaaatggcagagctgaaaaagaacatgagagtcggaaaagcccgggatttccacgaagatgaacacggcacaatctggttgggagaaagattgtgtgtacctgacgacaaggaactgaaggatctgatactcaccgaggctcatcagacccagtactccattcatccaggcagcaccgaaatgtatcaagacctcaaagaaaagttttggtgggtcagcatgaggagagaaatagctgaattcgtcgcactctgcgatgtttgccaacgagtgaaggcagagcaccaaagaccagcaggtttactccaacctcttcaaatcccggaatggaaatgggaggagattggaatggactttataacaggactgccccggacatcatcgggtcatgattccatctgggtagtcgtggatcgactcactaaggttgctcacttcataccagtacataccacgtatacgggcaaaaggttggcggagctctacctctcgagaatcatgtgtctacatggagtacccaaaaagattgtatctgatcgagggagtcagttcacctcaaaattctggcaaaagctgcaggaagaattggggacccgtttaaattttagcacggcctatcacccgcaaactgatggtcagaccgagcgagtcaatcaaatcctggaagatatgttgagagcttgcgctcttgattttggtggagcttgggacaaaaacttgccatatgcggaattctcgtacaacaacagctaccaggccagtctacagatggcaccgtttgaagctttatacggccggaagtgccgcacacctctcttctgggatcagacaggcgagcgtcaactgttcgggacagaggtattaacggaagcggaagagaaagtcagaatcatcagggaaaggttgaggattgcccagtctcgacagaagagctacgcggataaccgccgaagggagctcacttttgaggcaggagattacgtgtatcttcgtgtcactccgctccggggagtacaccgttttcagacgaaaggcaagttggcaccacgcttcgtgggaccctacaaaatcttggaacgaaggggagaagttgcttatcagttagaacttccatccaatatgatcggcatccatgacgtgttccacgtgtcccaattaaagaagtgcttaagggtacctgaagaacaggctgattcggaacacattgatatccaggaggacctaacctatgtggagaagccggtttgtatacttgataccagcgaaagaagaaccagaaaaaaggtcaccaggttttgccgagttcagtggagtcatcattcagaagaggaagcaacctgggaaagggaggatgagttgaaagccgcccatccgcacctcttcgccagctcctccgaatctcggggccgagattccgtttaa

SEQ ID NO: 13819 - DNA, 5319 bp, Oryza sativa
  Clone ID: TFbOSC400558j.C1.o1.np
atggccggtcacccacccaaccaccgcggagaaggcatgatcgatttcgtggcagagttggcacgtatgacactggtggtgggctacctcaacgcgccggagtacacgacgattccgccgctcagtggcgagcttcctcaccgtgtccgcttggaggtccatggctacgtggggacttgcctcgctaacatggcggtcgaggcatctggaggcacagcagatcacgcctgtcaggaggcggcctacttgatgatggccagactacgggagcgccacgactacatcttccacgacacggcgtaccgctaccacccccgtcgagcccatggtgatggcgtcagctccttccgtccgacagctggcgagaacgacaccacctttggtcacatgtgtgctgtgatgaggggattggacaggatgcactcggacctgcacaaggcgaccaaggccttgaacgatgggaagctcatgaggatcgtcgccctgaaggacgagatagcgcgcctgaagaaggagaacgctcagctaaagggtcttccagcgccaggaggagtccggatccgcaccatgccccgcaagacgacgactgcacctgtgcgcatccagcttgcgcccaggaacccacctccagcagcagctcccgcagcaccttcagttccgcccgcagttcctgcagctccagttccagctcccgcgttcactctctccttcgctccagcatcagccgccagaggttcagccaatggtaccggaggttgttccctccagatggtctacaccaggactggcaaccgcacgacaggcgagggcagcaacggcgaagaacgcgctgatggtgtgcaccccaacagtgattctggcaatggtccgccaccacttcccgagaatccgacccttgcccaagttatggcacatcaaactcagatgatggcagccatgatgcagcagatgcagcagcagcaccagcagatgcaccagaggatgatgcagcacgccgaacagcagcaccagcagtttggtccccctccccctcagtccaagttgccagaatttctacgcgtcaggccacccaccttctccagcaccaccaaccccatggaggcgaatgactggctccatgcaatagagaagaagctgaatctcctgcagtgcaatgatcaggagaaggtcgcttttgccacacaccagcttcagggtcctgtgtcagcttggtgggacaaccacatggccacccgcccaccgggtactgaagtcacatgggcagagttctgccgtagcttcaggaaggcacaggtgccagacggggtcgtggcacaaaagaagagggaattccgggcgctccatcagggcaacaggactgtgacagagtacctccacgagttcaatcgcctcgcgcgatatgcaccagaggatgtccgcaccgacgccgagaagcaggagaagttcatggcgggtttggatgatgagctgaccaaccaactgatatctggggactacgctgactttgagaggctggtcgacaaggcaatccgtcaggaggaccaacgcaacaagatggacaggaagaggaaggccgctcagttcagggcacatcagggaagtcaccagaggccgcgcttcactcccgggcagcagggtggacctaccaccatgatcgtccgccagcaccgcccgttcaaccctagcaacttccaccagggcaccagtggcagtcaaaactaccatggaagtcagcccaaccgcggtacagctccacgcccaccaatggcaccggcacagtcaggccagcccgcgcaagccaagaaggagacgggagcaaaaccagggtcctgcttcaactgtggcgagcttggccacttcgctgacaaatgcccgaagcccaggcgtgccgggccaaggtttatccaggctcgtgtcaaccacgcatctgcggaggaggcacaaacagcaccggaggtcgtactgggtacgttccctgttaactcaatccctgcaacagtactttttgattctggtgcaacgcattctttcatttcaaagaaatttgtggggaggtatgggttaaggaaagaagagcttagcacaccaatgagggttcataccccgggaaatagttcaacctcagtcagttttagcccctcagtgctaatagaaatccaaagatcaccatttctagccaacctcattcttctcgaatccaaagacctagatgtcattcttgggatggattggctgaccaagtttaagggagtcatcgattgtgcgagtcgcacagtcaccttgaccaacgagaagggagaaacagtggtgtacaaatctctagtctcaccaaagaaaggggtctcgttgaatcagattgagacggaaatcccagtggataccgtagagaagaacttgagaaaattggaagatatacccatagtctgcgagtatccagaagtgttccccgaagacctcactaccatgccacccaagagagagattgaattccggattgacttggcaccgggaaccgctccaatctataagagaccatacagaatggcggccaacgaattagcagaggtcaagaagcaagttgatgagcagctgcagaaagggtacatacgaccaagcacttcaccttggggcgctccggtcatttttgtggagaaaaaggataagacgaagaggatgtgcgttgattatcgcgcactcaacgaggtcacaatcaagaataaatatcctttgccgcgaatcgacgatttatttgatcaactgaaaggagctaaagtattttctaagatagacctgcgatcaggctaccaccagctgagaatccgggaagaggatattccgaagacggccttcaccactcggtacgggctatatgagtgcacggttatgtctttcggacttaccaacgcacccgcattcttcatgaatctgatgaacaaagtgttcatggaatttctggacaagtttgttgtggtattcatcgacgacatacttatctactcaaaatccgaggaagaacatgagcaacatctccgtctggtactcgaaaagttgaaggagcaccagctatacgccaagttcagcaagtgtgacttctggttgacggaagtaaaatttctgggtcatgtcattacagctcagggtgtggcagtcgacccatcgaacgtggagtcagttaccaaatggaccccacctaagaccgtgtcgcagattcggagttttctaggactggcaggttattaccgccgattcatcgaaaatttctccagaatcgcccgacccatgactcagttgcttaagaaagatgagaagtttaaatggacagctgagtgcgataagagttttgaggagctcaagaagaaattagtatccgcaccggttttgatcctgcccgaccagatgaaagacttccaagtctattgcgatgcatcccgtcacggacttggatgtgtcctaatgcaagagggcagagtggttgcgtatgcctcgcggcagttgcgtccacacgaaggaaattatccaactcatgacttggaattggcagcagtggttcatgctttgaagatctggaggcactatctgattggcaaccgctgcgaagtatatacggaccataagagtctgaaatacatcttcacccaaccggatctaaaccttcgacaacgaagatggttggaactaatcaaagactatgacatgagtattcactaccacccgggtaaagccaatgtggtggcagacgctttaagccggaaaagttactgcactgccctatgcatcgagggcatgtgtgaggaattgcggcaggagtttgaacatctcaacatgggaattgttgaacacgggtttgtagccgctctggaggcacggcctacgctcgtggatcaagttagagccgctcaagtaaatgatccggaaatagcagaactgaaaaagaacatgagagtcggaaaggctcgggatttccacgaagatgagcatggcacaatctggatgggagaaagattgtgtgtacctgacgacaaagaactgaaggatctgatactcaccgaggctcatcagacccagtactccattcacccaggcagcaccaaaatgtaccaagaccttaaagaaaaattttggtgggtcagcatgagaagggaaatagctgaattcgtcgcactctgcgatgtttgccaatgagtgaaagcagagcaccaaagaccagcaggtttactccaacctcttcaaatcccggaatggaaatgggaggagatcggaatggactttataacgggactgccccggacatcatcgggacatgattcaatctgggtagtcgtggatcgactcactaaggttgctcactttataccagtacataccacctatacgggaaagagattggcagaattgtacctcgcaaggatcatgtgtttgcatggggtacccaggaagatagtatccgaccgaggtagtcagttcacctcaaagttttggcagaaactgcaggaagaattggggacccgtttaaacttcagcacggcctatcacccgcaaactgatggtcagaccgagcgagtcaatcaaatcttggaagatatgttgagagcttgcgctcttgattttggtggagcttgggacaaaagcttgccatatgcggaattctcgtacaacaacagctaccaggccagtctacagatggcaccgtttgaagctttatacggccggaagtgccgcacacctctcttctgggatcagacaggcgaacgtcaactgttcggaacagaagtattagcggaagcagaagagaaagtcagaatcatcagggaaaggttgaggattgcccagtctcgacagaagagctacgcggataaccgtcgaagggagctcacttttgaggcaggagattacatgtatcttcgtgtcactccgctccggggagtacatcgttttcagacgaaaggcaagttggcaccacgcttcgtgggaccatacaaaatcttggaacgaaggggagaagttgcttatcagctagaacttccatccaacatgatcggcatccatgacgtgttccacgtgtcccaattaaagaagtgtttaagggtacctgaagaacaggcggattcggaacacattgatatccaggaggacctaacttatgttgagaagccggttcgcatacttgataccagcgaaaggagaaccagaaacaaggttacccggttttgccgtgttcagtggagtcatcattcggaagaggaagcaacctgggaaagggaagatgagttgaaagccgcccatccgcacctcttcaccagctcctccgaatctcggggc

SEQ ID NO: 13820 - DNA, 3919 bp, Oryza sativa
  Clone ID: TFbOSC400560j.C1.o2.gm
atggtctacaccaggactggcaaccgcacgacaggcgagggcagcaacggcgaagaacgcgctgatggtgtgcaccccaacagtgattctggcaatggtccgccaccacttcccgagaatccgacccttgcccaagttatggcacatcaaactcagatgatggcagccatgatgcagcagatgcagcagcagcaccagcagatgcaccagaggatgatgcagcacgccgaacagcagcaccagcagtttggtccccctccccctcagtccaagttgccagaatttctacgcgtcaggccacccaccttctccagcaccaccaaccccatggaggcgaatgactggctccatgcaatagagaagaagctgaatctcctgcagtgcaatgatcaggagaaggtcgcttttgccacacaccagcttcagggtcctgcgtcagcttggtgggacaaccacatggccacccgcccaccgggtactgaagtcacatgggcagagttctgccgtagcttcaggaaggcacaggtgccagacggggtcgtggcacaaaagaagagggaattccgggcgctccatcagggcaacaggactgtgacagagtacctccacgagttcaatcgcctcgcgcgatatgcaccagaggatgtccgcaccgacgccgagaagcaggagaagttcatggcgggtttggatgatgagctgaccaaccaactgatatctggggactacgctgactttgagaggctggtcgacaaggcaatccgtcaggaggaccaacgcaacaagatggacaggaagaggaaggccgctcagttcagggcacatcagggaagtcaccagaggccgcgcttcactcccgggcagcagggtggacctaccaccatgatcgtccgccagcaccgcccgttcaaccctagcaacttccaccagggcaccagtggcagtcaaaactaccatggaagtcagcccaaccgcggtacagctccacgcccaccaatggcaccggcacagtcaggccagcccgcgcaagccaagaaggagacgggagcaaaaccagggtcctgcttcaattgtggcgagcttggccacttcgctgacaaatgcccgaagcccaggcgtgccgggccaaggtttatccaggctcgtgtcaaccacgcatctgcggaggaggcacaaacagcaccggaggtcgtactggtcaccttgaccaacgagaagggagaaacagtggtgtacaaatctctagtctcaccaaagaaaggggtctcgttgaatcagattgagacggaaatcccagtggataccgtagagaagaacttgagaaaattggaagatatacccatagtctgcgagtatccagaagtgttccccgaagacctcactaccatgccacccaagagagagattgaattccggattgacttggcaccgggaaccgctccaatctataagagaccatacagaatggcggccaacgaattagcagaggtcaagaagcaagttgatgagcagctgcagaaagggtacatacgaccaagcacttcaccttggggcgctccggtcatttttgtggagaaaaaggataagacgaagaggatgtgcgttgattatcgcgcactcaacgaggtcacaatcaagaataaatatcctttgccgcgaatcgacgatttatttgatcaactgaaaggagctaaagtattttctaagatagacctgcgatcaggctaccaccagctgagaatccgggaagaggatattccgaagacggccttcaccactcggtacgggctatatgagtgcacggttatgtctttcggacttaccaacgcacccgcattcttcatgaatctgatgaacaaagtgttcatggaatttctggacaagtttgttgtggtattcatcgacgacatacttatctactcaaaatccgaggaagaacatgagcaacatctccgtctggtactcgaaaagttgaaggagcaccagctatacgccaagttcagcaagtgtgacttctggttgacggaagtaaaatttctgggtcatgtcattacagctcagggtgtggcagtcgacccatcgaacgtggagtcagttaccaaatggaccccacctaagaccgtgtcgcagattcggagttttctaggactggcaggttattaccgccgattcatcgaaaatttctccagaatcgcccgacccatgactcagttgcttaagaaagatgagaagtttaaatggacagctgagtgcgataagagttttgaggagctcaagaagaaattagtatccgcaccggttttgatcctgcccgaccagatgaaagacttccaagtctattgcgatgcatcccgtcacggacttggatgtgtcctaatgcaagagggcagagtggttgcgtatgcctcgcggcagttgcgtccacacgaaggaaattatccaactcatgacttggaattggcagcagtggttcatgctttgaagatctggaggcactatctgattggcaaccgctgcgaagtatatacggaccataagagtctgaaatacatcttcacccaaccggatctaaaccttcgacaacgaagatggttggaactaatcaaagactatgacatgagtattcactaccacccgggtaaagccaatgtggtggcagacgctttaagccggaaaagttactgcactgccctatgcatcgagggcatgtgtgaggaattgcggcaggagtttgaacatctcaacatgggaattgttgaacacgggtttgtagccgctctggaggcacggcctacgctcgtggatcaagttagagccgctcaagtaaatgatccggaaatagcagaactgaaaaagaacatgagagtcggaaaggctcgggatttccacgaagatgagcatggcacaatctggatgggagaaagattgtgtgtacctgacgacaaagaactgaaggatctgatactcaccgaggctcatcagacccagtactccattcacccaggcagcaccaaaatgtaccaagaccttaaagaaaaattttggtgggtcagcatgagaagggaaatagctgaattcgtcgcactctgcgatgaagaattggggacccgtttaaacttcagcacggcctatcacccgcaaactgatggtcagaccgagcgagtcaatcaaatcttggaagatatgttgagagcttgcgctcttgattttggtggagcttgggacaaaagcttgccatatgcggaattctcgtacaacaacagctaccaggccagtctacagatggcaccgtttgaagctttatacggccggaagtgccgcacacctctcttctgggatcagacaggcgaacgtcaactgttcggaacagaagtattagcggaagcagaagagaaagtcagaatcatcagggaaaggttgaggattgcccagtctcgacagaagagctacgcggataaccgtcgaagggagctcacttttgaggcaggagattacgtgtatcttcgtgtcactccgctccggggagtacatcgttttcagacgaaaggcaagttggcaccacgcttcgtgggaccatacaaaatcttggaacgaaggggagaagttgcttatcagctagaacttccatccaacatgatcggcatccatgacgtgttccacgtgtcccaattaaagaagtgtttaagggtacctgaagaacaggcggattcggaacacattgatatccaggaggacctaacttatgttgagaagccggccgaggcccagcccggcagccggccgcccgcctccctccctcctggggtcgccgacagggggacccacctgtcggacccgtctcccacctcccgcctctcccgctcgcgccgccgcacccgtaacggccgccgcgcccacgcctccgcctcccccgggccac

SEQ ID NO: 13821 - DNA, 4083 bp, Oryza sativa
  Clone ID: TFbOSC400574j.C1.o2.gm
atggtctacaccaggactggcaaccgcacggcaggcgagggcagcaacggcgaagaacgcgctgatggtgtgcaccccaacggtgattctggcaatggtccgccaccacttcccgagaatccgacccttgcccaagttatggcacatcagactcagatgatggccgccatgatgcagcagatgcagcagcagcaccagcagatgcaccagaggatgatgcagcacgccgaacagcagcatgagcagtttggtccccctccccctcagtccaagctgcctgagtttctacgtgtcaggccacccaccttctccagcaccaccaaccctatggaggcaaatgactggctccatgcgatagagaagaagctgaatctcctgcagtgcaatgatcaggagaaggttgctttcgccacacaccagcttcagggtcctgcgtcagcttggtgggacaaccacatggccacccgcccaccgggtactgaagtcacatgggcagagttctgccgtagcttcaggaaggcacaagtgccagatggggtcgtggcacaaaagaagagggaatttcgtgcactccatcagggcaaccggactgtgacagagtaccttcatgagttcaatcgcctcgcgcgatatgcaccagaggatgtccgcaccgacgccgagaagcaggagaagttcatggcgggtctggatgacgagctgaccaaccaactgatatctggggactacgctgactttgaaaggctggttgacaaggcaatccgtcaggaggatcagcgcaacaaaatggacaggaaaagaaaggcggcgcagttccggtccaaccaaggtagtcagcaccgaccgcgcttcactcccggacagcagggtggacctaccaccatgatcgtccgccagcaccgcccgttcaaccctagcaacttccatcagggcaccagtggcagccagaaccaccatggaggccagcccaaccgcggtgcagctccacgcccaccaatggcaccggcacagtcaggccagccagcgcaagccaagaaggagacgggagcaaaaccagggtcctgcttcaactgtggcgagcttggccacttcgctgacaaatgcccgaagcccaggcgtgccggaccaaggtttatccaggctcgtgtcaaccacgcgtctgcggaggaggcacaagcagcaccagaggtcgtactggtcaccctgaccaatgagaaaggagaaaccgtggtgtacaaatctctagcctcgccaaagaaaggagcctcgttgaatcagattgagacggaaatcccagtggacgccgaagagaagaacttgagaaaattggaggacatacccatagtctgcgagtatccagaggtgttccccgaagacctcaccaccatgccacccaagagggagattgaattccggattgatttggcaccaggaaccgctccaatctataagagaccgtacagaatggcggccaacgaattagcagaggtcaagaagcaagttgatgagcagctgcagaaagggtacattcgaccaagcacttcaccttggggcgctccggtcatttttgtggagaaaaaggataagacaaagaggatgtgcgtcgattatcgcgcacttaacgaggtcacaatcaagaataaatatccgttgccgcgaatcgacgatttatttgatcaactgaaaggagctaaagtgttctctaagatagacctgcgatcaggctaccaccagttgagaatccgggaagaggatattccgaagacggccttcaccactcggtacgggctatatgagtgcacggttatgtccttcggacttactaacgcacccgcattcttcatgaatctgatgaacaaagtgttcatggaatttctggacaagtttgttgtggtattcatcgacgacattcttatctattcaaagtccgaggaagaacatgaacaacatctccgtctagtactcgagaagttgaaggagcaccagctatacgccaagttcagcaagtgtgacttctggttgacggaagtcaaatttctgggccatgtcattacagctcagggtgtagcagttgatccatcgaacgtggagtcagttaccaagtggaccccaccgaagacagtgtcgcagattcgaagttttctaggactggctggttattaccgtcggttcatcgaaaacttctcaagaatcgcccgacccatgactcagttgcttaagaaagacgagaagtttaaatggacagctgagtgcgacaagagctttgaggagctcaaaaggaaattagtatccgcaccggttttgatcctgcccgaccagacgaaagacttccaagtctattgcgatgcatcccgtcacggacttggatgtgtcctaatgcaagagggcagagtggttgcatatgcctcgcggcagttgcgtccacacgaaggaaattatccaactcatgacttggaattggcagcagtggtccatgctttgaagatctggaggcactatctgatcggcaaccgctgcgaagtatatacggaccataaaagtctgaaatacatcttcacccaaccggacctaaaccttcgacaacgaagatggttggagctaatcaaagactatgacatgagtattcactaccacccgggtaaagccaatgtggtggcagacgctttaagccggaaaagttactgcactgccctatgcatcgagggcatgtgtgaggaattgcggcatgagtttgaacatctcaacatgggaattgttgaacacgggtttgtagccgctttggaggcacggcctacgctcgtggaccaagtcagagcagctcaagtaaatgacccggaaatagcggaactgaaaaagaacatgagggttggaaaagctcgagatttccacgaggatgagcacggcacaatctggatgggagaaagattgtgtgtacccgacgacaaggagttgaaggatctgatactcaccgaagctcatcagacccagtactccattcatccaggcagcactaaaatgtatcaagacctcaaagagaagttttggtgggtcagcatgaggagagaaatagctgaattcgtcgcactctgcgatgtttgccagcgagtgaaagcagagcaccaaagacccgcaggtttactccaacctctacaaatcccggaatggaaatgggaggagattggaatggactttataacgggactgccccggacatcatcgggacatgattcaatctgggtagtcgtggaccgactcaccaaggaagaattggggacccgtttaaacttcagcacggcctatcacccgcaaactgatggtcagaccgagcgtgtcaatcaaatcttggaggatatgttgatagcttgcgctcttgattttggtggagcttgggacaaaagcttaccatatgcggaattctcgtacaacaacagctaccaggccagtctacagatggcaccgtttgaagctttgtacggccggaagtgccgcacacctctcttctgggatcagacaggcgaacgtcaactgttcggaacagaagtattagcggaagcagaagagaaagtcagaatcatcagggaaaggttgaggattgctcagtctcgacagaagagctacgcggataaccgccgaagggagctcacttttgaggcaggagattacgtgtatcttcgtgtcaccccgctccggggagtacaccgtttccagacaaaaggcaagttggcaccacgcttcgtgggaccatacaaaattttggaacgaaggggagaggttgcctatcagctagaacttccgtccaacatgatcggcatccatgacgtgttccacgtatcccaattaaagaagtgcttaagggtacctgaggaacaggctgattcggaacacatcgatatccaggaggacctgacctatgtggagaagccggttcgcatacttgataccagcgaaaggaggaccagaaacaaggcaagggtgggcgtgatggagcggggcgggccctgcgacggcctctgtcgcttccggattcacctaggcacgagaggggactgcccgtcgcccgctggggacgggggtgaaacctga

SEQ ID NO: 13822 - DNA, 5187 bp, Oryza sativa
  Clone ID: TFbOSC400596j.C1.o9.fg
atggaaaaacctaagagccctctgaatcctttttcattgcatatgttcttcgcaattggatttgttccgggaaaatggggatctgttcttgtggttcaagggaaaaatcttggtcgctcgtttaaaatggccggtcacccacccaaccaccgcggagaaggcatgatcgactttgtggcagagctggcacgcatgacactggtagtgggctaccccgacgcgccggagtacacgaccatcccaccgctcagtggcgagcttccttaccgtgtccgcttggaggtccatggctacgtggggacttgcctcgctaacatggcggtggaggcgtcaggaggcacagcagatcacgcctgtcaggaggcagcctacttgatgatggccaggctacgggagcgccacgactacatcttccacgacacggcgtaccgctaccacccccgtcgagcccatggtgatggcgtcagctccttccgtccgacagctggcgagaacgacaccaccttcggtcacatgtgtgctgtgatgaggggattggataggatgcactcggacctgcacaaggcgaccaaggccttgaacgatgggaagctcatgaggatcgtcgctctgaaggacgaggtagcgcgcctgaagaaggagaatgctcagttgaagggccttccagcgccaggaggagtccggatccgcactacgccccgtaagaggacgactgcacctgtgcgcatccagcttgcgcccaggaacccacctccaccagcagctcccgcagcagctccagttccgcccgcagttcctgcagctccagctccagctcccgcgttcactctctccttcgctccagcatcagccgccagaggttcagccagtggtaccggaggttgcttgtttgggggtcagtcggcgatggtctacaccaggactggtagccgcgcaacaggcgagggcagcaacggcgaagaacgcgctgatggtgtgcaccccaacggtgattctggcaatggtccgccaccacttcccgagaatccgacgcttgcccaagttatggcacatcagactcagatgatggcagccatgatgcagcagatgcagcagcagcaccagcagatgcatcagaggatgatgcagcacgccgaacagcagcaccagcagtttggtccccctcccccccagtccaagttgcctgagtttctacgtgtcaggccacccaccttctccagcaccaccaaccctatggaggcaaatgactggctccatgcgatagagaagaagctgaatctcctgcagtgcaatgaccaggagaaggtcgctttcgccacacaccagcttcagggtcctgcgtcagcttggtgggacaaccacatggccacccgcccaccgggtactgaagtcacatgggcagagttctgccgtagcttcaggaaggcacaggtgccagatggggtcgtggcacaaaagaagagggaattccgtgcgctccatcagggcaacaggactgtgacagagtacctccatgagttcaatcgcctcgcgcgatatgcaccagaggatgtccgcaccgacgccgagaagcaggagaagttcatggcgggtctggatgatgagctgaccaaccaactgatatctggggactacgccgactttgagaggctggttgacaaggcaatccgccaggaggatcagcgcaacaaaatggacaggaaaagaaaggcggcgcagttccggtccaaccaaggcagtcagcaccgaccgcgcttcactcccggacagcagggtggacctaccaccatgatcgtccgccagcaccgcccgttcaactccagcaacttccaccagggcactagtggcagtcagaaccaccagggaggccagcccaaccgcggtgcagctccacgcccatcagtggcaccggcacagtcaggccagcccgcgcaagccaagaaggagactggagcaaaaccagggtcctgcttcaactgtggcgagcttggccacttcgctgacaaatgcccgaagcccaggcgtgccgggccaaggtttatccaggctcgtgtcaaccacgcgtctgcggaggaggcacaagcagcaccagaggtcgtactgggtacgttccctgttaactcaatccctgcaacagtactttttgattctggtgcaacgcattctttcatttcaaagaaattcgtgggaatgtatgggctaaggaaagaagagcttagcacaccaatgagggttcgtaccccgggaaatagttcaacctcagtcagttttagcccttcagtgctaatagaaatccaaagatcaccatttctagccaacctcatccttctcgaatccaaagacctagatgtcattcttgggatggattggctgaccaagtttaagggagtcatcgattgtgcgaatcgcacagtcaccctgaccaatgagaaaggagaaaccgtggtgtacaaatccctagtctcgccaaagaaaggagcctcgttgaatcagattgaaacggaaatcccagtggacaccgtggggaagaacttgagaaaattggaagatatacccatagtctgcgagtatccggaagtgttccccgaaaacctcactaccatgccacccaagagggagattgaattccggattgacttggcaccgggaaccgctccaatttacaagagaccatacaggatggcggccaacgaattagcagaggtcaagaagcaagttgatgagcagctgcagaaagggtacatacgaccaagcacttcaccttggggcgctccggtcatttttgtggagaaaaaggataagacgaagaggatgtgcgtcgattatcgcgcacttaacgaggtcacaatcaagaataaatatcccttaccgcgaatcgacgaattatttgatcaactgaaaggagctaaagtgttctctaagatagacctgcgatcaggctaccaccagctgagaatccgggaagaggatattccgaagacggccttcaccactcggtacgggctatatgagtgcacggttatgtctttcggacttaccaacgcacccgcattcttcatgaatctgatgaacaaagtgttcatgaaatttctggacaagtttgttgtggtattcatcgacgacattcttatctattcaaagtccgaggaagaacatgaacaacatctccgtctggtactcgagaagttgaaggagcaccagctatacgccaagttcagcaagtgtgacttctggttgacggaagtcaaatttctgggccatgtcattacagcccagggtgtagcagttgatccatcgaacgtggagtcagttacaaaatggaccccaccaaagaccgtgtcgcagattcggagttttctaggactggcaggttattaccgccgattcatcgaaaacttctccagaatcgcccgacccatgactcagttgcttaagaaggatgagaagtttaaatggacagctgagtgcgataagagctttgaggagctcaaaaagaaattagtatccgcaccagtattgattctgcccgacccgacgaaagacttccaagtctattgtgatgcatcccgtcacggacttggatgtgtcctaatgcaagagggcagagtggttgcgtatgcctcgcggcagttgcgtccacacgaaggaaattatccaactcatgacttggaattggcagcagtggttcatgctttgaagatctggaggcattatctgattggaaaccgctgcgaagtatatacggaccataagagtctgaaatacatcttcacccaaccggatctaaaccttcgacaacgaagatggttggaactaatcaaagactatgacatgagtattcactaccacccgggtaaagccaatgtggtggcagacgctttaagccggaaaagttactgcactgccctatgcatcgagggcatgtgtgaggaactgcggcaggaatttgaacatctcaacatgggaattgttgaacacgggtttgtagccgctttggaggcacggcctacgctcgtggatcaagtcagagccgctcaagtaaatgatccggaaatagcagaattgaaaaagaacatgagagtcggaaaggctcgggatttccttgaggatgagcatggcacaatctggatgggagaaagattgtgcgtaccggacgacaaggaattgaaggatctgatactcaccgaagctcatcagacccagtactccattcatccaggcagcactaaaatgtatcaagacctcaaagaaaagttttggtgggtcagcatgaggagagaaatagctgaattcgtcgcactctgcgatgtttgccaacgagtgaaagcagagcaccaaagaccagcaggtttactccaacctctccaaatcccggaatggaaatgggaggagattggaatggactttatcacaggactgccccggacatcatcgggacatgattcaatctgggtagtcgtggatcgactcaccaaggtggctcactttataccagtacataccacctatacgggaaagagattggcagaattgtacctcgcaaggatcatgtgtttgcatggggtacccaagaagatagtctccgaccgaggtagtcagttcacctcaaagttctggcagaagctgcaggaagaaatggggacccgtttaaatttcagcacggcctatcacccgcaaactgatggtcagacagagcgagtcaatcaaatcttggaagatatgttgagagcttgcgctcttgattttggtggagcttgggacaaaagcttaccatatgcggaattctcgtataacaacagctaccaggccagtctacagatggcaccgtttgaagctctatacggccggaagtgccgcacacctctcttctgggatcagacaggcgaacgtcagctgttcggaacagaagtattagcggaagcagaagagaaagtcagaatcatcagggagagattgaggattgctcagtctcgacagaagagctacgcggataaccgtcgaagggagctaacttttgaggccagagattacgtgtatcttcgtgtcaccccgctccggggagtacaccgctttcagacaaaaggcaagttggcaccacgcttcgtgggaccgtacaaaattttggaacgaaggggagaagttgcctatcagctagaacttccatccactatgatcggcattccatga

SEQ ID NO: 13823 - DNA, 5468 bp, Oryza sativa
  Clone ID: TFbOSC400679j.C1.o10.np
atggccggccacccacccaaccaccacggagaaggcatgattgactttgtggcagagttagcacgtatgacgctggtggtgggctaccccaacgcgccggagtacacgactgttccaccgctcagtggcgagcttccccaccgtgtccgcttggaggtccatggctacgtggggacttgcctcgctaacatggtggttgaggcgtccggaggcacagcagatcacgcctgtcaggaggcagcatacctgatgatggccagactacgggagtgccacaactacatcttccatgacacggcgtatcgatttcaccctcgtcgagccagcggtgatgatgtcagtaccttccgtccaatagccggcgagaacgacaccacctttgatcacatgtgcgccgtgatgagggggatggacaggatgcacttggacctgcacaagacgtccaaggccttgaatgatgggaagctcatgaggatcgtcgttctaaaggacgagatagcgcgcttgaagagggagaatgctcagttaaagggtcttcccgcgccaggaggagtccggatccacactacgccccgcaagtcgacaacggcacccgtgcgcatccagcttgcgcccaggaacccacctccgcccgcagttcccgcagcacctccagttccgcccgcagctccagcagttcccgcagctccagcgccagctccagctcatgttcccgtgtcagctcctgcatccgctctctccttcgcgcctgcaacagccgtcaggggccccgccagtggcaatggaggttggttgccagctactcccagtggcagtcgcgacctcagcagcagcagctccagtggctcagagctgggtagcggcgagacttatctgccaggctccaggagtcgctcagagggacgtgatggtctacaccaggactggcacccgcacgacaggtgagggcagcaacggcgaagaacgcgctgatggtgtgcatcccaacagtgattccggcaatggtccgccaccacttcccaagaatccgacgctagcccaagtaatggcacatcagactcagatgatggcagccatgatgcagcagatgcagcagcagcaccagcagatgcaccagaggatgctgcatcacgccgaacagcagcaccagcagtttggtccccctccccctcagtccaagttgccagagtttctacgtatcaggccacccactttctctagtaccaccaaccccatggaggcaaatgactggctccatgccatagagaagaagccgaatctcctgcagtgcaatgatcaggagaaggttgctttcgccacacaccagcttcaaggtcctgcgtcagcttggtgggacaatcacatggccacccgcccgccaggcactgaagtcacttgggcggagttctgtcgtagcttcaggaaagcgcaggtgccagacggggtcgtggcacaaaagaagagggaattccgggcactccaccagggcaacaggacagtgacggagtatctccatgattcaatcgcctcgcgtgatatgcaccggaggatgtccgtactgacgccgagaagcaggagaaattcctagcaggtctggatgatgagctaaccaaccagttgatatctggagattacgccgactttgagaggttggttgacaaggcaatccgtcaggaggatcagcgcaacaaaatggaaaggaagaggaaggcggcgcagttccggtccaaccaagggagccaccagcgaccgcgcttcactcccggacagcagggtagacctaccaccctgatcgtccgccagcaccgccctttcaatgccagcaacttccatcagggcgccagtggctgtcagaaccaccatggcggtcagcccaaccgcagtgcagctccgtgcccaccaatggcactagcacagtcagctacgtccgcgcaagctaagaaggagactgggacaaagccagggtcctgcttcaactgtggcgagcttggccacttcgctgacaaatgcccgaagcccaggcgtgccgggccaaggtttgtctaggcttgtgtcaaccacgcgtctgcagaggaggcgcaagcagcaccagaggtcgtactgggtacatttcctgttaactcaatccctgcaatagtactttttgattctggtgcaacgcgttctttcatttcaaagaaatttgtggggatgcatgggttaaggaaagaagagcttaatacaccaatgagggttcataccccgggaaatagttcaacctcggtcagttttagcccttcagtgctaatagaaatccaaagatcaccatttctagccaatctcattcttcttgaatccaaagacctagatgtcattcttgggatggattggctgaccaaattcaagggagtcattgattgtgtgaatcgcacagtcaccttgaccaacgagaagggagaaaccgtagtgtacaaatcactagtctcaccaaagcaaggggtctccttgaatcagattgaggcggaaatcccagtggtcaccgaggagaagaattcgaggaaattggaagagattcccatagtttgcgagtacccagaagtctttcctgaagacctcactaccatgccacccaagcgagagattgaattccggattgatttggcaccgggaaccgcgcccatttacaagaggccgtacaggatggcggccaacgaactagtagaggtcaagaaacaggttgatgagcagctgcagaaagggtacatttgaccaagtacttcgcattggggtgctccggtcatttttgtggagaaaaaggataagacgaagaggatgtgcgttgattatcgcgcactcaacgaggtcacaatcaagaataaatatcctttaccgcggatcgatgatttgtttgatcaactgaagggagctaaggtgttctctaagatagacctgcgatcaggctatcaccaattaagaatccgggaagaggatattccaaagatggctttcaccactcggtacgggctgtatgagtgcacagttatgtctttcggacttaccaatgcacccgcattcttcatgaatctgatgaacaaagtgttcatggaatttctcgataagttcgttgtggtcttcatcaacgacatacttatctattcaaagtctgaaaaagaacatgagcagcatctccgtctggtgctctagaagttgaaggagctccagttatacgccaagttcagcaagtgtgatttttggttgacggaagtcaaatttctaggccatgttattacagctcagggtgtggcaatcgacccatcaaacgtggagtcagttaccaaatggaccccaccgaagaccgtgtcgcagatttgaagttttcttggacttgcaggttattaccgccgattcatcgagaacttctccaggatcgcccgacccatgacttagttgcttaagaaagatgagaagtttaaatggacagctgagtgcgataagagctttgaggagttcaagaagaaattagtatccgcaccagttttgattctgcccgaccagatgaaagacttccaagtctattgcgacgcatcccgccacgggcttgggtgtgttctaatgcaggagggcagagtggttgcgtatgcctcgcgacagttgcgtctacacgaagggaattacccaacccatgatctagaattggcagcagtggttcatgctttgaagatctggaggtactatctgattggcaaccgctgtgaagtatatacggaccacaaaagtctgaaatatatcttcacccaaccggacctaaatctccaacaacgaagatggttggaactaatcaaagattatgacatgagcattcactaccacccggggaaagccaatgtggtggcagacgcattaagcaggaagagttactgcactgccctatgcatcgagggcatgtgtgaggaattgcagtaggagtttgagcatctcaacgtgggaattgttgaacacgggttcgtagccgctctggaagcacggcctacgctcgtcgatcaagttagagccgctcaagtgaatgatcctgaaatagcagagctgaaaaagaacatgagtcggaaaggctcgggatttccttgaggatgagcatggcacaaactggatggggggaaagattgtgtgtacctgacgacaaggaactgaaggatatgatactcaccgaggctcatcagacacagtgttccattcacccaggcagcaccaagatgtaccaagacctcaaagaaaagttttggtgggccagcatgaggagagaaatagctgaattcgtcgcactctgcgatgtttgccagcgagtgaaggtagagcatcaaaggccagcaggtttactccaacctcttcaaatcccggaatggaaatgggaggaaattggaatggattgtataacaggactgccccggacatcatcaggtcacgattcaatctgggtagtcgtggatcgactcaccaaggttgctcacttcataccagtgcataccacctatacgggaaagaaattggcagagttgtacctggcaaggatcatgtgtttgcatggggtacccaagaagattgtatctgatcgagagagtcagttcacctcaaaattctggcagaagctgcaggaagaattggggacccgtttaaatttcagcacggcctatcacccgcaaactgatggtcagaccgagtgagtcaatcaaatcttggaagatatgttgagagcttgcgctcttgattttggtggagcttgggacaaaagcttgccatatgcggaattctcgtacaacaacagctaccaagccagtctacagatggtaccgtttgaagctttatactgccggaagtgccgcacaccactcttctgggatcagacaggcgagcgtcaactgttcgggacagaggtattagcggaagcagaagagaaagtcagaaccatcagggaaaggttgaggattgccctgtctcgacagaagagctacacggataaccgccgaagggagctcacttttgaagcaggggattacgtgtatcttcgtgtcactccgctccggggagtacaccgttttcagacgaaaggcaagttggcaccacgcttcgtgggactatacaaaatcttggaacgaaggggggaagttgcttatcagctagaacttccatccaatatgattggcatccacgacgtgttccacgtgtcccaattaaagaagtgcttaagagtacccgaagaacaagctgattcggagcatattgatatccaggaggacctgacatatgtggagaagccggttcgtatacttgataccagcgaaagaagaaccagaaacaaggtcaccaggttttgccgagttcagtggagtcaccattcagaggaggaagcaacctgggaaagggaagatgagttgaaagccgcccatccgcacctcttcgccagctcctccgaatctcagggccgagattccgtt

SEQ ID NO: 13824 - DNA, 4035 bp, Oryza sativa
  Clone ID: TFbOSC400686j.C1.o8.gm
atggtctacaccaggaatggtagccgcacaacaggcgagggcagcaatggcgaagaacgcactgacggggtgcatcccaacagcgattccggcaatggtccgccaccactccccgagaatccgactctggcccaagtaatggctcatcagactcagatgatggcagccatgatgcagcagcagcaccagcagatgcaccaaaggatgcagcagcaagccgagcagcatcagcagcagtttggtccccctccccctcagtccaaactgccggagtttctacgcgttaggccacccaccttctccagcaccaccaaccccatggaggcgaatgactggctaaatgccatagagaagaagctaaatctcctgcagtgcaatgatcaggagaaggtcgccttcgccacacaccagctccaaggtcccgcgtcagcttggtgggacaatctcatggccacccgcccgccaggcactgaagtcacttgggcagagttctgtcgcagttttaggaaggcgcaggtgccagacggggtcgtggcacaaaagaagagagaattccgggcactccaccagggcaacaggacagtgactgagtatctccatgagttcaatcgcttagcgcgatatgcaccggaggatgtccacactaacgcggagaagcaggagaagttcctagcaggcctggatgacgagctaaccaaccagttaatctctggggactacgccgactttgagaggctggttgacaaggcaatccgtcaggaggatcagcgcaccaaaatggacaggaagagaaaggcggcgcagttccggtccaaccaaggaagccaccagcgaccgcgcttcactccaggacagcagggtggacctaccaccatgatcgtccgccagcaccgccctttcaactcaagcagcttccaccagggcgccagtggcagccagaaccaccatggaggtcagcccaaccacagtgcagctccgcgcccaccaatggcaccagtacagtcagctccgtccgcgcaagccaagaaggagactggaacaaagccagggtcctgcttcaactgtggcgagcttggccacttcgctgacaaatgtccgaagcctaggcgtgccgggccaaggttcatccaggctcgtgtcaaccacgcgtccgcagaggaggcgcaagcagcaccagaggtcgtactggtcaccttgaccaacaagaagggagaaacggtagtgtacaaatcactagtctcaccaaagcaaggggtctccttgaatcagattgaggtggaaatcccagtggtcaccgaggggaagagttcgaggaaattggaagatatccccatagtctgcgagtacccaaaagtgtttcccgaagacctcactaccatgccacccaagagagagattgaattccggattgatttggcaccgggaaccgctccaatttacaagacaccgtataggatggcagccaacgagctagcagaggtcaagaagcaggttgatgagcagctgcagaaagggtacattcgaccaagtacttcaccttggggtgctccggtcatttttgtggagaagaaggacaagacgaagagaatgtgtgtcgactatcgcgcactcaatgaggtcacaatcaagaacaaatatcctttaccgcggatcgatgatttgtttgatcagctgaaaggagctaaagtgttttctaagatagacctgcgatcaggctaccaccagttgagaattcaggaagaggatattccaaagacagccttcaccactcggtatgggttgtatgagtgcacggttatgtctttcggacttaccaacgcacccgcattcttcatgaatctgatgaacaaagtgttcatggaatttctggacaagtttgttgtggtattcatcgatgacatacctatctattcaaagtccgaagaagaacatgagcaacatctccgtctggtactcaagaagttgaaggagcaccagttatacgccaagttcagcaagtgtgacttctggttgtctgaagtcaaatttctgggtcacgttattacagctcaagacgtggcagttgatccatcgaatgtggaatcagttaccaagtggacaccacctaacaccgtgtcgcaaattcggagttttcttggacttgcaggttattaccgccgattcattgaaaacttctccaggatcgcccgacccatgactcagttgcttaagaaagatgagaagtttaaatggacagctgagtgtgacaagagttttgaggagctcaagaagaaattagtatccgccccagttctgattctgcccgaccagatgaaagacttccaagtctattgcaacgcatcccgccacgggtttggatgtgttctaatgcaagagggcagagtggtcgcgtatgcctcgcggcagttgcgtccacatgaagggaattatccaactcatgacctggaattggcagcagtggttcatgccttgaagatctggaggcactatctgattggcaaccgctgcgaagtgtatacggaccacaagagtctgaaatacatctttacccaaccggatctaaatctccaacagcgaagatggttggagctaatcaaagattatgacatgagcattcattaccatccaggaaaagccaatgtggtggcagatgcattaagcaggaaaagctactgcaatgctttatgcaccgaaggcatgtgtaaggaattgcagcagaagcttgaacacctcaacttggggcttgtggaatatgggtacatggctgccctagaggcacgacctacgctcgtggatcaagtcagagcagctcaagtaaatgatcctgaaataacagagctgaaaaagaacatgagggtcggaaaagcccgggatttccacgaagatgaacatggcacaatctggttggaagaaagattgtgtgtacctgacgacaaggaactgaaggatatgatactcaccgaggctcatcagactcagtactccattcatccaggcagcaccaaaatgtatcaagacctcaaagaaaagttttggtgggtcagcatgagaagggaaatagctgaattcgtcacactctgcgacgtttgccaacgagtgaaggcagagcaccaaaggccagcagatttactccaacctcttcaaatcctggaatggaaatgggaagaaattggaatggatttcataacaggtctgcccaggacatcatctggccacgattcgatatgggctagtcttcaaatggcaccgttcgaagcattatacggctggaagtgccgcacacctctcttctgggatcagacaggcgaacgtcaactgttcggaacagaggtgttaacggaagcagaagagaaagtcagaaccatcagagaaaggttgagaattgcccagtctcgacagaagagctacgcggacaaccgccgaagggagctcacttttgaagcaggggataacgtgtaccttcgtgttactccgctccggggagccgattcggagcacatcgatatccaggaggatctgacctacatggagaagccagttcgcatccttgagaccagcgaaaggaggactagaaacaaggtgtcgccgtcgcgcgtccgcacctcggcatcgccagtcttcgccgcctccctcgttttccgccgccggtcgtcgccgccccctccggtgaggactccctcccccttcctttccttccccatcccgcgtgcaccgtcggttttggccgcgccgctgctccgtctgtgcgcctccgccttcgtgccgtccgccgccgcctctagccatggccggccggccggctttgaagctgagccgagcccggcggctactccctgcgccgtccgatcggcccgaggccgatccggaccgtcggtcctgtggaccggcggtggaccacccgcgtggtcccggtccacggtggaccggccgctttgtgccgctgacccatggggcccacgtgccggcgccccctccctctccccttgcgcaactgacatgcgggccccgcatgtcggcgccgcccgctccctttga

SEQ ID NO: 13825 - DNA, 5446 bp, Oryza sativa
  Clone ID: TFbOSC400722j.C1.o48.np
atggccggtcacccacccaaccaccgcggagaaggcatgatcgatttcgtggcagagttggcacgcatgacactggtggtgggctaccccgacgcgccggagtacacgaccattccaccgctcagtggcgagcttcctcaccgtgtccgcttggaggtccatggttacgtggggacttgcctcgccaacatggcggtcgaggcatctggaggcacagcagatcacgcctgtcaggaggcagcctacttgatgatggccagactacgggagcgccacaactacatcttccacgacacggcgtaccgctaccaccccagtcgagccaacggtgatggcgtcagctccttccgtccgacagctggcgagaacgacaccaccttcggtcacatgtgtgctgtgatgaggggattggacaggatgcactcggacctgcacaaggcgaccaaggccttgaacgatgggaagctcatgaggatcgtcgctttgaaggacgagatagcgcgcctgaagaaggagaacgctcagctaaagggtcttccagcgccaggaggagtccggatccgcaccacgccccgcaagacgacgacggcacccgtgcgcatccagcttgcgcccagaaacccacctccagcagcagctcccgcagcacctccagttctgcccgcagttcctgcagctccagctccagctccagctccagctcccgcgtccgctctctccttcgctccagcgtcagccgccagaggtccagccagtggcaccgggggttggttgtctgctactcccagtggcagcagcgatctcagcagcagcagctccagtggctcgcagtcaggcagcggcgagacgtatctgccaggctccaggagtcgctcagagggacctgatggtctacaccaggactggcaaccgcacgacaggcgagggcagcaacggcgaagaacgcgttgatggcgtgcaccccaacagtgattccggcaatggtccgccaccacttcccgagaatccgacccttgcccaagttatggcgcatcagactcagatgatggcagccatgatgcagcagatgcagcaacaacaccagcaaatgcaccagaggatgatgcagcacgtcgaacagcagcaccagcactttggtccccctccccctcaatccaaattgcctgagttcctaggagtcaggccacccaccttctccagcaccaccaaccctatggaggcaaatgactggctccatgcaatagagaagaagctgaatctcctgcagtgcaatgatcaggagaaggtcgctttcgccacacaccagcttcagggtcctgcgtcagcttggtgggacaaccacatggccacccgcccaccgggtactgaagtcacatgggcagagttctgccgtagcttcaggaggcacaagtgccagatggggtcgtggcacaaaagaagagggaatttcgtgcactccatcagggtaacaggaccgtgacagagtacctccacgagttcaatcgcctcactgcgatatgcaccataggatgttcgtaccgaccccgataagcaggagaagttcatggcgggcctggatgatgagctgaccaaccagctgatatccgggtactacgctgactttgaaggctggttgacaaggcaatccgtcaggaggaccaacgcaacaagatggacaggaagaggaaggccgctcagttcagggcacatcagggaagtcaccagaggccgcgcttcactcccggacagcagggtggacctaccaccatgatcgtccgtcagcaccgcccgttcaaccctagcaacttctaccagggcaccagtgacagtcagaaccaccatggaggtcagcccaaccgcggtgcagctccacgcccaccagtggcatcggcacagtcaggccagcccgcgcaagccaagaaggagacggaagcaaaaccagggtcctgcttcaactgtggcgagcttggccacttcgctgacaaatgcccgaagcctaggcgtgccgggccaaggtttatccaggctcgtgtcaaccacgcatctgcggaggaggcacaagcagcaccagaggttgtactgggtacgtttcctgttaactcaatccctgcaacagtactttttgattctggtgcaacgcattctttcatctcaaagaaatttgtcgggatgcatgggttaataagagaggaacttagcacaccgatgcgggttcataccccagggaatagctccacttcggttcaattcagcccttctataacaatagaaattcaaaggtcaccggttctagccaacctcatccttctcgaatccaaagacctagatgtcattcttgggatggattggctgaccaagtttaagggagtcatcgattgtgcgaatcgcacagtcaccctgaccaacgagaagggagaaaccgtggtgtacaaatctctagtctcgccaaagaaaggagtctcgttgaatcagattgagacggaaatcccagtggacaccgtagagaagaacttgagaaaattggatgatatacccatagtctgcgagtatccagaggtgttccccgaagacctcactaccatgccacccaagagagagattgaattccggattgatttggcaccgggaaccgctccaatctataagagaccgtacagaatggcggccaacgaattaacggaggtcaagaagcaagttgatgaacagctgcagaaagggtacatacgaccaagcacttcaccttggggcgctccggtcatttttgtggagaaaaaggataagacgaagaggatgtgcgtcgattatcgcgcacttaacgaggtcacaatcaagaataaatatcctttgccgcgaatcgacgatttatttgatcaactgaaaggggctaaagtgttttctaagatagacctgcgctcaggctaccaccagttgagaatccgggaagaggatatcccgaagacggccttcaccactcggtacgggttatatgagtgcacggttatgtccttcggacttactaacgcgcctgcattcttcatgaatctgatgaacaaagtgttcatagaatttctggacaagtttgttgtggtattcatcgacgacatacttatctactcaaaatcgaagaagaacatgaacaacatctccgtctggtactcgagaagttgaaggagcaccagctatacgccaagttcagcaagtgtgatttctggttgacggaagtcaaatttctgggtcatgtcattacagctcagggtgtggcagtcgacccatcgaacgtggagtcagttaccaagtggaccccaccgaagactgtgtcgcagattcgaagttttctaggactggcaggttattaccgtcgattcatcggaaacttctccagaatcgcccgacccatgactcagttgcttaagaaagatgagaaatttaaatggacagcggagtgcgataagagctttgaggagctcaagaagaaattagtatccgcaccagttttgattctgcccgaccagatgaaagacttccaagtttattgcgatgcatcccgtcacggacttggatgtgtcctaatgcaagagggcagagtggttgcatatgcctcgcggcagttgcgtccacacgaaggaaattatccaactcatgacttggagttggcagcggtggttcatgctttgaagatctggaggcactatctgatcggcaaccgctgcgaagtatatacggaccataaaagtctgaaatacatcttcacccaaccggacctaaactttcgacaacgaagatggttggagctaatcaaagactatgacatgagtattcactaccacccgggtaaggccaatgtggtggcagacgctttaagccggaaaagttactgcactgctctatgcatcgagagcatgtgtgaggaattgcggcaggagtttgaacatctcaacataggaattgttgaacacgggttcgtagccgctctggaagcacggcctacgctcgtggatcagtcagagccgctcaagtaaatgatccggaaatagcagaactgaaaaagaacatgagagtcggaaaggctcgggatttccttaaggatgagcatggcacaatctggatgggagaaagattgtgtgtacctgacgacaaggaattgaaggatctgatactcaccgaggctcatcagacccagtactccattcacccaggcagcaccaaaatgtatcaagacctcaaagaaaagttttggtgggtcagcatgaggagagaaatagctgaattcgtcgcactctgcgatgtttgccaacgagtgaaggcagagcaccaaagacccacaggtttactccaacctcttcaaatcccggaatggaaatgggaagaaattggaatggactttataacgggactgccccggacatcgtcgggtcacgattcgatctgagtagtcgtggatcgactcactaaggttgctcacttcataccagtacataccacatatacgggcaaaaggttggcggagctttacctttcgagaatcatgtgcctacatggagtactcaaaaagattgtatctgaccgagggagtcagttcacctcaaaattctggcagaagctgcaggaagaattggggacccgtttaaatttcagcacggcctatcacccgcaaactgatggccagaccgagcgggtcaatcaaatcttggaagatatgttgagagcttgcgctcttgattttggtggagcttgggacaaaagcttgccatatgcggaattctcgtacaacaacagctaccaggccagtctacagatggcaccgtttgaagctttatacggccggaagtgccgcacacctctcttctgggatcagacaggcgaacgtcaactattcggaacagaagtattagcggaagcagaagagaaagtcagaatcatcagggaaaggttgaggattgctcagtctcgacagaagagctacgcggataaccgtcgaagggagctcacttttgaggcaggagatcacgtgtaccttcgcgtcactccgctccggggagtacaccgttttcagacgaaaggcaagttggcaccacgcttcgtgggaccatacaaaatcttggaacgaaggggagaagtggcttatcagctagaacttccatccaacatgatcggcatccatgacgtgttccacgtgtcccaactaaagaagtgcttaagggtacctgaagaacaggctgattcggaacacattgatatccaggaagacctaacttatgttgagaagccggttcgtatactggataccagcgaaaggagaaccagaaacaaggtcacccggttttgccgagttcagtggagtcatcattcggaagaggaagcaacctgggaaagggaagatgagttgaaagccgcccatccgcacctcttcaccagctcctccgaatctcggggccgagattccgtt

SEQ ID NO: 13826 - DNA, 3036 bp, Oryza sativa
  Clone ID: TFbOSC400772j.C1.o95.fg
atggaggcgaatgactggctccatgccatagagaagaagctgaatctcctgcagtgcaatgatcaggagaaggttgctttcgccacacaccagcttcaaggtcctgcgtcagcttggtgggacaatcacatggccacccgcccgccaggcactgaagtcacttgggaagagttctgtcgtagcttcaggaaggcgcagggcaacagaactgtgacggagtatctccatgagttcaatcacctcgcgcgatatgcaccggaggatgtccgcactgacgccgagaagcaggaaaaattcctagcaggtctggatgatgagctaaccaaccagttgatatctggagattacgccgatttcgaaaggctggtggacaaggcaatccgtcaggatgatcaacgcaacaagatggacaggaagaggaaggccgctcagttcagggcacctcagggaagtcaccagaggccgcgcttcgctcccgggcagcagggtggacctaccaccatgatcgtccgccagtaccgcccgttcaaccctagcaactttccccagggcgccagtggcagtcagaaccaccatggaggtcagcccaaccgcggtgcagctccacgcccaccaacggcaccggcacagtcaggcccgtccgcgcaagccaagagggagactggagcaaaaccagggtcctgcttcaactgtggcgagcttggccacttcgctgacaaatgcccgaagcctaggcgtgccgggccaaggtttatccaggctcgtgtcaaccacgcatctgcggaggaggcacaagcagcaccagaggtcgtactgggtacgtttcctgttaactcaatccctgcaacaatactttttgattctggtgcaacacattcgttcatttcaaagaagtttgtcgggatgcatgggttaaggaaagaagagcttagcacaccaatgagggttcatacctcgggaaatagctcaacctcagtcagttttagcccttcagtgctaatagaaatccaaagatcaccatttctagccaacctcattcttctcgaatccaaagacctagatgtcattcttgggatggattggctgaccaagtttaagggagtcatcgattgtgcgaatcgcacagtcaccttgaccaacgagaagggagaaacagcagtgtacaaatcaccagactcaccaaagcaaggggtctctttgaatcagattgaggcggaaatcccagtggacaccgtgaagaagaatttgaggaaattggaagatatacccatagtctgcgagtatccagaagtgttccccgaagaccttactaccatgccacccaagagagagattgaattccggattgacttggcaccgggaaccgctccaatttacaagagaccgtacagaatggcggccaacgaactagcagaggtcaagaagcaggttgatgagcagctgcagaaagggtacattcgaccaagtacttcaccttggggtgctccggtcatttttgtggagaaaaaggataagacgaagaggatgtgcgttgattatcgcgcactcaacgaggtcacaatcaagaacaaatatcctttgccgcgaatcgatgatttgtttgatcaactgaaaggagctaaagtgttttctaagatagacctgcgatcaggctaccaccagttgagaattcgggaagaggatattccaaagacggccttcaccactcggtacgggctatatgagtgcacggttatgtctttcggacttaccaacgcacccgcattcttcatgaatctgatgaacaaagtgttcatggaatttctggacaagtttgttgtggtattcatcgacgacatacttatctattcaaagtccgaagaagaacatgagcaacatctccgtctggtactcgagaagttgaaggagcaccagctatacgccaagttcagcaagtgtgacttctggttgacggaagtcaaatttctgggccatgtcattacagctcagggtgtggcagttgatccatcgaacgtagagtcagttaccaaatggatcccaccgaagaccgtgtcgcagattcgaagttttctaggactggcaggttattaccgccgattcatcgaaaacttctccaggatcgcccgacccatgactcagttgcttaagaaagatgagaagtttaaatggacagctgagtgcgataagagttttgaggagctcaagaagaaattagtatccgcaccagttttgattctgcccgaccagatgaaagacttccaagtctattgcgatgcatcccgtcacggacttggatgtgtcctaatgcaagagggcagagtggttgcgtatgcctcgcggcagttgcgtccacacgaagggaattatccaactcatgacctggaattggcagcagtggttcatgctttgaaaatctggaggcactatctgattggcaaccgctgcgaagtatatacagaccataagagtctgaaatacatcttcacccaaccggacctaaatctccgacaacgaagatggttggaactaatcaaagactatgacatgagcattcactaccacccgggtaaagccaatgtggtggcagacgcattaagcaggaaaagttactgcactgccctatgcatcgagggcatgtgtgaggaattgcggcaggagtttgagcatctcaacgtgggaattgttgaacacgggttcgtagccgctctggaggcacggcctacgctcgtggatcaagtcagagcagttcaagtaaatgattctgaaatagcagagctgaaaaagaacatgagagtcggaaaaacccgggatttccacgaagatgaacacggcacaatctggttgggagaaagattgtgtgtacctgacgacaaggaactgaaggatctgatactcaccgaggctcatcagacccagtactccattcatccaggcagcaccaaaatgtatcaagacctcaaagaaaagttttggtgggtcagcatgaggagagaaaagctgaattcgtcgcactctgcgatgtttgtcaacgagtga

SEQ ID NO: 13827 - DNA, 4995 bp, Oryza sativa
  Clone ID: TFbOSC400773j.C1.o38.fg
atggatgaagtcgggcgtcgatggacattctccagggcaaatgaaggctacacgggctgcggcccggcaattttcccggtcgcgacagacctgcacaaggcgaccaaggccttgaacgatgggaagctcatgaggatcgtcgctctgaaggacgaggtagcgcgcctgaagaaggagaatgctcagttgaagggccttccagcgccaggaggagtccggatccgcactacgccccgtaagaggacgactgcacctgtgcgcatccagcttgcgcccaggaacccacctccaccagcagctcccgcagcagctccagttccgcccgcagttcctgcagctccagctccagctcccgcgttcactctctccttcgctccagcatcagccgccagaggttcagccagtggtaccggaggttgcttgtttgggatggtctacaccaggactggtagccgcgcaacaggcgagggcagcaacggcgaagaacgcgctgatggtgtgcaccccaacggtgattctggcaatggtccgccaccacttcccgagaatccgacgcttgcccaagttatggcacatcagactcagatgatggcagccatgatgcagcagatgcagcagcagcaccagcagatgcatcagaggatgatgcagcacgccgaacagcagcaccagcagtttggtccccctcccccccagtccaagttgcctgagtttctacgtgtcaggccacccaccttctccagcaccaccaaccctatggaggtaaatgactggctccatgcgatagagaagaagctgaatctcctgcagtgcaatgatcaggagaaggtcgctttcgccacacaccaacttcagggtcctgcgtcagcttggtgggacaaccacatggccacccgcccaccgggtactgaagtcacatgggcagagttctgccgtagcttcaggaaggcacaggtgccagacggggtcgtggcacaaaagaagagggaattccgggcgctccatcagggcaacaggactgtgacagagtacctccatgagttcaatcgcctcgcgcgatatgcaccagaggatgtccgcaccgacgccgagaagcaggagaagttcatggcgggtctggatgatgagctgaccaaccaactgatatctggggactacgccgactttgagaggctggttgacaaggcaatccgccaggaggatcagcgcaacaaaatggacaggaaaagaaaggcggcgcagttccggtccaaccaaggtagtcagcaccgaccgcgcttcactcccggacagcagggtggacctaccaccatgatcgtccgccagcaccgcccgttcaactccagcaacttccaccagggcactagtggcagtcagaaccaccagggaggccagcccaaccgcggtgcagctccacgcccaccaatggcaccggcacagtcagcccagcccgcgcaagccaagaaggagacgggagcaaaaccagggtcctgcttcaactgtggcgagcttggccacttcgctgacaaatgcccgaagcccaggcgtgccgggccaaggtttatccaggctcgtgtcaaccacgcgtctgcggaggaggcacaagcagcaccagaggtcgtactgggtacgttccctgttaactcaatccctgcaacagtactttttgattctggtgcaacgcattctttcatttcaaagaaattcgtgggaatgtatgggctaaggaaagaagagcttagcacaccaatgagggttcgtaccccgggaaatagttcaacctcagtcagttttagcccttcagtgctaatagaaatccaaagatcaccatttctagccaacctcattcttctcgaatccaaagacctagatgtcattcttgggatggattggctgaccaagtttaagggggtcatcgattgtgcgagtcgcacagtcaccttgaccaacgagaagggagaaaccgtagtgtacaaatcaccaggctcaccaaagcaaggagtctccttgaatcaaattgaaacggaaatcccagtggacaccgtggggaagaacttgagaaaattggaagatatacccatagtctgcgagtatccggaagtgttccccgaagacctcactaccatgccacccaagagggagattgaattccggattgacttggcaccgggaaccgctccaatttacaagagaccatacaggatggcggccaacgaattagcagaggtcaagaagcaagttgatgaacagctgcagaaagggtacatacgaccaagcacttcaccttggggcgctccggtcatttttgtggagaaaaaggataagacgaagaggatgtgcgtcgactatcgcgcacttaacgaggtcacaatcaagaataaatatcccttaccgcgaatcgacgatttatttgatcaactgaaaggagctaaagtgttctctaagatagacctgcgatcaggctaccaccagctgagaatccgggaagaggatattccgaagacggccttcaccactcggtacgggctatatgagtgcacggttatgtctttcggacttaccaatgcacccgcattcttcatgaatctgatgaacaaagtgttcatggaatttttggacaagtttgttgtggtgttcatcgacgacattcttatctattcaaagtccgaagaggaacatgaacaacacctccgtctggtactcgagaagttgaaggagcaccagctatacgccaagttcagcaagtgtgacttctggttgacggaagtcaaatttctgggccatgtcattacagcccagggtgtggcagttgatccatcgaacgtggagtcagttacaaaatggaccccaccaaagaccgtgtcgcagattcggagttttctaggactggcaggttattaccgccgattcatcgaaaatttctccagaatcgcccgacccatgactcagttgcttaagaaagatgagaagtttaaatggacagctgagtgcgataagagctttgaggagctcaaaaagaaattagtatccgcaccagtattgattctgcccgacccgacgaaagacttccaagtctattgtgatgcatcccgtcacggacttggatgtgtcctaatgcaagagggcagagtggttgcgtatgcctcgcggcagttgcgtccacacgaaggaaattatccaactcatgacttggaattggcagcagtggttcatgctttgaagatctggaggcattatctgattggaaaccgctgcgaagtatatacggaccataagagtctgaaatacatcttcacccaaccggatctaaaccttcgacaacgaagatggttggaactaatcaaagactatgacttgagtgttcactaccacccgggtaaagccaatgtggtggcagacgctttaagccggaaaagttactgcactgccctatgcatcgagggcatgtgtgaggaattgcggcaggaatttgaacatctcaacatgggaattgttgaacacgggtttgtagccgctttggaggcacggcctacgctcgtggatcaagtcagagccgctcaagtaaatgatccggaaatagcagaactgaaaaagaacatgagagtcggaaaggctcgggatttccatgaagatgagcatggcacaatctggatgggagaaagattgtgtgtacctgacgacaaagaactgaaggatctgatactcaccgaggctcatcagacccagtactccattcacccaggcagcaccaaaatgtatcaagacctcaaggaaaaattttggtgggtcagcatgaggagagaaatagctgaattcgtcgcactctgcgatgtttgccaacgagtgaaagcagagcaccaaagaccagcaggtttactccaacctcttcaaatcccggaatggaaatgggaggagattggaatggactttataacaggactgccccggacatcatcgggacatgattcaatctgggtagtcgtggatcgacttaccaaggtggctcactttataccagtacataccacctatacgggaaagagattggcagaattgtacctcgcaaggatcatgtgtttgcatggggtacccaagaagatagtatccgaccgaggtagtcagttcacctcaaagttctggcagaagctgcaggaagaaatggggacccgtttaaatttcagcacggcctatcacccgcaaactgatggtcagacagagcgagtcaatcaaatcttggaagatatgttgagagcttgcgctcttgattttggtggagcttgggacaaaagcttaccatatgcggaattctcgtataacaacagctaccaggccagtctacagatggcaccgtttgaagctctatacggccggaagtgccgcacacctctcttctgggatcagacaggcgaacgtcagctgttcggaacagaagtattagcggaagcagaagagaaagtcagaatcatcagggagagattgaggattgctcagtctcgacagaagagctacgcggataaccgtcgaagggagctaacttttgaggccggagattacgtgtatcttcgtgtcaccccgctccggggagtacaccgctttcagacaaaaggcaagttggcaccacgcttcgtgggaccgtacaaaattttggaacgaaggggagaagttgcctatcagctagaacttccatccactatgatcggcatccatgacgtgttccatgtgtcccaattaaagaagtgtttaagggtacctgaagaacaggctaattcggaacacattgatatccaagaggacctaacatatgtggagaagccggttcgcatacttgacactagcgaaaggagaaccagaaacaaggtcaccaggttttgccgtgttcagtggagtcatcattcagaagaggaagcaacctgggaaagggaagatgagttgaaggccgcccatccgtacctcttcaccagctccaccgaatctcggggccgagattccgtttaa

SEQ ID NO: 13828 - DNA, 4251 bp, Oryza sativa
  Clone ID: TFbOSC400775j.C1.o53.fg
atggtctacaccaggaatggtagccgcgcgacaggcgagggcagcaacggcgaagagcgcactgatggggcgcatccccacagcgattctggcaatggtccgccaccacttcccgagaatccgacgctagcccaagtaatggcacatcagacccagatgatggcagccatgatgcagcagatgcagcagcagcaccagcagatgcaccagcggatgctgcagcacgccgaacagcagcatcaacagtttggtccccctccccctcagtccaagttgccagagttcctacgtgtcaggccacccaccttctccagcaccaccaaccctatggaggcgaatgattggctccatgccatagagaagaagctgaatctcctgcagtgcaatgatcaggagaaggttgctttcgccacacaccagcttcaaggtcctgcgttagcttggtgggataaccacatggccacccgcccaccaggtactgaagtcacttgggcagagttctgccgtagcttcaggaaggcgcaggtgccagatggggtcgtggcacaaaagaagagggaattccgggcgctccatcagggcaacaggactgtgacggaatacctccataagttcaatcgcctcgcgcgatatgcaccagaggatgtccgcaccgacgccgagaagcaggaaaagttcatggcgggtctggatgacgagctgaccaaccaactgatatctggggactacgctgactttgagaggctggtggacaaggcaatccgtcaggaggatcaacgcaacaagatggacaggaagaggaaggccgcacagttcagggcacctcagggaagtcaccagaggccgcgcttcactcccggacagcagggtggacctaccaccatgatcgtccgccagcaccgcccgttcaaccctagcaacttcccccagggcgccagtggcagtcagaaccaccatggaggtcagtccaaccgcggtgcagctccacgcccaccaatggcaccggcacaatcaggcccgcccgcgcaagccaagaaggagactggagcaaaaccagggtcctgcttcaactgtggcgagcttggccacttcgctgacaaatgtccgaagcctaggcgtgccgggccaaggtttatccaggctcgtgttaaccacgcatctgcggaggaggcacaagcagcaccagaggtcgtactgggtacgttccttgttaactcaatcccttcaacagtactttttgattctggtgcaatgcattctttcatttcaaagaaatttgtcgggatgcatgggttaataagagaggaacttagcacaccaatgcgggttcataccccagggaatagctccacttcggttcaattcagcccttctataacaatagaaatccaaagatcaccatttctagccaacctcattcttctcgaatccaaagacctagatgtcattcttgggatggattggctgaccaagtttaagggagtcatcgattgtgtgaatcgcacagtcaccttgaccaacgagaagggagaaaccgtggtgtacaaatcaccagactcaccaaagcaaggggtctctttgaatcagattgagacggaaatcccagtggacaccgtggagaaaaacttgaggaaattggaagatatacccatagtctgcgagtatccagaagtgtttcccgaagacctcactaccatgccacccaagagagagattgaattccggattgacttggcaccgggaaccgctccaatttacaagagaccgtatagaatggcggccaacgaattagccgaggtcaagaagcaggttgatgagcagctgcagaaagggtacattcgaccaagtacttcaccttggggtgctccggtcatttttgtggagaaaaaggataagacgaagaggatgtgcgttgattatcgcgccctcaacgaggtcacaatcaagaacaaatatcccttgccgcgaatcgacgatttatttgatcaactgaaaggagctaaagtgttttctaagatagacctgcgatcaggctaccaccagttgagaattcgggaagaggatattccgaagacggccttcaccacttggtacgggctatatgagtgcacggttatgtctttcggacttaccaacgcacccgcattcttcatgaatctgatgaacaaagtgttcatggaatttcttgacaagtttgttgtggtgttcatcgacgacattcttatctactcaaaatccgaagaagaacatgagcaacatctccgtttggtactcgagaagttgaaggagcaccagctatacgccaagttcagcaagtgtgacttctggttgacggaagtcaaatttctgggccatgtcattacaactcagggtgtggcagttgatccgtcgaacgtagagtcagttaccaaatggaccccaccaaagaccgtgtcgcagattcgaagttttctagggctggcaggttattaccgccgattcatcgaaaacttctccagaatcgcccgacccatgactcagttgcttaagaaagatgagaagtttaaatggacagctgagtgcgataagagtttcgaggagctcaaaaagaaattagtatccgcaccagttttgattctgcccgaccagatgaaagacttccaagtctattgcgatgcgtcccgtcacggacttggatatgtcctaatgcaagagggcagagtggttgcgtatgccttgcggcagttgcgtccacacgaagggaattatccaactcatgacctggaattggcagcagtggcacggcctacgctcgtggatcaagtcagagcagctcaagtaaatgattctgaaatagcagagctgaaaaagaacatgagagtcggaaaagcccgggatttccacgaagatgagcatggcacaatctggttgggagaaagattgtgtgtacctgacgacaaggaactgaaggatctgatactcaccgaggctcatcagacccagtactccattcatccaggcagcactaaaatgtatcaagacctcaaagaaaagttttggtgggtcagcatgaggagagaaatagctgaattcgtcgcactctgcgatgtttgccaacgagtgaaggcagagcaccaaagaccagcaggtttactccaacctcttcaaatcccggaatggaaatgggaggagattggaatggactttataacgggactgccccggacatcgtcgggtcacgattcgatctgggtagtcgtggatcgactcactaaggttgctcacttcatactagtacataccacgtatacgggcaaaaggttggcggagctttacctttcgagaatcatgtgcctacatggagtacccaaaaagattgtatctgaccgagggagtcagttcacctcaaaattctggcagaagctgcaggaagaattggggacccgtttaaatttcagcacggcctatcacccgcaaactgatggtcagaccgagcgagtcaatcaaatcttggaagacatgttgagagcttgcgctcttgattttggtggagcttgggacaaaagcttgccatatgcggaattctcgtacaacaacagctaccaggccagtctacagaaggcaccgtttgaagctttatacggccggaagtgccgcacacctctcttctgggatcagacaggcgagcgtcaactgttcggaacagaggtattagcggaagcagaagagaaagttagaatcatcagggaaaggttgaggattgcccagtctcgacagaagagctacgcggataaccgtcgaagggagctcacttttgaggcaggagattacgtgtatcttcgtgtcactccgctccggggagtacaccgttttcagatgaaaggcaagttggcaccacgcttcgtgggaccatacaaaatcctggaacgaaggggggaagttgcttatcagttagaacttccatccaatatgatcggcatccatgacgtgttccacgtgtcccaattaaagaagtgcttaagagtacctgaagaacaggctgattcggaacacattgatatccaggaggacctaacatacgtggaaaagccggttcgtatacttgataccagtgaaaggagaaccagaaacaaggtcacccgattttgccgagttcagtggagtcatcattcagaagaggaagcaacctgggaaagggaagatgagttgaaagccgcccatccgcacctcttcaccagctcctccgaatctcggggccgatattccgtttaa

SEQ ID NO: 13829 - DNA, 4236 bp, Oryza sativa
  Clone ID: TFbOSC400798j.C1.o32.fg
atggctcaaggaaaaatgataggacttgcaggcaagcttcggcgagtttcagcaaaaacagaaaaaccgaactggcagataagctcaacggagcgcatcaacacgaaaataggcacacctccaagttacagctcaatcggagttgatatgtggcctatggaattttctgaaaccactataaacaagattgtgggcttgacgcacgctgcgttcgtgcggagtctgttggagccgtgcgcgagcctgcggcgatcgccggggttcctgatgtcgctaccaacgccgcgcgtctcccactcaccgccgtgtcatcgctggcgtttgccgtctccgcgccgtggccgtcatggcggccgcggccaagtcgtggtgcatcgcgtcgtccgtgaggtgaccacgagcagcgtcgtctacccgacactcacccgcacaaattaccaagactgggtgctggtaatgcgggtgaacatgcaggcccaaggtctgtggggagcggtggagccggagggtgatgatcttgttgactaccggcaggaccggcaggcgctcaccgcgatacttcgcgccgtgcccgccgagatgctcgccacgctcgctgtcaaggagacggtgcaggaggcatgggaagcgatcaagactcgccgtatcggtgtgcagcacgtgcgtgaggcgaatgcacaacagctgcgccgagaattcggtgatatcatcttcaaggacggtgaaaccgtcgacgacttctcgatgcggatcggcgtcctcgccaacaaccttcgcaccttaggtgataatatcactgatgctgaggtcgttcagaaattgttgcaggttgtcccagaacatctccagcaaatagccatctcgattgagaccttgctcgacgtcaatgagctgtctctcgaggaagttactgggagtctgcgctccgtcgagcaacgcaagcagcgcaaggctgtggctgcatcgagtcgggtcgatgcatacggctgtctcctcttcaccgaggaagaatggctggcgaaattccgtaaggcagcctctctccaagacgccgctcactcctcctccggcggcaacagcgaccgccagggtcaagggcgtgggaataaggacgatggagcctcgaaggagacccagcccaagccagccaacctgggaggccgtaacccgggaaattgcaagaattgtggcaagaggggacattgggctaaagactgtcgcagcaagcccaaggctcagcaggcttacgtggcccaggaggaggacgacgagcctgctctgctcctggccaaggtggagctggatccaccgcgtcctcgtgtcgtcgcaccggcaaaccccgtctcgccaccgagcgcgccaagaacgccgtcgccgacaagcgagctcgctgtagttaaggcaaaagtcttcacgcagctcgacgatggtggcgagcactatccggcgacgtggatcctggataccggcgcaaccaactatatgaccgggtcccgctccgctttcgccgagctcgacacggcggtctccggcacagtcaagtttggcgacggctcggtggttcacattgagggccacggcaccgtcctgttctcctgcaggtctagggaacaccgcggcatcaccgggatctactacatcccgtggctcacggtgaacattgtcagccttggacagctggatcattctggcagcaacctggacatcgaccgtccggtctgcctcgcggcaaggagcgccgagccggcgtggcggtggcatgctaggtacggccacctcaactttcctgctctccgcaagctcgtgcaacaggaaatggttcgtgggctgccgctgctgcaacaagtaactcaagtctgcgacggctgtctgctcgggaagcagcggcgagcggcgttcccggcgcagtccaagtactgcaccaacgaacacctcgtgctcgtccacggcgatctctgtaggccgatcgaacctgcaacgccggctggtaatcgctattttttgttgcttgttgatgacatgagccgctatatgtggctaaccttgatcaggagcaaggatgaggccgcgaacgccatcaagcactttcaggcccgtgcagtggtggagaccgggcgcaaactccatgcgctgcgcacggatcgtggcggcgaatttacctcaatcgaattcggggaatactacgccaatcttggagttggccggaagttgacggtgccctactctccgcagcagaacggagtagtggagcgtcgaaaccaaaccatcgtcgccactgcccgcagcatgatgaaggcgaagggtgttcctgggcggttctggggtgaggccatgtccacaacggtctttctcttgaatcgttctccaaagaaaagcttggacaaccagacgccctatgaggcatggtatggccaacggcctgctgtgcatttcctgcgcactttcgggtgcatggggcatgtcaagatcaccaagcctgggctaaagaaactcaacgaccggagtgtgccaatggtgctcctcggctatgaggaaggctcgaaggcctaccggctctatgatccggattccatcctggacgccgacacagatgacgacgtcgtgcctcgctaccgcctggtggataacctgctgggggatgcctcgctgcccagacagactccgcaggtgctggaacagctcgagctctatgctgtgagcgccgacgaacctgcctcgctggctgaggcagaggcagatccaaattggcgtggcgccatgcaagacgagcttgacgcaatcgtcgacaatgacacttggtcgctgactgacctaccccatggccaccgtgcaatcgggctaaaatgggtctacaagctgaaacgcgacgaacagggggcgatcgtgcgctacaaggcgcgcctcgccgctaaggggtacgtccagcgacaagggggtggacttcgacgaggtcttcacacctgtcgcccggctggaatcgattggcaagtccaccacatggacgtcaagtcagcattcctcaatggcaagctgctcgaggaagtttatgtctcacagccgccgggtttcgtcgacgacaaccacaagaacaaggtgtatcgtctgcacaaagctctttacggcttgcgccaggcgcctcgcgcgtggaatgccaaacttgatagctccttgctgtcatttggctttcaccgcagcagctccgagcatggtgtgtacacacgcaccaggggaggaagacgactgaccgtgggcgtctacgtcaacgacctcatcatcaccggcgatcacgacgacgagattcgtagcttcaagggagagatgatgaaactcttcaagatgagtgatttggggcactcagatactacctcggcatcaaggttaccctggacagtgatgggatcacgctggggcaagctgcatatgccggcaagattcttgagagggcaggactcaaggactacaatccctgtcagactcccatggaggcactcgctgctgggggattcgttttggcccaggtgcacagggcacttcaagaaagctgttgtctattctgacagtgatttggctggtgatctagatgagcaaaagagtacatcaggccagattttcttcgtcaatggcgggccggtcacttggcaatcttccaagcagaaggtggtggcattgtcctcttgtgaggcagagtacatcgccgtagctgccgcgacatgtcaaagcgtatggctcgcgtggctgttagcggaggtgatgggcgacgaggtcgccgcaccgctgctgaaggtggacaatcagtccacaatctcattgatcaaaaacccagtgcatcacgaccggagtaagcatatcgatgtcaaataccattatatccgggagtgtgcagaaaagaagctgattgaggtgatgtccgtgggaactgcggagcagcttggggatatattcaccaaatctctgggcagaaccaggtttcaggagcttcgctcgaagatcgagtctgttggagtcgtgcgctgtatgctccagtgtcgcgaccgggaaaatttccttttcccgaacgctagtgtattaatccccgtcccaggaaaagccgggactgagccacaaactaagccttacccactagacatgtggaagtacggtagtgctttgcaacagaggcccgaagaccggtccttatatggccgaggtgctactatcaaaaccatgcaccccgagcccagcctaaaaccattttag

SEQ ID NO: 13830 - DNA, 4350 bp, Oryza sativa
  Clone ID: TFbOSC400800j.C1.o73.fg
atgtcgttaccaacgccgcgcgtctcccactcaccaccgcgtcgtcgctggcgctcgccgtctccgcgccgtggccgtcatggcggccgcggccaagtcgtggtggaacgcgtcgtccgcgaggcgaccacgagcagcgtcgtctacccgacactcacccgcacaaattaccaagattgggcgctggtaatgcgggtgaacatgcaagcccaatgtctgtggggcgcggtggagccggagggcgatgatctcgtcgactaccggcaggaccagcaggcgctcgccgcgatacttcgcgccgtgcccgccgagatgctcgccacgctcgctgtcaaggagacggcgcaggaggcgtgggaagcgatcaagactcgccgtatcggtgtgcagcgcgtgcgtgaggcgaatgcacagcagctgcgccgagaattcggtgatatcctcttcaaggacgatgaaaccgtcgacgacttctcgatgcggatcggcggcctcgccaacaaccttcgcaccttaggtgataatatcactgaagctgaggtcgttcagaaattgttgcaggttgtcccagaacatctccagcaaatagccatctcgattgagaccttgctcgacgtcaatgagctgtctctcgaggaggttactgggcgtctgcgctccgtcgagcaacgcaagcagtgcaagactgcggcggcatcgagtcgggtcgacgccaatggccgtctcctcttcaccgaggaagaatggctggcgaaattccgcaaggcggcctctctgcaagacgccgctcactcctccagcggcaacggcgaccgccggggtcgagggcgtgggaagaaggacgatggagccccgaaggaggcccagcccaagccagccaacccgggaggccgtaacccgggaaattgcaagaattgcggcaagaggggacattgggccaaagactgtcgcagcaagcccaaggcccagcaagcttacgtagcccaggaggaggacgaagagcctgctctgctcctggccaaggtgcagctggatccgccgcgtcctcgcgtcgctgcaccgacaaacgtcgtctcgccaccgagcgcgccgagggcgccgtcgccgattggcgaacttgccgtggtcgaggccaaggtcttcgcgcagctagacgacggtggcgaacatgatccggcgatgtggatcctggatactggcgcaaccaaccatatgaccgggtcccgctccgctttcgccgagctcgacacggcggtcaccggcactgtcaggtttggcgacggctcggtggttcgcatcgagggccgcgtcaccgtcctgttctcctgcaggttcggggaacaccgcggcatcgccggggtctactacatcccgcggctcacggcgaacatcgtcagccttggacagctggatcgttccggcagcaaggtactgattcatcacggcatcctgcacgtgtgggatcctcgagggcacctactcgtccgtgtccgacgctccgacgactgcctctacaccatcaagctggacatcgaccgtccggtctgcctcgcggcaaggagcgccgagccggcgtggcggtggcacgccaggtacggccacctcaactttcctgctctccgcaagctcgcgcaacaggaaatggttcgtgggctgccgctgctacaacaagtcactcaagtctgcgatggctgtttgctcgggaagcagcggcgagcggcgttcccgacgcagtccaagtaccgcgctgacgaacatctggagctcgtccacggcgatctctgtgggccgatcgaacctgcaacgccggctggtaatcggtattttttgttgcttgtcgatgacatgagccgctatatgtggctaaccatgattaggagcaaggatgaggccgcgaacgccatcaagcactttcaggcccgtgcagaggtggagtccgggcgcaaactccgtgcactgcgcatggatcgtggaagcgaattcacctcaatcgaatttggggaatactgcgccaatctcggagttggtcggcagttgacggcgccctactccccgcagcagaacggagtagtggagcgtcgaaaccaaaccatcgtcgccactgcccgcagcatgatgaaggcgaagggtgttcctgggcggttctggggagaggccatgtccacagcggtctttctcttgaatcgttcgccgacgaaaagcttggacaaccagacgccctatgaagcatggtatggccaatggcccgctgtgcatttcctgcgcactttcgggtgcgtggggcacgtcaagatcaccaagcccgggctgaagaaactcgatgaccggagtgcgccaatggtgctcctcggctacgagcaaggctcgaaggcctaccggctctatgatccagtcagcgagcgcgtccatgtgtctagggacgtggtgtttgatgaagacatcgcctgggactggggaccagtgacgcctgatggtgctccccagctcgagccgttcaccgtcgaacaggtggtgacgaccaccatcgggacggcacctgcttcgtcgccgactccaccctcgccaccatcgccggctccgtcggcccccacgacaccggcacctccgtcgcctccgtcgccggaggcggttgagtttgtcacgccgcctacccaagattccatcctggacgccgacgcagatgacgacgtcgtgcctcgctaccgcctggtggataacctgctggggaatgcctcaccgcccggacacgctccgcgggtgctggaacagctcgagctccatgttgtgagcgccgacgaacctgcttcactggctgaggctgaggcggatccaagctggcgtggcgccatgcaagacgagcttaacgcgatcgtcgacaacgacacttggtcgctcactgacctaccccatggccaccgtgcaattgggctaaaatgggtctacaagctgaaacgtgacgaacagggggcgatcgtgcgctacaaggcgcgcctcgtcgctaaggggtacgtccagcgacagggggtggacttcgacgaggtcttcgcacttgtcgcccggctggaatcggtgcgcctccttctcgccgtcgccgcgcaccaagggtggcaagtccaccacatggacgtcaagtcggcattcctcaacggcgagctgctcgaggaagtttatgtctcgcagccgccgggttttgtcgacgacaaccacaagaacaaggtgtatcgcctacacaaagctctttacggcttgcgccaggcgcctcgcgcgtggaatgccaaacttgatagctccttgctgtcactcggctttcaccgcagcagctccgagcatggtgtgtacacacgcaccaggggaggaagacgactgatggtgggcgtctacgtcgatgacctcatcatcaccggcgatcacgacgacgagatccgcagcttcaagggagagatgatgaagctcttcaagatgagtgatttgggggcactcagatactacctcggcatcgaggttacccaggacagtgatgggatcacgctggggcaagccgcatatgccggcaagattcttgagaaggcaggactcaaggactgcaatccctgtcagactcctatggaggtacgtttgaaattgagaaagggttcagattttccgcttgtggatgctacactgtatcgcagcttggttgggagtctgcgctatctcgtcaacacgcgacccgacctggcattctctgttgggtatgtcagtcgcttcatggagtcacccagggaagatcatctcgctgccgttcggcgcatactgcgctatgtggcaggcactcgctgctggggaattcgatttggcccaggtgcacggtgcgctttgccaatgctggttggttactctgacagtgatctggctggcgatccagatgagcgaaagagcacgtccggccagattttcttcatcaatggcgggcctgtcacttggcagtcctccaagcagaaggtggtggcattgtcttcctgtgaggccgagtacatcgccgcagccgccgcaacatgtcaaggagtatggctcgcgcggctgttagcggaggtgctgggcgacgagatcaccgcaccgctgctgaaggtggacaaccagtccacaatatcattgataaaaaatccagtgcatcatgaccggagtaagcatatcgatgtcaaatatcattatatccgggagtgtgcagaaaagaaactgatcgaaatgatgttcgtgggaactgcggagcagctcggtgatatattcaccaaatctctgggcagaaccaggtttcaggagcttcgttcaaagatcggtgtctgttctcttgacaagagcagtcagacttaa

SEQ ID NO: 13831 - DNA, 4686 bp, Oryza sativa
  Clone ID: TFbOSC400992j.C1.o25.fg
atggcggcggcgagcagagcacggcggtggagcctcgccggcaagacggcgctcgtcaccggcggcaccaagggcatcgggcgcgcgatcgtggaggagctcgccgggttcggggtgagggtgcacacgtgttcacgccacgacgccgacctgcaggactgcctccgccggtggaacgccgccggcgaaggtggcggcgcggcggcgctcgtcacggggtccgtctgcgacgtgtccgtgcgcggcgacagggaggcgctggtggccgcggcgcgcgccgcgctcggcgggcggctcgacatgctcgtcaacaacgccggccaggtggtcgtcggcccggccgcggagaccgcgccggaggagtacgcgcgcctcatggccaccaacctcgagtcctgcttccacctcgcccagctcgcgcaccatctcctccgcgacgcggcggcgggcggcggcgccgccgcgagcgtggtgaacatctcctccaccgcggcgttctacgccgcgccgcacctggcggtgtactcggcgaccaagggcggcatgaaccagctcacccggtgcctcgccgccgagtgggcgcgcgacggcgtgcgcgtcaacgccgtcgcgccgggggccacccgcaccgacatctgcgacaccagcggcgtggcgctgggcgagaagacgaggcgcaggctggcggacgccggcgccatggaccgcgtccccatccgccgcatcggcgagcccgaggaggtcgccgccgccgtcgtcttcctctgcatgccggccgcctcctacatcaccggccaggcccaaggtctgtggggcgcggtggagccggagggcgatgatctcgtcgactaccggcaggaccggcaggcgctcgccgcgatacttcgcgccgtgcccgccgagatgctcgccacgcttgctgtcaaggagacggcgcaggaggcgtgggaagcgatcaagactcgccgtatcggtgtgcagcgcgtgcgtgaggcgaatgcacagcagctggccgagaattcggtgatatcctcttcaaggacggttgtcccagaacatctccagcaaatagccatctcgattgagaccttgctcgacgtcaatgagctgtctctcgaggaggttactgggcgtctgcgctccgtcgagcaacgcaagcagcgcaagactgcggcggcatcgagtcgggtcgatgccaatggccgtctcctcttcaccgaggaagaatggctggcgaaattccgcaaggcggcctctctgcaagacgccgctcactcctccggcggcaacggcgaccgccggggtcgagggcgtgggaagaaggacgatggagccccgaaggaggcccagcccaagccagccaacccgggaggccgtaacctgggaaattgcaagaattgcggcaagaggggacattgggccaaagactgtcgcagcaagcccaaggcccagcaagcttacgtagcccaggaggaggacgaagagcctgctctgctcctggccaaggtgcagctggatccgccgcgtcctcgcgtcgctgcaccgacaaacgtcgtctcgccaccgagcgcgccgagggcgctgtcgccgatgggcgaactcgccgtggtcgaggccaaggtcttcgcgcagctagacggcggtggcgaacatgatccggcgatgtggatcctggatactggcgcaaccaaccatatgaccgggtcccgctccgctttcgccgagctcgacacggcggtcaccggcactgtcaggtttggcgacggctcggtggttcgcatcgagggccgcggcaccatcctgttctcctgcaggttcggggaacaccgcggcatcgccggggtctactacatcccgcggctcacggcgaacatcgtcagccttggacagctggatcgttccggcagcaaggtactgattcatcacggcgtcctgcgcgtgtgggatcctcgagggcacctactcgtccgtgtccgacgctccgacgactgcctctacaccatcaagctggacatcgaccgtccggtctgcctcgcggcaaggagcgccgagccggcgtggcggtggcacgccaggtacgaccacctcaactttcctactctccgcaagctcgcgcaacaggaaatggttcgtgggctgccgctgctgcaacaagtcactcaagtctgcgatggctgtttgctcaggaagcagcggcgagcggcgttcccgacgcagtccaagtaccgcgctgacgaacacctggagctcgtccacggcgatctctgtgggccgatcgaacctgcaacgccggctggtaatcggtattttttgttgcttgtcgatgacatgagccgctatatgtggctaaccttgatcaggagcaaggatgagtccgcgaacgccatcaagcactttcaggcccgtgcagaggtggagtccgggcgcaaactccgtgcactgcgcacggatcgtggcggcgaattcacctcaatcgaatttggggaatactgcgccaatctcggagttggtcggcagttgacggcgccctactccccgcagcagaacggagtagtggagcgtcgaaaccaaaccatcatcgccactgcccgcagcatgatgaaggcgaagggtgttcctgggcggttctggggagaggccatgtccacagcggtctttctcttgaatcgttcgccgacgaaaagcttggacaaccagacgccctatgaagcatggtatggccaacggcccgctgtgcatttcctgcgcactttcgggtgcgtggggcacgtcaagatcaccaagcctgggctgaagaaactcgatgaccggagtgcgccaatggtgctcctcggctacgagcaaggctcgaaggcctaccggctctatgatccagtcagcgagcgcgtccatgtgtccagggacgtggtgtttgatgaagacgccgcctgggactggggaccagtggtgacgaccaccatcgggacggcacctgcttcgtcgccgactccgccctcgccaccatcgccggctccgtcggcccccacgacgccggcacctccgtcacctccgtcgccggaggcggttgagtttgtcacgccgcctacccaggattccatcctggacgtcgacgcagatgacgacgtcgtgcctcgctaccgcctggtggataacctgctggggaatgcctcaccgcccggacacgctccgcgggtgctggaacagctcgagctccatgttgtgagcgccaacgaacctgcttcactggctgaggctgaggcggatccaaactggcgtggcgccatgcaagatgagcttaacgcgatcgtcgacaacgacacttggtcgctcactgacctaccccatggccaccgtgcaattgggctaaaatgggtctacaagctgaaacgtgacgaacagggggcgatcgtgcgctacaaggcgcgcctcgtcgctaaggggtacgtccagcgacagggggtggacttcgacgaggtcttcgcacctgtcgcccggctggaatcggtgcgcctccttctcgtcgtcgccgtgcaccaagggtggcaagtccaccacatggacgtcaagtcggcattcctcaacggcgagctgctcgaggaagtttatgtctcgcagccgccgggtttcgtcgacgacaaccacaagaacaaggtgtatcgcctgcacaaagctctttacggcttgcgccaggcgcctcgcgcgtggaatgccaaatttgatagctccttgctgtcactcggctttcaccgcagcagctccgagcatggtgtgtacacacgcaccaggggaggaagacgactgacggtgggcgtctacgtcgatgacctcatcatcaccggcgatcatgacgacgagatccgcagcttcaagggagagatgatgaagctcttcaagatgagtgatttgggggcactcagatactacctcggcatcgaggttacccaggacagtgatgggatcacgctggggcaagccgcatatgccagcaagattcttgagaaggcaggactcaaggactgcaatccctgtcagactcccatggagcttggttgggagtctgcgctatctcgtcaacacgcgacccgacctggcattctctgttgggtatgtcagtcgcttcatggagtcacccagggaagaccatcttgctgtcgttcgacgcatactgcgctatgtggtgcacggtgcgctttgccaatgctggttggttactctgagagtgatctggctggcgatccagatgagcgaaagagcacgtccggccagattttcttcatcaatggcgggcctgtcacttggcagtcctccaagcagaaggtggtggcattgtcctcctgtgaggccgagtacatcgccgcagccgccgcaacatgtcaaggagtatggctcgcgcggctgttagcggaggtgctgggcgacgagatcgccacaccgctgctgaaggtggacaaccagtccacaatatcattgataaaaaatccagtgcatcatgaccggagtaagcatatcgatgtcaaatatcattatatccgggagtgtgcagaaaagaaactgatcgaaatgatgttcgtgggaactgcggagcagctcggtgatatattcaccaaatctctgggcagaaccaggtttcaggagcttcgttcaaagatcggtgtctgttctcttgacaagagcagtcagacttaa

SEQ ID NO: 13832 - DNA, 5196 bp, Oryza sativa
  Clone ID: TFbOSC401018j.C1.o15.fg
atgggttgcaagatggctggccacccacccaaccaccgcggagaaggcatgatcgactttgtggcagagctggcacgcatgacactggtggtgggctaccccaacgcgccggagtacacgactattccgccgctcagtggcgagcttcctcaccgtgtccgcttggaggtccaaggttacgtggggacttgcctcgctaacatggcagttgaggcgtcaggtggcacagcagatcacgcctgtcaggaggcagcctacttgatgatggccagactacgagagcgccacaactacatcttccacgacacggcgtaccgctaccacccccgtcgagccaacggtgatggcgtcagctccttccgtccgacagctggcgagaacgacaccacctttggtcacatgtgtgctgtgatgaggggattggacaggatgcactcggacctgcacaaggcgaccaaggccttgaacgatgggaagctcatgaggatcgtcgctctgaaggacgagatagcgcgcctgaagaaggacaacgctcagctaaagggtcttccagcgccaggaggagtccggatccgcactacgccccgcaagactacgacggcacccgtgcgcatccagcttgcgcccaggaacccacctccagcagcagctcccgcagcacctccagttccgcccgcagttcctgcagctcaagctccagctcccgcgtccgctctctccttcgctccagcatcagccgccagaggtccagccagtggcaccggaggttgcttgtttgggatggtccacaccaggactggtagccgcgcaacaggcgagggcagcaacggcgaagaacgcgctaatggtgtgcaccccagcagtgattccggcaatggtccgccaccacttcccgagaatctgacgctagcccaagttatggcacatcagactcagatgatggcagccatgatgcagcagatgcagcagcagcaccagcagatgcaccagaggatgatgcagcacgccgaacagcagcaccagcagtttggtccccctccccctcagtccaagttgcctgagttcctacgtgtcaggccacccaccttctccagcaccaccaatcctatagaggcaaatgactggctccatgcgatagagaagaagctgaacctcctgcagtgcaatgatcaggagaaggtcgctttcgccacacaccagcttcagggtcctgcgtcagcctggtgggataatcacatggccacccgcccaccgggtactgaagtcacttgggcagagttctgccgtagcttcaggaaggcacaggtgccagatggggtcgtggcacaaaagaagagggaatttcgtgcactccatcagggcaacaggactgtgacagagtacctccacgagttcaatcgcctcgcgcgatatgcaccagaggatgtccgcaccgacgccgagaagcaggagaagttcatggcgggtttggatgatgagttgaccaaccaactgatatccggggactacgctgactttgagaggctgcaccgcccgttcaactccagcaacttccaccagggctctagtggcagtcagaaccaccatggaggtcagcccaaccgcggtgcagctccacgcccacccatggcaccggcacagtcaggcccgcccgcgcaagccaagaaggagacgggagcaaaaccagggtcctgcttcaactgtggtgaacttggccacttcgctgacaaatgcccgaagcccaggcgtgccgggccaaggtttatccaggctcgtgtcaaccacgcgtctgcagaggaggcacaaacagcaccggaggtcgtactgggtacgttccctgttaactcaatccctgcaacagtactttttgattctggtgcaacgcattctttcatttcaaagaaatttgtggggatgtatgggttaaggaaagaagagcttagcacaccaatgagggttcataccccgggaaatagttcaacctcagtcagttttagcccttcagtgctaatagaaatccaaagattaccatttctagccaacctcattcttcttgaatccaaagacctagatgtcattcttgggatggattggctgactaagttcaacggagtcatcgattgtgcgaatcgcacagtcaccttgaccaacgagaagggagaaacggtagtgtacaaatcactagccccgccaaagcaaggggtctccttgaaccagatcgagatggaagtcccagtggtcaccgaggagaagaatttgaagaaattggaagacatacccatagtctccgagtatccagaagtgttccctgaagacctcactaccatgccacccaagagggagattgaattccggattgacttggcaccgggaaccgctcccatttacaagagaccgtacagaatggcggccaacgaattagccgaggtcaagaagcaggttgatgagcagctgcagaaagggtacatccgaccaagtacttcaccttggggtgctccggtcatttttgtggagaaaaaggataagacgaagagaatgtgcgttgattatcgcgcactcaacgaggtcaccatcaagaacaaataccctttgccgcgaatcgatgatttgtttgatcaactgaaaggagctaaagtgttttctaagatagacctgcgatcaggctaccaccagttgagaatccgggaagaggatattccgaagacggccttcaccactcggtacgggctatatgagtgcacggttatgtctttcggacttaccaacgcacccgcattcttcatgaatctgatgaacaaagtgttcatggaatttctggacaagtttgttgtggtgttcatcgacgacattcttatctattcaaagtccgaggaggaagatgaacaacatctccatctagtactcgagaagttgaaggagcaccagctatacgccaagttcaacaagtgtgacttctggttgacggaagtaaaatttctgggtcatgtcattacagctcagggtgtggcagtcgacccatcgaacgtggagtcagttaccaaatggaccccacctaagaccgtgtcgcagattcggagttttcttggacttgcgggttattaccgccgattcatcgaaaatttctccagaatcgcccgacccatgactcagttgcttaagaaagatgagaagtttaaatggacagctgagtgcgataagagtttcgaggagctcaagaagaaattagtatccgcaccagttttgattctgcccgacccgacgaaagacttccaagtctattgtgatgcatcccgtcacggacttggatgtgtcctaatgcaagagggcagagtggttgcgtatgcctcgcggcagttgcgtccacacgaaggaaattatccaacgcatgacttggaattggcagcagtggttcatgctttgaagatctggaggcactatctgattggcaaccgctgcgaaatatatacggaccataagagtctgaaatacatcttcacccaaccggacctaaatctccggcaacgaagatggttggaactaatcaaagactatgacatgagtattcactaccacccgggtaaagccaatgtggtggcagacgctttaagccggaaaagttactgcactgccctatgcatcgagggcatgtgtgaggaattgcggcaggagtttgggcatctcaacgtgggaattgttgaacacgggttcgtagccgctctggaggcacggcctacgctcgtggatcaagttagagccgctcaagtaaatgatccggaaatagcagagctgaaaaagaacatgagagtcggaaaggctcgggatttccttgaggatgagcatggcacgatctggatgggagaaagattgtgtgtacctgacgacaaggaattgaaggatctgatactcaccgaggctcatcagacccagtactccattcacccaggcagcactaaaatgtatcaagacctcaaagaaaagttttggtgggtcagcatgaggagagaaatagctgaattcgtcgcactctgcgatgtttgccaacgagtgaaggcagagcaccaaagaccagcaggtttactccaacctcttcaaatcccggaatggaaatgggaggagattggaatggactttataacaggactgccccggacatcatcgggtcatgattcaatctgggtagtcgtggatcgactcaccaaggtggctcactttataccagtgcataccacctatacgggaaagagattggtagaattgtacctcgcaaggatcatgtgtttgcatggggtacccaagaagatagtatccgaccgaggtagtcagttcacctcaaaattctggcagaagctacaggaagaattggggacccgtttaaatttcagcacggcctatcacccgcaaactgatggtcagaccgagcgagtcaatcaaatcttggaagatatgttgagagcttgcgctcttgattttggtggagcttgggacaaaagcttgccatatgcagaattctcgtacaacaacagctaccaggccagtctacagatggcaccgtttgaagctttatacggtcggaagtgccgcacacctctcttctgggatcagacaggcgaacgtcaactgttcggaacagaggtattagcggaagcagaagagaaagtcataatcatcagggaaaggttgagaattgctcagtctcgacagaagagctacgcggataaccgtcgaagggagctcacttttgaggcaggagattacatgtatcttcgtgtcactccgctccgggaagtacaccgtttccagacaaaaggcaagttggcaccacgcttcgtgggaccatacaaaattttggaacgaaggggagaagttgcttatcagctagaacttccatccaacatgatcggcatccatgacgtgttccatgtgtcccaattaaagaagtgcttaagggtacctgaagaacaggctgattcggagcacattgatatccaagaggacctaacctatgtggagaagccggttcgtatacttgataccagcgaaagaagaaccagaaataaggtcaccaggttttgccgagttcagtggaatcatcattcagaagaggaagcaacctgggaaagggaagatgagttgaaagccgcccatccgcacctcttcaccagctcctccgaatctcggggccgagattccgtttaa

SEQ ID NO: 13833 - DNA, 5118 bp, Oryza sativa
  Clone ID: TFbOSC401018j.C1.o31.fg
atgggttgcaagatggctggccacccacccaaccaccgcggagaaggcatgatcgactttgtggcagagctggcacgcatgacactggtggtgggctaccccaacgcgccggagtacacgactattccgccgcttagtggcgagcttcctcaccgtgtccgcttggaggtccatggctacgtggggacttgcctcgctaacatggcagttgaggcgtcaggaggcacagcagatcacgcctgtcaggaggcagcctacttgatgatggccagactacgggagcgcgacaactacatcttccacgacacggcgtaccgctaccacccccgtcgagccaacggtgatggcgtcagctccttctgtccgacagctggcgagaacgacaccacctttggtcacatgtgtgctgtgatgaggggattggacaggatgcactcggacctgcacaaggcgaccaaggccttgaacgatgggaagctcatgaggatcgttgctctgaaggacgagatagcgcgcctgaagaaggagaacgctcagctaaagggtcttccagcgccaggaggagtccggatccgcactacgccccgcaagactacgacggcacccgtgcgcatccagcttgcgcccaggaacccacctccagcagcaactcccgcagcacctccagttccgcccgcagttcctgcagctccagctccagctcccgagtccgctctctccttcgctccagcatcagccgccagaggtccagccagtggcaccggaggttgcttgtttgggatggtctacaccaggactggtagccgcgcaacaggcgagggcagcaacggcgaagaacgcgctaatggtgtgcaccccagcagtgattccggcaatggtccgccaccacttcctgagaatccgacgctagcccaagttatggcacatcagactcagatgatggcagccatgatgcagcagatgcagcagcagcaccagcagatgcaccagaggatgatgcagcacgccgaacagcagcaccagcagtttggtccccctccccctcagtccaagttgcctgagttcctacgtgtcaggccacccaccttctccagcaccaccaaccctatggaggcaaatgactggctccatgcgatagagaagaagctgaacctcctgcagtgcaatgatcaggagaaggtcgctttcgccacacaccagcttcagggtcctgcgtcagcctggtgggacaatcacatggccacccgcccaccgggtactgaagtcacttgggtagagttctgccgtagcttcaggaaggcacaggtgccagatggggtcatggcacaaaagaagagggaatttcgtgcactccatcagggcaacaggactgtgacagagtacctccacgagttcaatcgcctcgcgcgatatgcaccagaggatgtccgcaccgacgccgagaagcaggagaagttcatggcgggtttggatgatgagctgaccaaccaactgatatccggggactacgctgactttgagtggctggttgacaaggcaatccgccaggaggatcaacgcaacaagatggacaggaagaggaaggccgctcagttcagggcacctcagggaagtcaccagaggccgcgcttcactcccggacagcagggtggacctaccaccatgatcgtccgtcagcaccgcccgttcaactccagcaacttccaccagggctctagtggcagtcagaaccaccatggaggtcagcccaaccgcggtgcagctccacgcccacccatggcaccggcacagtcaggcccgcccgcgcaagccaagaaggagacgggagcaaaaccagggtcctgcttcaactgtggtgagcttggccacttcgctgacaaatgcccgaagcccaggcgtgccgggccaaggtttatccaggctcgtgtcaaccacgcgtctgcagaggaggcacaaacagcaccggaggtcgtactaggtacgttccctgttaactcaatccctgcaacagtactttttgattctggtgcaacgcattctttcatttcaaagaaatttgtggggatgtatgggttaaggaaagaagagcttagcacaccaatgagggttcataccccggggaatagttcaacctcagtcagttttagcccttcagtgctaatagaaattcaaagattaccatttctagccaacctcattcttcttgaatccaaatacctagatgtcattcttgggatggattggctgactaagttcaagggagtcatcgattgtgcgaatcgcacagtcaccttgaccaacgagaagggagaaacggtagtgtacaaatcactagccccgccaaagcaaggggtctccttgaaccagatcgagatggaagtcccagtggtcaccgaggagaagaatttgaagaaattggaagacatacccatagtctccgagtatccagaagtgttccctgaagacctcactaccataccacccaagagggagattgaattccggattgacttggcaccgggaaccgctcccatttacaagagaccgtacagaatggcggccaacgaattagccgaggtcaagaagcaggttgatgagcagctgcagaaagggtacatccgaccaagtacttcaccttggggtgctccggtcatttttgtggagaaaaaggataagacgaagagaatgtgcgttgattatcgcgcactcaacgagttgagaatccgggaagaggatattccgaagacggccttcaccactcggtacgggctatatgagtgcacggttatgtctttcggacttaccaacgcacccgcattcttcatgaatctgatgaacaaagtgttcatggaatttctggacaagtttgttgtggtgttcatcgacgacattcttatctattcaaagtccgaggaggaacatgaacaacatctccgtctagtactcgagaagttgaaggagcaccagctatacgccaagttcaacaagtgtgacttctggttgacggaagtaaaatttctgggtcatgtcattacagctcagggtgtggcagtcgacccatcgaacgtggagtcagttaccaaatggaccccacctaagaccgtgtcgcagattcggagttttcttggacttgcgggttattaccgccgattcatcgaaaatttctccagaatcgcccgacccatgactcagttgcttaagaaagatgagaagtttaaatggacagctgagtgcgataagagtttcgaggagctcaagaagaaattagtatccgcaccagttttgattctgcccgacccgacgaaagacttccaagtctattgtgatgcatcccgtcacggacttggatgtgtcctaatgcaagagggcagagtggttgcgtatgcctcgcggcagttgcgtccacacgaaggaaattatccaacgcatgacttggaattggcagcagtggttcatgctttgaagatctggaggcactatctgattggcaaccgctgcgaaatatatacggaccataagagtctgaaatacatcttcacccaaccggacctaaatctccggcaacgaagatggttggaactaatcaaagactatgacatgagtattcactaccacccgggtaaagccaatgtggtggcagacgctttaagccggaaaagttactgcactgccctatgcatcgagggcatgtgtgaggaattgcggcaggagtttgggcatctcaacgtgggaattgttgaacacaggttcgtagccgctctggaggcacggcctacgctcgtggatcaagttagagccgctcaagtaaatgatccggaaatagcagagctgaaaaagaacatgagagtcggaaaggctcgggatttccttgaggatgagcatggcacgatctggatggtagaaagattgtgtgtacctgacgacaaggaattgaaggatctgatactcaccgaggctcatcagacccagtactccattcacccaggcagcactaaaatgtatcaagacctcaaagaaaagttttggtgggtcagcatgaggagagaaatagctgaattcgtcgcactctgcgatgtttgccaacgagtgaaggcagagcaccaaagaccagcaggtggctcactttataccagtgcataccacctatacggaaagagattggcagaattgtacctcgcaaggatcatgtgtttgcatggggtacccaagaagatagtatccgaccgaggtagtcagttcacctcaaaattttggcagaagctacaggaagaattggggacccgtttaaatttcagcacggcctatcacccgcaaactgatggtcagaccgagcgagtcaatttaatcttggaagatatgttgagagcttgcgctcttgattttggtggagcttgggacaaaagcttgccatatgcggaattctcgtacaacaacagctaccaggccagtctacagatggcaccgtttgaagctttatacggtcggaagctttatacagccatatgcgctttattctgggatcagacaggcgaacgtcaactgttcggaacagaggtattagcggaagtagaagagaaagtcagaatcatcagggaaaggttgagaattgctcagtctcgacagaagagctacgcggataaccgtcgaagggagctcacttttgaggaaggagattacgtgtatcttcgtgtcactccgctccggggagtacaccatttccagacaaaaggcaagttggcaccacgcttcgtgggaccatacaaaattttggaacgaaggggagaagttgcttatcagctagaacttccatccaacatgatcggcatccatgacgtgttccatgtgtcccaattaaagaagtgcttaagggtacctgaagaacaggttgattcggagcacattgatatccaagaggacctaacctatgtggagaagccggttcgtatacttgataccagcgaaagaagaaccagaaataaggtcaccaggttttgccgagttcagtggaatcatcattcagaagaggaagcaacctgggaaagggaagatgagttgaaagccgcccatccgcacctcttcaccagctcctccgaatctcggggccgagattccgtttaa

SEQ ID NO: 13834 - DNA, 5460 bp, Oryza sativa
  Clone ID: TFbOSC401051j.C1.o55.fg
atggccggtcacccacccaaccaccgcggagaaggcatgatcgatttcgtggcagagttggcacgcatgacattggtggtgggctaccccgacgcgccggagtacacgaccatcccaccgctcagtggcgagcttcctcaccgtgtccgcttggaggtccatggttacgtggggacttgcctcgctaacatggcggtcgaggcgtcaggaggcacagcagatcatgcctgtcaggaggcagcctacctgatgatggccagactacgggagcgccacaactacatcttccacgacacggcgtaccgctaccaccccagtcgagcccacggtgatggcgtcagctccttccgtccgacagctggcgagaacgacaccaccttcggtcacatgtgcgcggtgatgaggggtctggacaggatgcactcggatctgcacaaggcgactaaggccttgaatgatgggaagctcatgaggatcgtcgctttgaaggacgagatagcgcgtctgaagaaggagaacgctcagcttaagggtctcccagcgccaggaggagtccggatccgcactacgccccgcaagactacgaaggcacccgtgcgcatccagctcgcgcccaggaacccacctccagcagcagctcccgcagcacctccagttccgcccgcagctcctgcagctccagttcctgcagctccagctccagctcccgcgttcgttctctccttcgccccagcgtcagccgtcagaggtccagccagtggcatcgggggttggttgcctgctacccccagtggcagccgcgatcgcagctccagtggctcgcagacgggcagcagcgagacgtacctgccaggctccaggagtcgttcagagggacctggttgcttgtttgggatggtcaacaccaggactggcaaccgcacgacaggcgagggcagcaacggtgaagaacgcgttgatggtatgcaccccaacggcgatcccggcaacggtccgccaccacttcccgagaatccgacacttgcccaagttatggcgcatcagactcagatgatggcagccatgatgcagcagatgcagcaacagcaccagcagatgcaccagaggatgatgcagtacgctgaacagcagcaccagcagtttggtccccctccccctcagtccaagttgcctgagttcctacgagtcaggccacccaccttctctagcaccaccaaccctatggaggcaaacgactggctccatgcaatagagaagaagctgaatctcctgcagtgcaatgatcaggagaaggtcgctttcgccacacaccagcttcagggtcctgcgtcagcttggtgggacaaccacatggccacccgcccaccgggtacggaagtcacctgggcagagttctgccgtagcttcaggaaggcacaggtgccagatggggtcgtggcacaaaagaagagggaatttcgcgcactccatcagggcaacaggacggtgacagagtacctccacgagttcaatcgcctcgcgcgatatgcaccagaggatgtccgcaccgacgccgagaagcaggagaagttcatggcgggcctggatgacgaactgaccaaccaactgatatctggggactacgccgactttgagaggctagtcgacaaggcaattcgtcaagaggaccaacgcaacaagatggacaggaagaggaaggccgctcagttcagggcacatcagggaagtcaccagaggccgcgtttcactcccggacagcagggtggacctaccaccatgatcgtccgtcagcaccgcccgttcaaccctagcaacttccaccagggcaccagtggcagtcagaaccaccatggaggtcagcccaaccgcggtgcagctccacgcccaccaatggccccggcacagtcaggccagcccacgcaagccaagaaggagactggagcaaaaccagggtcctgcttcaactgtggcgagcttggtcacttcgcggacaaatgcccgaagcccaggcgtgccgggccaaggtttatccaggctcgtgtcaaccacgcatctgcggaggaggcacaagcagcaccagaggtcgtactgggtacgtttcctgttaactcaatccctgcaacagtactttttgattctggtgcaacgcattcgttcatctcaaagaaatttgtcgggatgcatgggttaataagagaagaacttagcacaccgatgcgggttcataccccagggaatagctccacttcggttcaattcagcccttctataacaatagaaatccaaagatcaccatttctagccaacctcatccttctcgactccaaaggcctagatgtcatcctcgggatggattggctgactaagtttaagggagtcatcgattgtgcgaatcgcacagtcaccttaaccaacgagaagggagaaaccgtggtgtacaaatccctagtctcgccaaggaaaggggtctcgttgaatcagattgagacagaaatcccagtggacaccgtagagaagaactcgagaaaattggatgatatacccatagtctgcgagtatccggaagtgttccccgaagacctcactaccatgccacccaagagagagattgaattccggattgacttggcaccgggaaccgctccaatctataagagaccgtacagaatggcggccaacgaattagcggaggtcaagaagcaagttgatgaacagctgcagaaagggtacatacgaccaagcacttcgccttggggcgctccggtcatttttgtggagaaaaaagataagacgaagaggatgtgcgtcgattatcgcgcacttaacgaggtcacaatcaagaataaatatcctttgccgcggatcgacgatttatttgatcaactgaaaggggctaaagtgttttctaagatagacctgcgctcaggctaccaccagttgagaatccgggaagaggatatcccgaagacggccttcaccacgcggtacgggctatatgagtgcacggttatgtccttcggacttaccaacgcacccgcattcttcatgaatctgatgaacaaagtgttcatggaatttctggacaagtttgttgtggtgttcatcgacgacattttgatctattcaaagtccgaggaagaacatgaacaacatctccgtctggtactcgagaagttgaaggagcaccaactatacgccaagttcagcaagtgtgacttctggttgacggaagttaaatttctgggtcatgtcattacagcccagggtgtggcagtcgacccatcgaacgtggagtcagttaccaagtggaccccaccgaagaccgtgtcgcagattcgaagttttctaggattggccggttattaccgccgattcatcgaaaacttctccagaatcgcccgacccatgactcagttgcttaagaaagatgagaagtttaaatggacagctgagtgcgataagagttttgaggagctcaagaagaaattagtatccgcaccggttttgattctgcccgaccagatgaaagacttccaagtctattgcgatgcatcccgtcacggacttggatgtgtcctaatgcaagagggcagagtggttgcatatgcctcgcggcagttgcgtccacacgaaggaaattatccaactcatgacttggaattggcagcagtggttcatgctttgaagatctggaggcactatctgattggcaaccgctgcgaagtatatacggaccataagagtctgaaatacatcttcacccaaccggacctaaaccttcgacaacgaagatggttggagctaatcaaagactatgacatgagtattcactaccacccgggtaaagccaatgtggtggcagacgctttaagccggaaaagttactgcactgccctatgcaccgagggcatgtgtgaggaattgcggcaggagtttgaacatctcaacataggaattgttgaacacgggttcgtagccgctctggaggcacggccgacgctcgtggatcaagttagagccgctcaagtaaatgacccggaaatagcagagctgaaaaagaacatgagagtcggaaaggctcgggatttccttgaggatgagcatggcacaatctggatgggagaaagattgtgtgtacctgacgacaaggaattgaaggatctgatactcaccgaggctcatcagacccagtactccattcaccccggcagcaccaaaatgtatcaagatctcaaagaaaagttttggtgggtcagcatgaggagagaaatagctgagttcgtcgcactctgcgatgtttgccaacgagtgaaggcagagcaccaaagaccagcaggtctactccaacctcttcaaatcccggaatggaaatgggaagagattggaatggattttataacgggactgccccggacatcatcgggacatgattcaatctgggtagtcgtggatcgactcaccaaggtggctcacttcataccagtacataccacctatacgggaaagagattggcagagttgtacctcgcaaggatcatgtgtttgcatggggtacccaggaagatagtatctgaccgagggagtcagttcacctcaaaattctggcagaagttgcaggaagaattggggacccgtttaaatttcagcacggcctatcatccgcaaactgacggtcaaaccgagcgagtaaatcaaatcttggaagatatgttgagagcatgcgctcttgattttggtggagcttgggacaaaagcttgccatatgcggaattctcgtacaacaacagctaccaggccagtctacagatggcaccgtttgaagctttatacggccggaagtgccgcacacctctcttctgggatcagacaggcgagcgtcaactgttcggaacagaagtattagcagaagcagaagagaaagtcagaatcatcagggaaaggttgaggattgcccagtctcgacagaagagctacgcggataaccgtcgaagggagctcacctttgaggcaggagattacgtgtatcttcgtgtcactccgctccggggagtacaccgttttcagacgaaaggcaagttggcaccacgcttcgtgggaccatacaaaattttggaacgaaggggagaagttgcctaccagctagaacttccgtccaacatgatcggcatccatgacgtgttccacgtatcccaattaaagaagtgcttaagggtacctgaggaacaggctgattcggaacacatcgatatccaggaggacctgacctatgtggagaagccggttcgcatacttgataccagcgaaaggaggaccagaaacaaggtcaccaggttttgccgagttcaatggagtcatcattccgaagaggaagcaacctgggaaagggaagatgagttgaaagccgcccatccgcacctcttcaccagctcctccgaatctcggggccgagattccgtttaa

SEQ ID NO: 13835 - DNA, 4278 bp, Oryza sativa
  Clone ID: TFbOSC401054j.C1.o28.fg
atggtctacaccaggaatggtagccgcgcaacaggcgagggcagcaacggtgaagagcgcactgagggtgtgcatcccaacagcaattccggcaatggtccgccaccacttcccgagaatccgacgctagcccaagtgatggcacatcagactcagatgatggcagccatgatgcagcagatgcagcagcagcaccagcagatgcaccagaggatgctgcagcacgccgaacagcagcaccagcagtttggtccccctccccctcagtccaagttgccagagtttctacttgtcaggccacccaccttctccagcaccaccaaccctatggaggcgaatgactggctccatgccatagagaagaagctgaatctcctgcagtgcaatgatcaggagaaggttgctttcgccacacaccagcttcaaggtcctgcgtcagcttggtgggacaatcacatggccacccgcccaccaggtactgaagtcacttgggcagagttctgccgtagcttcaagaaggcgcaggtgccagacggggtcgtggcacaaaagaagagggaattccgggcactccatcagggcaacaggactgtgacggagtatctccatgagttcaatcgcctcgcgcgatatgcaccggaggatgtccgtactgacgccgagaagcaggaaaaattcctagcaggtctggatgatgagctaaccaaccagttgatatctggagattacgccgatttcgaaagactggtggacaaggcaatccgtcaggaggatcaacgcaacaagatggacaggaagagcaactttccccagggcgccagtggcagtcagaaccaccatggaggtcagcccaaccgcggtgcagctccacgcccaccaatggcaccggcacagtcaggcccgtccgcgcaagccaagaaggagactggagcaaaaccagggtcctgcttcaactgtggcgagcttggccacttcgctgacaaatgcccgaagcctaggcgtgccgggccaaggtttatccaggcccgtgtcaaccacgcatctgcggaggaggcacaagcagcaccagaggtcgtactgggtacgtttcctgttaactcaatccctgcaacaatactttttgattctggtgcaacgcattcgttcatttcaaagaagtttgtcgggatgcatgggttaaggaaagaagagcttagcacaccaatgagggttcataccccgggaaatagttcaacctcagtcagttttagcccttcagtgctaatagaaatccaaagatcgccatttctagccaaccttattcttctcgaatccaaagacctggatgtcattcttgggatggattggctgaccaagtttaagggagtcatcgattgtgcgaatcggacagtcaccttgaccaacgagaagggagaaacagtagtgtacaaatcaccagactcaccaaagcaaggggtctctttgaatcagattgaggcggaaatcccagtggacactgtggagaagaatttgaggaaattggaagatatacccatagtctgcgagtatccagaagtgttccccgaagaccttactaccatgccacccaagagagagattgaattccggattgacttggcaccgggaaccgctccaatttacaagagaccgtacagaatggcggccaacgaactagcagaggtcaagaagcaggttgatgagcagctgcagaaagggtacattcgactaagtacttcaccttggggtgctccggtcatttttgtggagaaaaaggataagacaaagaggatgtgcgttgattaccgcgcactcaacgaggtcacaatcaagaacaaatatcctttgccgcgaatcgatgatttgtttgatcaactgaaaggagctaaagtgttttctaagatagacctgcgatcaggctaccaccagttgagaattcgggaagaggatattccaaagacggccttcaccactcggtacgggctatatgagtgcacggttatgtctttcggacttaccaacgcacccgcattcttcatgaatctgatgaacaaagtgttcatggaatttctggacaagtttgttgtggtattcatcgacgacatacttatctattcaaagtccgaagaagaacatgagcaacatctccgtctggtactcgagaagttgaaggagcaccagctatacgccaagttcagcaagtgtgacttctggttgacggaagtcaaatttctgggccatgtcattacagctcagggtgtggcagttgatccatcgaacgtagagtcagttaccaaatggaccccaccgaagaccgtgtcgcagattcgaagttttcttggacttgcaggttattaccgccgattcatcgaaaacttctccaggatcgcccgacccatgactcagttgcttaagaaagatgagaagtttaaatggacagctgagtgcgataagagttttgaggagctcaagaagaaattagtatccgcaccagttttgattctgcccgaccagatgaaagacttccaagtctattgcgatgcatcccgtcacggacttggatgtgtcctaatgcaagagggcagagtggttgcatatgcctcgcggcagttgcgtccacacgaagggaattatccaactcatgacctggaattggcagcagtggttcatgctttgaagatctggaggcactatctgattggcaaccgctgcgaagtatatacggaccataagagtctgaaatacatcttcacccaaccggacctaaatctccgacaacgaagatggttggaactaatcaaagactatgacatgagcattcactaccacccgggtaaagccaatgtggtggcagacgcattaagcaggaaaagttactgcactgctctatgcatcgagggcatgtgtgaggaattgcggcaggagttggagcatctcaacgtgggaattgttgaacacgggttcgtagccgctttggaggcacggcctacgctcgtggatcaagtcagagcagctcaagtaaatgattctgaaatagcagagctgaaaaagaacatgagagtcggaaaagcccgggatttccacgaagatgaacacggcacaatctggttgggagaaagattgtgtgtacctgacgacaaggaactgaaggatctgatactcaccgaggctcatcagacccagtactccattcatccaggcagcaccaaaatgtatcaagacctcaaagaaaagttttggtgggtcagcatgaggagagaaatagctgaattcgtcgtactctgcgatgtttgtcaacgagtgaaggcagagcaccaaagaccagcaggtttactccaacctcttcaaatccaggaatggaaatgggaggagattggaatggactttataacaggactaccccggacatcatcgggtcacgattcaatctgggtagtcgtggatcgactcactaaggttgctcacttcataccagtacataccacgtatacgggcaaaaggttggcggagctctacctctcgagaatcatgtgtttacatggagtacccaaaaagattgtatctgatcgagggagtcagttcacctcaaaattctggcagaagctgcaggaagaattggggactcgtttaaatttcagcacggcctatcactcgcaaattgatgaattctcgtacaacaacagctaccaggccagtctacagatggcaccgtttgaagctttatatggccggaagtgccgcacacctctcttttgggatcagacagacgagcgtcaactgttcgggacagaggtattagcggaagccgaagagaaagtcagaatcatcagggaaaggttgaggattgcccagtctcgacagaagagctacgcggataaccgccgaagggagctcacttttgaggcaggggattacgtgtatcttcgtgtcactccgctccggggagaagttgcttatcagttagaacttccatccaatatgatcggcatccatgacgtgttccacgtgtcccaattaaagaagtgcttaagggtacctgaagaacaggctgattcggaacacattgatatccaggaggacctaacatatgtggagaagccggttcgtatacttgataccagcgaaagaagaaccagaaacaaggtcaccaggttttgccgagttcagtggagtcaccattcagaagaggaagcaacctgggaaagggaagatgagttgaaagccgcccatccgcacctcttcgccagctcctccgaatctcggggccgagattccgtttaa

SEQ ID NO: 13836 - DNA, 5322 bp, Oryza sativa
  Clone ID: TFbOSC401054j.C1.o42.fg
atggccggtcacccacccaaccaccgcggagaaggcatgatcgatttcgtggcagagttagcacgtatgacactggtggtgggctaccccaacgcgccggagtacacgacgattccgccgctcagtggcgagcttcctcaccgtgtccacttggaggtccatggctacgtggggacttgcctcgctaacatggcggtcgaggcatctggaggcacagcagatcacgcctgtcaggaggcagcctacttgatgatggccagaatacgggagcgccacgactacatcttccacgacacggcgtaccgctaccacccccgtcgagcccatggtgatggcgtcagctccttccgtccgacagctggcgagaacgacaccacctttggtcacatgtgtgctgtgatgagtggattggacaggatgcactcggacctgcacaaggcgaccaaagccttgaacgatgggaagctcatgaggatcgtcgccctgaaggacgagatagcgcgcctgaagaaggagaacgctcagctaaagggtcttccagcgccaggaggagtccggatccgcaccacgccccgcaagacgacgactgcacctgtgcgtatccagcttgcgcccaggaacccacctccagcagcagctcccgcagcaccttcagttccgcccgcagttcctgcagctccagttccagctcccgcattcactctctccttcgctccagcatcagccgccagaggtccagccagtggtaccggaggctgcttgtttgggatggtctacaccaggactggcaaccgcacgacaggcgagggcagcaacggcgaagaacgcgtggatggtgtgcaccccaacagtgattctggcaatggtccgccaccacttcccgagaatccgacgcttgcccaagttatggcacatcagactcagatgatggcagccatgatgcagcagatgcagcagcagcaccagcagatgcaccaaaggatgatgcagcacgccgagcagcagcaccagcagtttggtccccctccccctcagtccaagttgccagagtttctacgcgtcaggccacccaccttctccagcaccaccaaccccatggaggcgaacgactggctccatgccatagagaagaagctgaatctcctgcagtgcaatgatcaggagaaggtcgctttcgccacacaccagcttcagggtcccgcgtcagcttggtgggacaaccacatggccacccgcccaccgggtactgaagtcacatgggcagagttctgccgtagcttcaggaaggcacaggtgccagatggggtcgtggcacaaaagaagagggaattccgggcgctccatcagggcaacaggactgtgacagagtacctccacgagttcaatcgcctcgcgcgatatgcaccagaggatgtccgcaccgacgccgagaagcaggagaagttcatggcgggtttggatgatgagctgaccaaccaactgatatctggggactacgctgactttgagaggctggtcgacaaggcaatccgccaggaggatcaacgcaacaagatcgacaggaagaggaaggccgctcagttcagggcacctcagggaagtcaccagaggccgcgcttcactcccgggcagcagggtggacctaccaccatgatcgtccgtcagcaccgcccgttcaaccctagcaacttccaccagggcactagtggcagtcagaaccaccatggaggtcagcccaaccgcggtgcagctccacgcccatcagtggcaccggcacagtcaggccagcccgcgcaagccaagaaggagactggagcaaaaccagggtcctgcttcaactgtggcgagcttggtcacttcgctgacaaatgcccaaagcccaggcgtgccgggccaaggtttatccaggctcgtgtcaaccacgcgtctgcagaggaggcacaaacagcaccggaggtcgtactgggtacgtttcctgttaactcaatccctgcaacagtacttttcgattctggtgcaacgcattctttcatttcaaagaaatttgtggggaggtatgggttaaggaaagaagagcttagcacaccaatgagggttcataccccgggaaatagttcaacctcagtcagttttagcccctcagtgctaatagaaatccaaagatcaccatttctagccaacctcattcttcttgaatccaaagacctagatgtcattcttgggatggattggctgaccaagtttaagggagtcatcgattgtgcgaatcgcacagtcaccttgaccaacgagaagggagaaacagtggtgtacaaatctctagtctcaccaaagaaaggggtctcgttgaatcagattgagacggaaatcccagtggataccgtagagaagaacttgagaaaattggaagatatacccatagtctgcgagtatccagaagtgttccccgaagacctcactaccatgccacccaagagagagattgaattccggattgacttggcaccgggaaccgctccaatctataagagaccatacagaatggcggccaacgaattagcagaggtcaagaagcaagttgatgagcagctgcagaaagggtacatacgaccaagcacttcaccttggggcgctccggtcatttttgtggagaaaaaggataagacgaagaggatgtgcgttgattatcgcgcactcaacgaggtcacaatcaagaataaatatcctttgccgcgaatcgacgatttatttgatcaactgaaaggagctaaagtattttctaagatagacctgcgatcaggctaccaccagctgagaatccgggaagaggatattccgaagacggccttcaccactcggtacgggctatatgagtgcacggttatgtctttcggacttaccaacgcacccgcattcttcatgaatctgatgaacaaagtgttcatggaatttctggacaagtttgttgtggtattcatcgacgacatacttatctactcaaaatccgaggaagaacatgagcaacatctccgtctggtactcgaaaagttgaaggagcaccagctatacgccaagttcagcaagtgtgacttctggttgacagaagtcaaatttctgggtcatgtcattacagctcagggtgtggcagtcgacccatcgaacgtggagtcagttaccaaatggaccccacctaagaccgtgtcgcagattcggagttttcttggacttgcgggttattaccgccgattcatcgaaaacttctccaggatcgcccgacccatgactcagttgcttaagaaggatgagaagtttaaatggacagctgagtgcgataagagctttgaggagctcaagaagaaattagtatccacaccggttttgattctgcccgaccagatgaaagacttccaagtctattgtgatgcatcccgtcacggactgggatgtgtcctaatgcaagagggcagagtggttgcatatgcctcgcggcagttgcgtccacacgaaggaaattatccaactcatgacttggaattggcagcagtggttcatgctttgaagatctggaggcactatctgattggcaaccgctgcgaagtatatacggaccataagagtctgaaatacatcttcacccaaccggacctaaatctccgacaacgaagatggttggaactaatcaaagactatgacatgagtattcactaccacccgggtaaagccaatgtggtggcagacgctttaagccggaaaagttactgcactgccctatgcatcgagggcatgtgtgaggaattgcggcaggagtttgaacatctcaacatgggaattgttgaacacgggtttgtagccgctctggaggcacggcccactctcgtggatcaagtcagagcagctcaagtaaatgattctgagatagcagagctgaaaaagaatatgagagtcggaaaagcccgggaattccacgaagatgagcatggcacaatctggatgggagaaagattgtgtgtacctgacgacaaggaactgaaggatctgatactcaccgaggctcatcagacccagtattcaattcatcccggcagtactaaaatgtaccaggacctcaaagagaaattctggtgggtcagcatgaggagagaaatagctgaattcgtcgcactctgcgatgtttgccaacgggtgaaggcagagcaccaaagaccagcaggtttactccaacctcttcaaatcccggaatggaaatgggaggagattggaatggactttataacaggactgccccggacatcatcgggtcacgattcaatctgggtagtcgtggatcgactcactaaggttgctcacttcataccagtacataccacgtatacgggcaaaaggttggcggagctctacctctcgagaatcatgtgtctacatggggtacccaaaaagattgtatctgatcgagggagtcagttcacttcaaagttctggcagaaactacaagaagaattggggacccgtttaaatttcagcacggcctatcacccgcaaactgatggtcagaccgagcgagtcaatcaaatcttggaagatatgttgagagcttgcgctcttgattttggtggagcttgggacaaaagcttgccatatgcggaattctcgtacaacaacagctaccaggccagtctacagatggcaccgtttgaagctttatacggccggaagtgccgcacacctctcttctgggatcagacaggcgaacgtcaactgttcggaacagaagtattagcggaagcagaagagaaagtcagaatcatcagggaaaggttgaggattgctcagtctcgacagaagagctacgtggataaccgtcgaagggagctcacttttgaggcaggagattacgtgtatcttcgtgtcactccgctccggggagtacaccgttttcagacgaaaggcaagttggcaccacgcttcgtgggaccatacaaaatcttggaacgaaggggagaagttgcttatcagctagaacttccatccaatatgatcggcatccatgacgtgttccacgtgtcccaattaaagaagtgtttaagggtacctgaagaacaggctgattcggaacacattgatatccaggaggacctaacttatgtggagaagccggttcgcatacttgataccagcgaaaggagaaccagaaacaaggttacccggttttgccgagttcagtggagtcatcattcggaagaggaagcaacctgggaaagggaagatgagttgaaagccgcccatccgcacctcttcaccagctcctccgaatctcggggctga

SEQ ID NO: 13837 - DNA, 5145 bp, Oryza sativa
  Clone ID: TFbOSC401054j.C1.o59.fg
atggcggtcgaggcatctggaggcacagcagatcacgcctgtcaggaggcagcctacttgatgatggccagaatacgggagcgccacgactacatcttccacgacacggcgtaccgctaccacccccgtcgagcccatggtgatggcgtcagctccttccgtccgacagctggcgagaacgacaccacctttggtcacatgtgtgctgtgataaggggattggacaggatgcactcggacctgcacaaggcgaccaaggccttgaacgatgggaagctcatgaggatcgtcgctctgaaggacgagatagcgcgcctgaagaaggagaacgctcagctaaagggtcttccagcgccaggaggagtccggatccgcaccacgccccgcaagacgacgactgcacccgtgcgcatccagcttgcgcccaggaacccacctccaccagcagctcccgcagcaccttcagttccgcccgcagttcctgcagctccagctccagctcccgcgttcactctctccttcgctccagcatcagccgccagaggttcagccagtggtaccggaggctgtttgtttgggatggtctacaccaggaatggtagccgtgcaacaggcgagggcagcaacggcgaagaacgcgctgatggtgtgcaccccaacagtgattctggcaatggtccgccaccacttcccgagaatccgacccttgcccaagttatggcacatcagactcagatgatagcagccatgatgcagcagatgcagcagcagcaccagcagatgcaccaaaggatgatgcagcacgccgagcagcagcaccagcagtttggtccccctccccctcagtccaagttgccagagtttctacgcgtcaggccacccaccttctccagcaccaccaaccctatggaggcgaacgactggctccatgccatagagaagaagctgaacctcctgcagtgcaatgatcaggagaaggtcgctttcgccacacaccagcttcagggtcctgcgtcagcttggtgggacaaccacatggccacccgcccaccgggtactgaagtcacatgggcagagttctgccgtagcttcaggaaggcacaggtgccagacggggtcgtggcacaaaagaagagggaattccgggcgctccatcagggcaacaggactgtgacagagtacctccatgagttcaatcgcctcgcgcgatatgcaccagaggatgtccgcaccgacgccgagaagcaggagaagttcatggcgggtctggatgacgagctgaccaaccaactgatatctggggactacgccgactttgagaggctggttgacaaggcaatccgtcaggaggaccaacgcaacaagatggacaggaagaggaaggccgctcagttcagggcacatcagggaagtcaccagaggccgcgcttcactcccggacagcagggtggacctaccaccatgatcgtccgtcagcaccgcccgttcaaccctagcaacttccaccagggcactagtggcagtcagaaccaccatggaagtcagcccaaccgcggtgcagctccacgcccatcagtggcaccggcacagtcaggccagcccgcacaagccaagaaggagacgggagcaaaaccagggtcctgcttcaactgtggcgagcttggccacttcgctgacaaatgcccgaagcccaggcgtgccggaccaaggtttatccaggctcgtgtcaaccacgcatctgcggaggaggcacaagcagcaccagaggtcgtactgggtacgtttcctgttaactcaatccctgcaacagtactttttgattctggtgcaacgcattctttcatctcgaagaaatttgtcgggatgcatgggttaataagagaggaacttagcacaccgatgcgggttcataccccagggaatagctccacttcggttcaattcagcccttctataacaatagaaattcaaagatcaccatttctagccaacctcattcttctcgaatccaaagacctagatgtcattcttgggatggattggctgaccaagtttaagggagtcatcgattgtgcgagtcgcacagtcaccctgaccaacgagaagggagaaacagtggtgtacaaatctctagtctcaccaaagaaaggggtctcgttgaatcagattgagacggaaatcccagtggataccgtagagaagaacttgagaaaattggaagatatacccatagtctgcgagtatccagaagtgttccccgaagacctcactaccatgccacccaagagagagattgaattccggattgacttggcaccgggaactgctccaatctataagagaccatacagaatggcggccaacgaattagcagaggtcaagaagcaagttgatgagcagctgcagaaagggtacatacgaccaagcacttcaccttggggcgctccggtcatttttgtggagaaaaaggataagacgaagaggatgtgcgttgattatcgcgcactcaacgaggtcacaatcaagaataaatatcctttgccgcgaatcgacgatttatttgatcaactgaaaggagctaaagtattttctaagatagacctgcgatcaggctaccaccagctgagaatccgggaagaggatattccgaagacggccttcaccactcggtacgggctatatgagtgcacggttatgtctttcggacttaccaacgcacccgcattcttcatgaatctgatgaacaaagtgttcatggaatttctggacaagtttgttgtggtattcatcgacgacatacttatctactcaaaatccgaggaagaacatgagcaacatctccgtctggtactcgaaaagttgaaggagcaccagctatacgccaagttcagcaagtgtgacttctggttgacggaagtaaaatttctgggtcatgtcattacagctcagggtgtggcagtcgacccatcgaacgtggagtcagttaccaaatggaccccacctaagaccgtgtcgcagattcggagttttctaggactggcaggttattaccgccgattcatcgaaaatttctccaggatcgcccgacccatgactcagttgcttaagaaagatgagaagtttaaatggacagctgagtgcgataagagttttgaggagctcaagaagaagttagtatccgcaccagtattgattctgcccgacccgacgaaagacttccaagtctattgtgatgcatcccgtcacggacttggatgtgtcctaatgcaagagggcagagtggttgcgtatgcctcgcggcagttgcgtccacacgaaggaaattatccaactcatgacttggaattggcagcagtggttcatgctttgaagatctggaggcactatctgattggaaaccgctgcgaagtatatacggaccataagagtctgaaatacatcttcacccaaccggacctaaaccttcgacaacgaagatggttggagctaatcaaagactatgacatgagtattcactaccacccgggtaaagccaatgtggtggcagacgctttaagccggaaaagctactgcactgccctatgcgtcgagggcatgtgtgaggaattgaggcaggagtttgaacatctcaacgtgggaattgttgaacacgggttcgtagccgctctggaggcacggcctactctcgtggatcaagtcagagcagctcaagtaaatgattctgagatagcagagctgaaaaagaatatgagagtcggaaaagcccgggatttccacgaagatgagcatggcaccatctggatgggagaaagattgtgtgtacctaacgacaaggaactgaaggatctgatactcaccgaggctcatcagacccagtactccattcacccaggcagcaccaaaatgtaccaagaccttaaagaaaaattttggtgggtcagcatgaggagagaaatagctgaattcgtcgcactctgcgatgtttgccaacgagtgaaagcagagcatcaaagaccagcaggtttactccaacctctccaaatcccggaatggaaatgggaggagattggaatggactttataacaggactgccccggacatcattgggtcacgattcaatctgggtagtcgtggatcgactcactaaggttgctcactttataccagtacataccacctatacgggaaagaggttggcagaattgtacctcgcaaggatcatgtgtttgcatggggtacccaagaagatagtatccgaccgaggtagtcagttcacctcaaagttttggcagaaacttcaggaagaattggggacccgtttaaacttcagcacggcctatcacccgcaaactgatggtcagaccgagcgagtcaatcaaatcttggaggatatgttgagagcatgcgctcttgattttggtggagcttgggacaaaagcttgccatacgcggaattctcgtacaacaacagctaccaggccagtctacagatggcaccgtttgaagctttgtacggccggaagtgccgcacacctctcttctgggatcagacaggcgaacgtcaactgttcggaacagaagtattagcggaagcagaagagaaagtcagaatcatcagggaaaggttgaggattgctcagtctcgacagaagagctacgcggataaccgtcgaagggagctcacttttgaggcaggagattacgtgtatcttcgtgtcactccgctccggggagttcaccgttttcagacgaaaggcaagttggcaccacgcttcgtgggaccatacaaaattttggaacgaaggggagaagttgcttatcagttagaacttccatccaatatgatcggcatccatgacgtgttccacgtgtcccaattaaagaagtgtttaagggtacctgaagaacaggctgattcggaacacattgatatccaggaggacctaacatatgtggagaagccggttcgcatacttgataccagcgaaaggaggaccagaaataaggtcactaggttttgccgagttcagtggagtcatcattcagaagaggaagcaacctgggaaagggaagatgagttgaaagccgcccatccgcacctcttcaccagctcctccgaatctcggggccgagattccgtttaa

SEQ ID NO: 13838 - DNA, 5358 bp, Oryza sativa
  Clone ID: TFbOSC401061j.C1.o25.fg
atggccggtcacccacccaaccaccgcggagaaggcatgatcgattttgtggcagagctggcacgcatgacactggtggtgggctaccccaacgcgccggagtacacgaccattccgccgctcagtggcgagcttcctcaccgtgtccgcttggaggtccatggctacgtggggacttgcctcgctaacatggcggttgaggcgtcaggaggcacagcagatcatgcctgtcaggaggcagcctacttgatgatggccaggttacgggagcgccacgactacatcttccacgacacggcgtaccgctaccacccccgtcgagcccatggtgatggcgtcagctccttccgtccgacagctggcgagaacgacaccaccttcggtcacatgtgtgctgtgatgaggggattggaccggatgcactcggacctgcacaaggcgaccaaggccttgaatgatgggaagctcatgaggatcgtcgctctgaaggacgagatagcgcgcctgaagaaggagaatgctcagttgaagggtcttccagtaccaggaggagtccggatccgcactacgccccgtaagaggacgactgcacccgtgcgcatccagcttgcgcccaggaacccacctccaccagcagctcccgcagcacctccagttccgcccgcagctccggcagttcccgcagttcctccagctccagctccagctccagctcccgcgttcactctctccttcgctccagcatcagccgccagaggtccagccagtggtaccggaggttgcttgtttgggatggtctacaccaggactggcaaccgcacgacaggcgagggcagcaacggtgaagaacgcgctgatggtgtgcaccccaacggtgattctggcaatggtccgccaccacttcccgagaatccgacccttgcccaagttatggcacatcagactcagatgatggcagccatgatgcagcagatgcagcagcagcaccagcagatgcaccagaggatgatgcagcacgccgaacagcagcaccagcagtttggtccccctccccctcagtccaagttgccagagtttctacgcgtcaggccacccaccttctccagcaccaccaaccccatggaggcgaacgactggctccatgcaatagagaagaagctgaatctcctgcagtgcaatgatcaggagaaggtcgctttcgccacacaccagcttcagggtcctgcgtcagcttggtgggacaaccacatggccacccgcccaccgggtactgaagtcacatgggcagagttctgccgtagcttcaggaaggcacaggtgccagatggggtcgtggcacaaaagaagagggaattccgtgcgctccatcagggcaacaggactgtgacagagtacctccatgagttcaatcgcctcgcgcgatatgcaccagaggatgtccgcaccgacgccgagaagcaggagaagttcatggcgggtctggatgatgagctgaccaaccaactgatatctggggactacgccgactttgagaggctggttgacaaggcaatccgtcaggaggaccaacgcaacaagatggacaggaaaagaaaggcggcgcagttccggtccaaccaaggtagtcagcaccgaccgcgcttcactcccggacagcagggtggacctaccaccatgatcgtccgccagcaccgcccgttcaaccctagcaacttccatcagggcaccagtggcagccagaaccaccatggaagtcagcccaaccgcggtacagctccacgcccatcagtggcaccggcacaatcaggccagcccgcacaagccaagaaggagacgggagcaaaaccagggtcctgcttcaactgtggcgagcttggccacttcgctgacaaatgcccgaagcccaggcgtgccggaccaaggtttatccaggctcgtgtcaaccacgcgtctgcggaggaggcacaagcagcaccagaggtcgtactgggtacgtttcctgttaactcaatccctgcaacagtactttttgattctggtgcaacgcattctttcatctcaaagaaatttgtcgggatgcatgggttaataagagaggaacttagcacaccgatgcgggttcataccccagggaatagctccacttcggttcaattcagcccttctataacaatagaaattcaaaggtcaccatttctagccaacctcattcttctcgaatccaaagacctagatgtcattcttgggatggattggctgaccaagtttaagggagtcatcgactgtgcgagtcgcacagtcaccttgaccaacgagaagggagaaacagtggtgtacaaatctctagtctcaccaaagaaaggggtctcgttgaatcagattgagacggaaatcccagtggataccgtagagaagaacttgagaaaattggaagatatacccatagtctgcgagtatccagaagtgttccccgaagacctcactaccatgccacccaagagggagattgaattccggattgatttggcaccaggaaccgctccaatctataagagaccgtacagaatggcggccaacgaattagcggaggtcaagaagcaagttgatgaacagctgcagaaagggtacatacgaccaagcacttcaccttggggcgctccggtcatttttgtggagaaaaaggataagacaaagaggatgtgcgtcgattatcgcgcacttaacgaggtcacaatcaagaataaatatcctttaccgcgaatcgacgatttatttgatcaactgaaaggagctaaagtgttttctaagatagacctgcgatcaggctaccaccagttgagaatccgggaagaggatattccgaagacggccttcaccactcggtacgggctatatgagtgcacggttatgtctttcggacttaccaacgcacccgcattcttcatgaatctgatgaacaaagtgttcatggaatttctggacaagtttgttgtggtattcatcgacgacatacttatctactcaaaatccgaggaagaacatgagcaacatctccgtctggtactcgaaaagttgaaggagcaccagctatacgccaagttcagcaagtgtgacttctggttgacggaagtaaaatttctgggtcatgtcattacagctcagggtgtggcagtcgacccatcgaacgtggagtcagttaccaagtggaccccaccgaagacagtgtcgcagattcgaagttttctaggactggctggttattaccgccgattcatcgaaaatttctccagaatcgcccgacccatgactcagttgcttaagaaagacgagaagtttaaatggacagctgagtgcgataagagctttgaggagctcaagaagaaattagtatccgcaccggttttgatcctgcccgaccagatgaaagacttccaagtctattgtgatgcatcccgtcacggacttggatgtgtcctaatgcaagagggcagagtggttgcatatgcctcgcggcagttgcgtccacacgagggaaattatccaactcatgacttggaattggcagcagtggttcatgctttgaagatctggaggcactatctgattggaaaccgctgcgaagtatatacggaccataagagtctgaaatacatcttcacccaaccggacctaaaccttcgacaacgaagatggttggaactaatcaaagactatgacatgagtattcactaccacccgggtaaagccaatgtggtggcagacgcattaagccgaaaaagttactgcactgccctatgcatcgagggcttgtgtgagaaattgcggcaggagtttgagcatctcaacgtgggaattgttgaacacgggttcgtagccgctctggaggcacggcctactctcgtggatcaagtcagagcagctcaagtaaatgattctgagatagcagagctgaaaaagaatatgagagtcggaaaggcccgggatttccacgaagatgagcatggcacaatctggatgggagaaagattgtgtgtacctgacgacaaggaactgaaggatctgatactcaccgaggctcatcagacccagtactccattcacccaggcagcaccaaaatgtaccaagacctcaaggaaaaattttggtgggtcagcatgaggagagaaatagctgaattcgtcgcactctgcgatgtttgccaacgagtgaaagcagagcaccaaagaccagcaggtttactccaacctctccaaatcccggaatggaaatgggaggagattggaatggactttataacaggactgccccggacatcatcgggacatgattcaatctgggtagtcgtggatcgactcactaaggttgctcactttataccagtacataccacctatacgggaaagagattggcagaattgtacctcgcaaggatcatgtgtttgcatggggtacccaagaagatagtatccgaccgaggtagtcagttcacctcaaagttttggcagaaactgcaggaagaaatggggacccgtttaaatttcagcacggcctatcacccgcaaactgatggtcagaccgagcgagtcaatcaaatcttggaggatatgttgagagcttgcgctcttgattttggtggagcttgggacaaaagcttgccatatgcggaattctcgtacaacaacagctaccaggccagtctacagatggcaccgtttgaagctttatacggccggaagtgccgcacacctctcttctgggatcagacaggcgaacgtcaactgttcggaacagaagtattagcggaagcagaagagaaagtcagaatcatcagggaaaggttgaggattgctcagtctcgacagaagagctacgcggataaccgtcgaagggagctcacttttgaggccggagactacgtgtatcttcgtgtcactccgctccggggagtacaccgttttcagacgaaaggcaagttggcaccacgcttcgtgggaccatacaaaatcttggaacgaaggggagaagttgcctatcagctagaacttccatccaatatgatcggcatccatgacgtgttccacgtgtcccaattaaagaagtgtttaagggtacctgaagaacaggctgattcggaacacattgatatccaggaggacctaacctatgtggagaagccggttcgcatacttgatgccagcgaaaggagaaccagaaacaaggttacccggttttgccgagttcagtggagtcatcattcggaagaggaagcaacctgggaaagggaagatgagttgaaagccgcccatccgcacctcttcaccagctcctccgaatctcggggccgagattccgtttaa

SEQ ID NO: 13839 - DNA, 1062 bp, Oryza sativa
  Clone ID: TFbOSC401097j.C1.o3.fg
atgtctgaggtcggatcacaagatgagtttgtgaagacaaatacggacggttctgagaagggcgagtattctggtggcaacaggccagtcatgtcacggattggtaagatggcgccgacaggaagggacggatctgacagcacatgtgaacgttttcaatcaacagtcactgatcttgtgaagatggatgtggaagttgacgatgaagacaaggctatagttcttttgtgttcgttacctgaatcgtatgagcatgtggtgactactttgacgtacggcaaggagaccatcaaaactaaagatatcacttctgcgttgttggctcgtgatcagatgagaaagaacaaagagggtgaaacatctcaagcggagggtttgctagtcaaagaagatcatgctgggcataaggtaaagaagaacaaaaagaagaagatggtgcagtgcttcagatgtgatgagttggggcatataagcagggagtgtccaacactaaagggaaaagctaaggctaatgcagcgacttcttcgaatgactcggatagcgatggttgtgatcttctcacgatgtcaagtgcacagtctaaggatgcagaagtgtggatattagatttagctagcttgtttcatgtgacgccaaggaaggagtggttctcttcatacaagtctggtgagtgtggttttgtctacttaggcgatgacacaagttatccagccgtgggagtaggtgaagtcaaaattaagctagaagatggagggctaaagaggaatctgatttcgcttggaaccttgcatgaagaagggttaatattccacggtaatcggaataggaagaccattgagatcatgaagggcaagatgactgtgatgactggagaaaaggtggagtcgcatctttacaagctgcaagggtgcactgttgcaggtggagtccaggaggaagcggttgctgggataggaattgtttttgtggcggcgggtctagcgcagactcgtcgggcggcttgcggtgaagctgcaaagaagacaacccaagtctggaagacaggtggatcggcatggtga

SEQ ID NO: 13840 - DNA, 4950 bp, Oryza sativa
  Clone ID: TFbOSC401127j.C1.o10.fg
atggccggtcacccacccaaccaccgcggagaaggcatgatcgatttcgtggcagagttggcacgtatgacactggtggtgggctaccccaacgcgccggagtacacgaccattccaccgctcagtggcgagcttcctcaccgtgttcgcttggaggtccatggctacgtggggacttgcctcgctaacatggcggtcgaggcgtcaggaggcacagcagatcacgcctgtcaggaggcagcctacttgatgatggccagactacgggagcgccacaactacatcttccacgacacggcgtaccgctaccacccccgtcgagccaacggtgatggcgtcagctccttccgtccgacagctggcgagaacgacaccacctttggtcacatgtgtgctgtgatgaggggattggacaggatgcactcggacctgcacaaggcgaccaaggccttgaacgatgggaagctcatgaggatcgtcgctctgaaggatgagatagcgcgcctgaagaaggagaacgctcagctaaagggtcttccagcgccaggaggagtccggatccgcaccacgccccgcaagacgacgactgcacccgtgcgcatccagcttgcgcccaggaaaccacctccaccagcagctcccgcagcacctccagttccgcccgcagttcctgcagctccagttccagctcccgcgttcactctctccttcgctccagcatcagccgccagaggtccagccagtggcaccggaggttgcttgtttgggatggtctacaccaggaatggtagccgtgcaacaggcgagggcagcaacggcgaagaacgcgctgatggtgtgcaccccaacagtgattctggcaatggtccgccaccacttcccgagaatccgacccttgcccaagttatggcacatcagactcagatgatggcagccatgatgcagcagatgcagcagcagcaccagcagatgcaccaaaggatgatgcagcacgccgaacagcagcaccagcagtttggtccccctccccctcagtccaagttgccagagtttctacgcgtcaggccacccaccttctccagcaccaccaaccctatggaggcgaacgactggctccatgccatagagaagaagctgaacctcctgcagtgcaatgatcaggagaaggtcgctttcgccacacaccagcttcagggtcctgcgtcagcttggtgggacaaccacatggccacccgcccaccgggtactgaagtcacatgggcagagttttgccgtagcttcaggaaggcacaggtgccagatggggtcgtggcacaaaagaagagggaatttcgtgcactccatcagggcaacaggactgtgacagagtacctccatgagttcaatcgcctcgcgcgatatgcaccagaggatgtccgcaccgacgccgagaagcaggagaagttcatggcgggtctggatgacgagctgaccaaccaactgatatctggggactacgccgactttgagaggctggttgacaaggcaatccgccaggaggatcaacgcaacaagatggacaggaagaggaaggccgcacagttcagggcacctcagggaagtcaccagaggccgcgcttcactcccggacagcagggtggacctaccaccatgatcatccgccagcaccgcccgttcaaccctagcaacttccaccagggcaccagtggcagtcagaaccaccatggaggtcagcccaaccgcggtgcagctccacgcccatcagtggcaccggcacagtcaggccagcccgcgcaagccaagaaggagacgggagcaaaaccagggtcctgcttcaactgtggcgagcttggccacttcgctgacaaatgcccgaagcccaggcgtgccgggccaaggtttatccaggctcgtgtcaaccacgcatctgcggaggaggcacaagcagcaccagaggtcgtactgggtacgttccctgttaactcaatccctgcaacagtactttttgattctggtgcaacgcattctttcatttcaaagaaatttgtggggagatcaccatttctagccaacctcattcttcttgaatccaaagacctagatgtcattcttgggatggattggctgaccaagtttaagggagtcatcgattgtgcgagtcgcacagtcaccttgaccaacgagaagggggaaaccgtggtgtacaaatctctagtctcgccaaagaaaggggtctcgttgaatcagattgagacggaaatcccagtggacaccgtagagaagaacttgagaaaattggaagatatacccatagtctgcgagtatccagaagtgttccccgaagacctcactaccatgccacccaagagagagattgaattccggattgacttggcaccgggaactgctccaatctataagagaccgtacagaatggcggccaacgaattagccgaggtcaagaagcaggttgatgagcagctgcagaaagggtacattcgaccaagcacttcaccttggggcgctccggtcatttttgtggagaaaaaggataagacgaagaggatgtgcgttgattatcgcgcactcaacgaggtcacaatcaagaacaaatatcccttgccgcgaattgacgatttatttgatcaactgaaaggagctaaagtgttttctaagatagacctgcgatcaggctaccaccagttgagaatccgggaagaggatattccgaagacggccttcaccactcggtacgggctatatgagtgcacggttatgtctttcggacttaccaacgcacccgcattcttcatgaatctgatgaacaaagtgttcatggaatttctggacaagtttgttgtggtgttcatcgacgacatacttatctactcaaaatccgaggaagaacatgagcaacatctccgtctggtactcgaaaagttgaaggagcaccagctatacgccaagttcagcaagtgtgacttctggttgacggaagtcaaatttctgggtcatgtcattacagctcagggtgtggcagtcgacccatcgaacgtggagtcagttaccaaatggaccccacctaagaccgtgtcgcagattcggagttttcttggacttgcgggttattaccgccgattcatcgaaaatttctccagaatcgcccgacccatgactcagttgcttaagaaagatgagaagtttaaatggacagctgagtgcgataagagttttgaggagctcaagaagaaattagtatccgcaccagttttgattctgcccgacccgacgaaagacttccaagtctattgtgatgcatcccgtcacggacttggatgtgtcctaatgcaagagggcagagtggttgcgtatgcctcgcggcagttgcgtccacacgaaggaaattatccaactcatgacttggaattggcagcagtggttcatgctttgaagatctggaggcactatctgattggcaaccgctgcgaagtatatacggaccataagagtctgaaatacatcttcacccaaccggatctaaaccttcggcaacgaagatggttggaactaatcaaagactacgacatgagtattcactaccacccgggtaaagccaatgtggtggcagacgctttaagccggaaaagttactgcactgccctatgcatcgagggcatgtgtgaggaattgcggcaggagtttgaacatctcaacatgggaattgttgaacacgggtttgtagccgctctggaggcacggcccactctcgtggatcaagtcagagcagctcaagtaaatgattctgagatagcagagctgaaaaagaatatgagagtcggaaaagcccgggatttccacgaagatgagcatggcacaatctggatgggagaaagattgtgtgtacctgacgacaaggaatcgaaggatctgatactcaccgaggctcatcagacccagtactccattcatccaggcagcactaaaatgtatcaagacctcaaagaaaagttttggtgggttagcatgaggagagaaatagctgaattcgtcgcactctgcgatgtttgccaacgagtgaaggcagagcaccaaagaccagcaggtttactccaacctcttcaaatcccggaatggaaatgggaggagattggaatggactttataacaggactgccccggacatcatcgggtcacgattcaatctgggtagtcgtggatcgactcactaagcttgtggacaaaagcttgccatatgcggaattctcgtacaacaacagctaccaggccagtctacagatggcaccgtttgaagctttatacggccggaagtgccgcacgccgctcttctgggatcagacaggcgaacgtcaactgttcggaacagaagtattagcggaagcagaagagaaagtcagaatcatcagggaaaggttgaggattgctcagtctcgacagaagagctacgcggataaccgtcgaagggagctcacttttgaggcaggagattacgtgtatcttcgtgtcactccgctccggggagtacaccgttttcagacgaaaggcaagttggcaccacgcttcgtgggaccatacaaaatcttggaacgaaggggagaagttgcttatcagctagaacttccatccaatatgatcggcatccatgacgtgttccacgtgtcccaattaaagaagtgtttaagggtacctgaagaacaggctgattcggaacacattgatatccaggaggacctaacatatgtggagaagccggttcgcatacttgataccagcgaaaggagaaccagaaacaaggttacccggttttgccgagttcagtggagtcatcattcggaagaggaagcaacctgggaaagggaagatgagttgaaagccgcccatccgcacctcttcaccagctcctccgaatctcggggccgagattccgtttaa

SEQ ID NO: 13841 - DNA, 3345 bp, Oryza sativa
  Clone ID: TFbOSC401161j.C1.o52.gm
atggtctacaccaggactggcaaccgcacggcaggcgagggcagcaatggcgaagaacgcgctgatggtgtgcaccccaacagcgattccggcaatggtccgccaccccttcccgagaatccgacactggcccaagttatggcacatcagactcagatgatggcagccatgatgcagcagatgcagcagcagcaccagcagatgcaccagaggatgatgcagcacgccgaacaacagcaccagcagtttggtccccctccccctcaatccaagctgctagagtttctacgcgtcaggccacccaccttctccagcaccaccaaccccatggaggcgaatgactggctccatgccatagagaagaagctgaatctcctgcagtgcaacgatcaggagaaggtcgctttcgccacacaccagcttcagggtcctgcgtcagcttggtgggacaatcacatggccacccgcccgccaggcgctgaagtcacttgggcggagttttgccgtagtttcaggaaggcacaggtgccagacggggttgtagcgcaaaagaagagggaattccgggtgctccatcagggcaacaggacagtgacagagtaccttcatgagttcaatcgcctcgcgcgatatgcaccggaggatgtccgcactgacgccgagaaacaggaaaagtttatggcaggcctggatgacgagctgaccaaccaactgatatctggggactacgctgattttgaaaggctggttgacaaggcaatccgtcaggaggatcagcgcaacaaaatggacaggaagagaaaggcggcgcagttccggtccaaccaaggtagtcagcaccgaccgcgtttcactcccggacagcagggtggacctaccaccatgatcgtccgtcagcaccgcccgttccactctagcaacttccaccagggcgctagcggcagtccgaaccaccagggaggccagcccaaccgtggtgcagctccacgcccaccaatggcaccagcacagccagccccgtccgcgcaagccaagaaggagactggcacaaaaccggggtcctgtttcaactgtggcgagcttggccactttgccgacaaatgcccgaagcccaggcgtgccggaccaaggtttatccaggctcgtgtcaaccacgcgtctgcggaggaggcacaagcagcaccggagatcgagacggaaatcccagtggacaccgtggagaaaagcttgaggaaattggaagatatacccatcgtctgtgagtatccagaagtgtttcctgaagacctcactaccatgccacccaagagagagattgaattccggattgatttagcaccgggaaccgcagcaatttacaagagaccgtacaggatggcggccaacgaactagcagaggtcaagaagcaggtcgatgagcaactacagaaaggatacatccgaccgagtacttcgccttggggtgctccggtcatttttgtggagaaaaaggataagacgaagaggatgtgcgtcgattaccgcgcactcaatgaggtcacgatcaagaataaatatcctttaccgcggattgatgatttgtttgatcaactgaagggagctaaggtgttctccaagatagacctgcgatcaggctatcaccagttaaggatccgggaagaggatatcccaaagacggccttcaccactcggtacgggttatatgagtgcacggttatgtctttcggactcaccaacgcacccgcattcttcatgaatctaatgaacaaagtgttcatggagtttctggacaagtttgttgtggtattcatcgacgatatacttatctactcaaagtctgaagaagaacatgagcagcatctccgtctggtactcgagaagttgaaggagcaccagttatacgccaagttcagcaagtgtgatttctggttgacggaagtcaaatttctgggtcatgttattacagctcagggtgtggccgtcgacccatccaacgtggagtcggttaccaaatggaccccaccgaagaccgtgtcgcagattcgaagttttcttggacttgcgggatattaccgccgattcatcgaaaacttctccagaatcgcccgacccatgactcagttgcttaagaaggatgagaagtttaaatggacagctgagtgcgataaaagttttgaggagctcaagaagaaattagtatctgcaccagttttgattctgcccgaccagatgaaagacttccaagtctattgcgatgcatcccgccacggacttggatgtgtcctaatgcaagagggcagggtggttgcgtatgcctcacgacagttacgtccacacgaagggaattatccaactcatgacttggaattggcagcggtggttcatgctttgaagatctggaggcactatctgatcggcaaccgctgcgaggagtttgagcacctcaacgtgggaattgttgaacacgggttcgtagccgctctggaagcacggcctacgctcgtcgatcaagttagagccgctcaagtaaatgatcctgaaatagcagagctgaaaaagaacatgagagtcggaaaggctcgggatttccttgaggatgagcatggcacaatctggatgggagaaagattgtgtgtacctgacgacaaggaactgaaagatctgatactcaccgaggctcatcaaacccagtactccattcacccaggcagcaccaaaatagcatcaaaggccagcaggcttactccaacctcttcaaatcccggaatggaaatgggaggaaattggaatggactttataacaggactgccccggacatcatcgggtcacgattcaatctggaggtattagcggaagcagaagagaaagtcagaatcatcagggaaaggttgaggattgcccagtctcgacagaagagctacgcagataaccgtcgaagggagctcacttttgaggcaggagattacgtgtatcttcgcgtcactccgctccggggagtacaccgctttcagacaaaaggcaagttggcaccacgcttcgtgggaccatacaagatcctggaacgaaggggggaagttgcttatcagttagaacttccatccaacatgatcggcatccatgacgtgttccatgtgtcccaattaaagaagtgcttaagggtacctgaagaacaggctgattcggaacacattgatatccaggaggatttgacatatgtggagaagccggcaagggtgggcgtgatggagcggggcgggccctgcgacggcctctatcgcttccggattcacctaggcacgagaggggactgcccgttgcccgctggggacgggggtgaaacctga

SEQ ID NO: 13842 - DNA, 2985 bp, Oryza sativa
  Clone ID: TFbOSC401171j.C1.o7.np
atggccggtcacccacccaaccaccgcagagaaggcatgatcgactttgtggccgagttggcacgcatgacactggtggtgggctaccccaacgcgccggagtacacgaccattccaccgctcagtggcgagcttcctcaccgtgtccgcttggaggtccatggctacgtggggacttgcctcgctaacatggcggtcgaggcgtcaggaggcacagcagatcacgcctgtcaggaggcagcctacctgatgatggccagactacgggagcgccacaactacatcttccacgacacggcgtaccgctaccacccccgtcgcgccaacggtgatggcgtcagctccttccgtccgacggctggcgagaacgacaccacctttggtcacatgtgtgctgtgatgaggggattggacaggatgcactcggacctgcacaaggcgaccaaggccttgaacgatgggaagctcatgaggatcgtcgctctgaaggacgagatagcgcgcctgaagagggagaacgctcacctaaagggtcttccagcgccaggaggagtccggatccgcactacgccccgcaagacgacgacgacacccgtgcgcatccagcttgcgcccaggaacccacctccagcagcagctcccgcagcacctccagttccgcccgtagttcctgcagctccagctccagcccccgcgtccgctctctccttcgctccagcatcagccgccagaggtccggccagtggcaccggaggttggttgtctgctactcccagtggcagccgcgatctcagcagcagcagctccagtggctcacagtcaggcagcggcgagacatatctgccaggctccaggagtcgctcagagggacctgatggtctacaccaggactggcaaccgcacgacaggcgagggcagcaacggcgaagaacgcgctgatggtgtgcaccccaacagtgattccggcaatggtccgccaccacttcccgagaatccgacccttgcccaagttatggcacatcagactcagatgatggcagccatgatgcagcagatgcagcagcagcaccagcagatgcaccagaggatgatgcagcacgtcgaacagcagcaccagcactttggtccccctccccctcagtccaagttgcctgagttcctacatgtcaggccacccaccttctccagcaccaccaaccctatgaaggcaaatgactggctccatgcaatagagaagaagctgaatctcctgcagtgcaatgatcaggagaaggtcgctttcgccacacaccagcttcagggtcctgcgtcagcttggtgggacaaccacatggccacccgcccaccgggtactgaagtcacatgggcagagttctgccgtagcttcaggaaggcacaggtgctagatggggtcgtggcacaaaagaagagggaatttcgtgcactccaccagggcaacaggactgtgacagagtacctccacgagttcaatcgcctcgcacgatatgcaccagaggatgtccgcaccgacgccgagaagcgggagaagttcatggcgggtctggatgatgagctgaccaaccaactgatatccggggactacgctgactttgagaggctggttgacaaggcaatccgtcaggaggaccaacgcaacaagatggacaggaagaggaaggccgctcagttcagggcacatcagggaagtcaccagaggccgcgcttcactcccggacagcagggtggacctaccaccatgatcgtccgccagcaccgcccgttcaaccctagcaactttccccagggcgccaatggcagtcagaaccaccatggaggtcagcccaaccgcggtgcagctccacgcccaccaatggcaccggcacagtcaggcccgtccgcgcaagccaagaaggagactggagcaaaaccagggtcctgcttcaactgtggcgagcttggccacttcgctgacaaatgcccgaagcctaggcgtgccgggccaaggtttatccaggctcgtgtcaaccacgcatctgcggaggaggcacaggcagcaccagaagtggtactgggtacgtttcctgttaactcaatcgctgcaacagtactttttgattctgatgcaacgcattctttcatttcaaagaaatttgtggggatgtatgggttaaggaaagaagaacttagcacaccaatgagagttcataccccgggaaatagttcaacctcagtcagttttagcccttcagtgctaatagaaatccaaagatcaccatttctagccaacctcattcttctcgaatccaaagacctagatgtcattcttgggatggactggctgaccaagttcaagggagtcatcgattgtgcgaatcgcacagtcaccttgaccaacgagaagggagaaaccgtggtgtacaaatcactagcctcaccaaagcaaggggtctcgttgaatcagattgagacggaaatcccagtggacaccgtagagaagaacttgagaaaattggaagatatacccatagtctgcgaatacccagaagtgttccccgaagacctcactaccatgccacccaagagagagattgaattccggattgacttggcaccgggaactgctccaatctataagagaccgtacagaatggcggccaacgaattagcagaggtcaagaagcaagttgatgagcagctgcagaaagggtacattcgaccaagtacttcaccttggggtgctccggtcatttttgtggagaaaaaggataagacgaagaggatgtgcgttgattatcgcgcactcaacgaggtcacaatcaagaacaaatatcctttgccgcgaatcgatgatttgtttgatcaactgaagggagctaaagtgttttctaagatagacctgcgatcaggctaccaccagttgagaatccgggaagaggctataactgccactggatttcatacaggccatggcaaggcaagccatgc

SEQ ID NO: 13843 - DNA, 5472 bp, Oryza sativa
  Clone ID: TFbOSC401197j.C1.o33.fg
atggaaagacctaagagccctctgaatccttttcattgcatatgttccttgcaattggattttgttccgggaaaatggggatctgttcttgtggttcaagggaaaaatcttggtcgctcgtttaaaatggccggtcacccacccaaccaccgcggagaaggcatgattgatttcgtggcagagttggcacgcatgaccctggtggtgggctaccccgacgcgccggagtacacgaccatcccaccgctcagtggcgagcttcctcaccgtgtccgcttggaggtccatggctacgtggggacttgcctcgctaacatggcggttgaggcgtcaggaggcaccgcagatcatgcctgtcaggaggcagcctacttgatgatggccaggttacgggagcgccacgactacatcttccacgacacggcgtaccgctaccacccccgtcgagcccatggtgatggcgtcagctccttccgtccgacagctggcgagaacgacaccaccttcggtcacatgtgtgctgtgatgaggggattggataggatgcactcggacctgcacaaggcgaccaaggccttgaacgatgggaagctcatgaggatcgtcgctctgaaggacgaggtagcgcgcctgaagaaggagaatgctcagttgaagggtcttccagcaccaggaggagtccggatccgcactacgccccgtaagaggacgactgcacccgtgcgcatccagcttgcgcccaggaacccacctccaccagcagctcccgcagcaccttcagttctgcccgcagttcctgcagctccagcttcagctccagctccagctcccgcgttcactctctccttcgctccagcatcagccgccagaggttcagccagtggtaccggaggttgcttgtttgggatggtctacaccaggactggtagccgcgcaacaggcgagggcagcaacggtgaagaacgcgctgatggtgtgcaccccaacggtgattctggcaatggtccgccaccacttcccgagaatccgacccttgcccaagttatggcacatcagactcagatgatggcagccatgatgcagcagatgcagcagcagcaccaacagatgcaccagaggatgatgcagcacgccgaacagcagcaccagcagtttggtccccctccccctcagtccaagttgccggagtttctacgtgtcaggccacccaccttctccagcaccaccaaccctatggaggcaaatgactggctccatgcgatagagaagaagctgaatctcctgcagtgtaatgaccaggagaaagtcgctttcgccacacaccagcttcagggtcctgcgtcagcttggtgggacaaccacatggccacccgcccaccgggtactgaagtcacatgggcagagttctgccgtagctttaggaaggcacaggtgccagatggggtcgtggcacaaaagaagagggaattccgggcgctccaccagggcaacaggactgtgacagagtacctccatgagttcaatcgcctcgcgcgatatgcaccagaggatgtccgcaccgacgccgagaagcaggagaagttcatggcgggtctggatgacgagctgaccaaccaactgatatctggggactacgccgactttgagaggctggttgacaaggcaatccgtcaggaggatcagcgcaacaaaatggacaggaaaagaaaggcggcgcagttccggtccaaccaaggtagtcagcaccgaccgcgcttcactcccggacagcagggtggacctaccaccatgatcgtccgccagcaccgcccgttcaaccctagcaacttccaccagggcactagtggcagtcagaaccaccatggaggccagcccaaccgcggtgcagctccacgcccaccgatggcaccggcacagtcaggccagcccgcacaagccaagaaggagacgggagcaaaaccagggtcctgcttcaactgtggcgagcttggccacttcgctgacaaatgcccgaagcccaggcgtgccggaccaaggtttatccaggctcgtgtcaaccacgcatctgcggaggaggcacaagcagcaccagaggtcgtactgggtacgtttcctgttaactcaatccctgcaacagtactttttgattctggtgcaacgcattctttcatctccaagaaatttgtcgggatgcatgggttaataagagaggaacttagcacaccgatgcgggttcataccccagggaatagctccacttcggttcaattcagcccttctataacaatagaaattcaaaggtcaccgtttctagccaacctcatccttctcgaatccaaagacctagatgtcattcttgggatggattggctgaccaagtttaagggagtcatcgattgtgcgagtcgcacagtcaccctgaccaatgagaaaggagaaaccgtggtgtacaaatctctagtctcgccaaagaaaggagcctcgttgaatcagattgagacggaaatcccagtggacaccgaagagaagaacttgagaaaattggaggacatacccatagtctgcgagtatccagaagtgttccccgaagacctcaccaccatgccacccaagagggagattgaattccggattgatttggcaccaggaaccgctccaatttacaagagaccatacaggatggcggccaacgaattagcagaggtcaagaagcaagttgatgaacagctgcagaaagggtacatacgaccaagcacttcaccttggggcgctccggtcatttttgtggagaaaaaggataagacaaagaggatgtgcgtcgattatcgcgcacttaacgaggtcacaatcaagaataaatatcctttgccgcgaatcgacgatttatttgatcaactgaaaggagctaaagtgttctctaagatagacctgcgatcaggctaccaccagttgagaatccgggaagaggatattccgaagacggccttcaccactcggtacgggctatatgagtgcacggttatgtccttcggacttactaacgcacccgcattcttcatgaatctgatgaacaaagtgttcatggaatttctggacaagtttgttgtggtattcatcgacgacattcttatctattcaaagtccgaggaagaacatgaacaacatctccgtctagtactcgagaagttgaaggagcaccagctatacgccaagttcagcaagtgtgacttctggttgacggaagtcaaatttctgggccatgtcattacagctcagggtgtagcagttgatccatcgaacgtggagtcagttaccaagtggaccccaccgaagacagtgtcgcagattcgaagttttctaggactggctggttattaccgtcgtttcatcgaaaacttctcaagaatcgcccgacccatgactcagttgcttaagaaagacgagaagtttaaatggacagctgagtgcgacaagagctttgaggagctcaaaaggaaattagtatccgcaccggttttgatcctgcccgaccagacgaaagacttccaagtctattgcgatgcatcccgtcacggacttggatgtgtcctaatgcaagagggcagagtggttgcatatgcctcgcggcagttgcgtccacacgaaggaaattatccaactcatgacttggaattggcagcagtggtccatgctttgaagatctggaggcactatctgatcggcaaccgctgcgaagtatatacggaccataagagtctgaaatacatcttcacccaaccagacctaaaccttcgacaacgaagatggttggaactaatcaaagactatgacatgagtattcactaccacccgggtaaagccaatgtggtggcagacgctttaagccggaaaagttactgcactgctctatgcatcgagggcatgtgtgaggaattgcggcaggagtttgagcatctcaacgtgggaattgttgaacacgggttcgtagccgctctggaggcacggcctacgctcgtggatcaagttagagccgctcaagtaaatgatccggaaatagcagaactgaaaaagaacatgagagtcggaaaggctcgggatttccttgaggatgagcatggcacaatctggatgggagaaagattgtgtgtaccggacgacaaggaattgaaggatctgatactcaccgaagctcatcagaccccgtactccattcatccaggcagcactaaaatgtatcaagacctcaaagagaagttttggtgggtcagcatgaggagagaaatagctgaattcgtcgcactctgcaatgtttgccagcgagtgaaagcagagcaccaaagaccagcaggtttactccaacctcttcaaatcccggaatggaaatgggaggagattggaatggactttataacaggactgccccggacatcatcgggacatgattcaatctgggtagtcgtggatcgactcaccaaggtggctcactttataccagtacataccacctatacgggaaagagattggcagaattgtacctcgcaaggatcatgtgtttgcatggggtacccaagaagatagtatccgaccgaggtagtcagttcacctcaaagttctggcagaagctgcaggaagaattggggacccgtttgaatttcagcacggcctatcacccgcaaactgatggtcagaccgagcgagtcaatcaaatcctggaagatatgttaagagcttgcgctcttgattttggtggagcttgggacaaaagcttaccatatgcggaattctcgtacaacaacagctaccaggccagtctacagatggcaccgtttgaagctctatacggccggaagtgccgcacacctctcttctgggatcagacaggcgaacgtcaactgttcggaacagaagtattagcggaagcagaagagaaagtcagaatcatcagggagagattgaggattgctcagtctcgacagaagagctacgcggataaccgtcgaagggagctaacttttgaggccggagactacgtgtatcttcgtgtcactccgctccggggagtacaccgtttccagacgaaaggcaagttggcaccacgcttcgtgggaccatacaaaattttggaacgaaggggagaagttgcttatcagctagaacttccatccaatatgatcggcatccatgacgtgttccacgtttcccagttaaagaagtgcttaagggtacccgaagaacaggctgattcggaacacattgatatccaggaagacctgacatatgtggagaagccggttcgcatacttgataccagtgaaaggagaaccagaaacaaggtcacccggttttgccgagttcaatggagtcatcattcggaagaggaagcaacctgggaaagggaagatgagttgaaagccgcccatccgcacctcttcaccagctcctccgaatctcggggccgagattccgtttaa

SEQ ID NO: 13844 - DNA, 3579 bp, Oryza sativa
  Clone ID: TFbOSC401235j.C1.o16.fg
atgggttgcaagatggccggtcacccacccaaccaccgcggagaaggcatgatcgactttgtggcagagttggcacgcatgacactggtggtaggctaccccaacgcgccagagtacacgacgattccaccgctcagtggcgagcttcctcaccgtgttcgcttggaggtccacggctacgtgggtacttgcctagctaacatggtggtcgaggcagctggaggcacagcagatcacgcctgtcaggaggcagcatacctgatgatggccagactacgagagcgccacaactacatcttccacgacacggcataccggtttcaccctcgtcgagccagcaatgatgatgtcagttccttccgtccgacagctggcgagaacgacaccacctttggtcacatgtgtgctgtgatgaggggattggacaggatgcactcggacctgcacaaggcgaccaaggccttgaacgatgggaagctcatgaggatcgtcgctctgaaggacgagataacgcgcctgaagagggagaacgcccagttaaagggtcttcccgcgccaggaggagtctggatccgcactacgccccgcaagactacgacggcacccgtgcgcatccagcttgcgcccaggaacccacctccatcagcagctcccgcagcacctccagttccacccacagttcctgcagctccagctccagctcccgcgtccgctctctccttcgctccagcatcagccgccagaggtccagccagtggcaccggaggttgtttgtttgggatggtctacaccaggaatggtagccgcgcaacaggcgagggcagcaacggcgaagagcgcactgatggggcgcacccccacagcgattctggcaatggtccgccaccacttcccgagaatccgacccttgcccaagttatggcacatcagactcagatgatggcagccatgatgcagcagatgcagcagcagcaccagcagatgcaccagaggatgatgcagcacgtcgaacagcagcaccagcactttggtccccctccccctcagtccaagttgcctgagttcttacgtgtcaggccacccaccttctccagcaccaccaaccctatggaggcgaatgactggctccatgcaatagagaagaagctgaatctcctgcagtgcaatgatcaggagaaggtcgcttttgccacacaccagcttcaaggtcctgcgtcggcttggtgggacaaccacatggccacccgcccaccgggtactgaagtcacatgggcagagttctgccgtagcttcaggaaggcacaggtgccagatggggtcgtggcacaaaagaagagggaatttcgcgcactccatcagggcaacaggactgtgacagagtacctccacgagttcaatcgcctcacgcgatatgcaccagaggatgtccgtaccgacgccgagaagcaggagaagttcatggcgggtctggatgacgagctgaccaaccaactgatatctggggactacgccgactttgagaggctagtcgacaaggcaattcgtcaggaggatcaacgcaacaagatggataggaagaggaaggccacacagttcagggcacctcagggaagtcaccagaggccgcgcttcactcccggacagcagggtggacctaccaccatgatcgtccgccagtaccgcccgttcaatcctagcaactttccccagggctctagtggcagtcagaaccaccatggaggtcaatccaaccgcggtgcagctccacgcccaccaatggcaccggcacagtcaggcccgtccgcgcaagctaagaaggagactggggcaaaaccagggtcctgcttcaactgtggcgagcttggccacttcgctgacaaatgcccgaagcctaggcgtgccgggccaaggtttatccaggctcgtgtcaaccacgcatctgcggaggaggcacaagcagcaccagaggtcgtactgggtacgttccctgttaactcgatccctgcaatagtactttttgattctggtgcgacgcattctttcatttcaaagaaatttgtcgggatgcatgggttaataagagagaaacttagcacaccgatgcgggttcataccccagggaatagctccacttcggttcaattcagcccttctataacaatagaaattcaaagatcaccatttctagccaacctcattcttctcgaatccaaagatctagatgtcattcttgggatggattggctgaccaagttcaagggagtcatcgattgtgcgaatcgcacagtcaccttgaccaacgagaaggggaaaacggtagtgtacaaatcaccagactcaccaaagcaaggagtctccttgaatcagattgaagcggaaatcccagtggacaccgtggagaagaatttgaggaaattggaagacatacccatagtctccgagtacccagaagtgttccccgaagacctcactaccatgccacccaagagagagattgaattccggattgacttggcaccgggaaccgctccaatttacaagagaccgtacagaatggcggccaacgaattagccgaggtcaagaagcaggttgatgagcagctgcagaaagggtacattcgaccaagtacttcaccgtggggtgctccggtcatttttgtggagaaaaaggataagacgaagaggatgtgcgttgattatcgtgcactcaacgaggtcacaatcaagaacaaatatcccttgccgcgaatcgacgatttatttgatcaactgaaaggagctaaagtgttttctaagatagacctgcgatcaggctaccaccagttgagaattcgggaagaggatattccgaagacggccttcaccactcggtacgggctatatgagtgcacggttatgtccttcggacttaccaacgcacccgcattcttcatgaatctgatgaacaaagtgttcatggaatttctggacaagtttgttgtggtgttcatcgacgacattcttatctattcaaagtccgaagaagagcatgaacaacatctccgtctggtactcgagaagttgaaggagcaccagctatacgccaagttcagcaagtgtgacttctggatgacggaagtcaaatttctgggtcatgtcattacagctcagggtgtggcagtcgacccatcgaacgtagagtcagtcaccaagtggaccccaccgaagaccgtgtcacagattcgaagttttctaggactggcaggttattaccgccgattcatcgaaaacttctccagaatcgcccgacccatgactcagttgcttaagaaagatgagaagtttaaatggacagctgagtgcgataagagtttcgaggagctcaagaagaaattagtatccgcactagttttgattctgcctgaccagatgaaagacttccaagtctattgcgatgcatcccgtcacggacttggatgtgtcctaatgcaagagggcagagtggttgcgtatgcctcgcggcagttgcgtccacacgaaggaaattatccaactcatgacttggaattggcagcagtggttcatgctttgaagatctag

SEQ ID NO: 13845 - DNA, 4971 bp, Oryza sativa
  Clone ID: TFbOSC401325j.C1.o17.fg
atgtcgggtcaaacggggaatggcaaggatggtgataagggaggtacgtttccttatgattatctctccacatctatatcttatgtgagcacctatagcggcaaagctccgtacttcaatggtacggactatgccgcttcgaaacataagatgaagatgcatttgaaatctattaaccctttgatttggagaatagtcgaaaaaggctatgttttacagaatcccgaggaacccaccaaggaggacgatgagaacgagcacaagaacgctcaagccgctaatgcaattcttagcgccttgagtggaagcgagttcaaccgtgtggacggcattgagagtgccaaagtgatttgggacacgcttcggaatttgcatgaaggcacggatagtgttcgcgagtccaaggtggagattctcaaggggcaatttgagcgcaagatcgttaatgagatcaagggacttggctccaaggacatgaccgatgaggttgtggtcaagaagatggttcgagcaatcactccaaggaactctaccttggtgaccatcattcgtgagcgtccggactataagactctcacacctcatgacttgctcggacgtatccttgcccataacatgctcgagcaagagtccaaggaggtcatccaatacatcaaccaaacctcaaccacaagcatcaagaaggaagacttggcattgaaggcgaaggaagaagaagaagagagtcgcaagagcaagagcaaggcggagatcgatgatgaagagatggctctcttcgtcaagaagttcggcaagttcatgaagcaaagcggcttcttcaagggaagttcgtccaagcattcctccaacaagtcaagtggaagacgctccgcaagggtgtgctatgtgtgcaaagagcccgggcacttcattacggattgcccccacatcaaggattgcctccacttcaaggaagacaagaagaagcttgagaagaaggagaagcacaagcatagcaagcatgatcgctatggccaagctcaccttgggatgatcttcggctccgactccgagtcaagctcaagtgatgaagaaggagttgccacgttcgccgtcaagccttcatcaccaccgagactcttcaactactcaagtgatgaggatgctcccatttgcctcatggcaaaggagcctaaggtaccctctcccctcaagtcatttaatgttgatcttgttagtgatttggaggaagatgttgaggatgaggttatggatgacgagttgttcaaatccatagccaaggaatccataccacacttgagtgagttgcttaggagaattgagaatcaatatgcaactcttgagaggcaagaggaattgctcattcgtgagaaagagcggtctcatgaactcaagagtgaacttgctaaggagagagagaaaaatgaggctttggtacggctttacaagcaaaccaaagagtctcatgctaatcttgaggtggcgaacgctcaacttcaagagagagtggatgacttggacaaagcttacctctctcttgaagagaagttcgaaaccttaaagaatagtgtctctttccctagcgaggcatcgtgctccaaaattgtcccaagcaatgaaccatgtgtgaggtgcaaagatattgatattgaaacttgtgctactaactctacttctttgagtgctttgcaaaagcaaaacgagaagcttatgggactccttcataatggcttacttaagtgccatatgggtagtaaggccctaaaggagtacctaggctatcaaagggacaacttcaaccatgaaggtcttgggtatgttcctccacctaaaggaagggtggacaagagtgtgatgatcaagaagccccaatgtcttagcaactttgttaaggccaaatgtatccttcctaatgataatgcttctcattgttttgatgcatcttatgttcttaggaagaacgctagtggtcgcgttgttgctaagtatgttggcccaaggggtaaaaatatttctatcaagagagtgctttgggtgcctaaggcacttgttactaacatgagaggacccaagcaagaatatgtctccggtggaagaagttgggtgattgatagtggttgtactaatcatatgaccggagaagaatcaatgttttcatctcttgatccaaatggcacttctcaagagaacatcatctttggggacgatggaaagggaaaggctagcccatgttggtatgaggaatcttcacaaacttctaaagcacgacacatccttggactaacaaatattcaatttgagaaagatagggtgtgtagtgcatgtcaagccgggaaacaaattggagcacatcacccagtcaagaacgtaatgactactacaagaccgttggagcttcttcacatggacctcttcgggccaattgcttatctaagcattggaggtaacaaatatggtcttgttattgttgatgacttttcatgcttcacgtgggtgttcttcttgcatgacaagagtgagacacaagccatcttcaagaagtttgcaagaagagcccaaaacgagttcgacctcaagatcaagaacattcgaagcgacaacgtcaaggaattcaagaacacgtgcatcgagagtttccttgatgaagaaggcatcaagcatgagttctcggctccatactcacctcaacaaaatggagtagccgagaggaagaatcggactctcatcgagattgcgaggacaatgttggacgaatacaagacatcggaccgcttttgggccgaagccgtcaacaccgtatgtcacgacatcaaccgcctctatcttcaccgccttcttaagaagactccctatgagcttcttaccggtaacaaaccaaatgtctcttactttcgtgttttcggtagtaagtgctacattcttaataagaaggctagatcctcaaagtttgctcctaaagtggatggggggttcttgcttggatatgggtcaaatgagtgcgcataccgcgttttcaacaaaacctccggtattgttgagatcgcgcctgatgtgacatttgacgaaactaacggctctcaagtagagcaagttgactcacatgtgttaggtgaagaggaggaccctagagaagcaatcaaaaggttggctcttggagacgtacgtcctagggagccacaacaaggggcctcttcctcaacacaagtggagccacctacatcgacccaagccaatgatccctctacttcaagcttggatcaaggtgaagaaggcgagcaagtgccaccctcttcaataaatctagctcacccaagaatccaccaaagtatccaacgagatcaccccaccgacaacatcttaggagacatcaacaagggagtatccactcgttctcatattgcaaatttttgtgagcattactcgtttgtgtcttctcttgaacctctaagggtggaagaagctcttaatgatccggattgggtgatggcgatgcaagaggagttgaacaatttcaccaggaatgaagtgtggactttggtggagcgatctcggcaaaatgtgattggcacaaagtggatctttcgcaacaagcaagacgaggccggggtcgtgataaggaacaaagcgaggttagtggcgcaagggttcacccaaatcgaaggattagatttcggtgaaacttttgcgccggtagctagacttgagtcaattcgcatattgcttacttttgctactaacctcaattttaagctatatcaaatggatgtcaaaagcgccttcctcaacgggcttatcaacgagttggtatacgtggagcaaccaccgggcttcaaggatccaaaatatcccaaccacgtgtacaagctccacaaggcactctacgagcttaagcaagcccctagagcttggtatgagtgtcttcgaaattttcttgtgaaaaacggctttgagatcgggaaagccgattcaactctttttactaaaagacatgataatgatatttttgtctgccaaatatatgtcgatgacattatatttggttctactaacaagtcttttagtgaagagtttagtaggatgatgaccaagcgttttgagatgtccatgatgggtgaattgaagttcttcctcggccttcaaatcaagcaactcaaggaaggaactttcatttgccaaacaaagtatttaaaggacatgctcaagaagtttggaatggagaatgcgaagccaatccacactcccatgccatcaaatggccacctcgacctcaacgagcaaggtaaagacgtcgaccaaaaggtataccgttccatcattggctcactcctttacctttgtgcatctaggcctgatattatgcttagtgtgtgcatgtgtgcaagatttcaagccgctccgaaggagtgtcaccttgtggccgtgaagagaattcttagatatttagtgcacacacctaatcttggtctttggtatcctaagggagcgaggtttgatctcattggttatgccgatgcggattatgccgggtgcaaagtggataggaaaagcacatcgggtacttgccaattcttgggtaggtcccttgtttcttggtcttccaagaagcaaaactccgtcgccctatccaccgccgaagcggaatacatttcgacggggagttgttgtgctcaacttatttggatgaagcaaaccttgagagactatggcctcaatgtgtccaaaatcccactcctatgtgacaatgagagtgccattaagatagccaataatcccgtccaacattcccgaaccaaacatatagatattcgccaccatttcttgagagatcattccacaagaggcgacatagacatccaacatgtgagaatcgacaaacaattggcggatatcttcaccaagcctctagatgaagctaggttttgtgagttgagaagtgaactaaatatcttggattctcggaatgtggcttga

SEQ ID NO: 13846 - DNA, 4210 bp, Oryza sativa
  Clone ID: TFbOSC401394j.C1.o1.np
atagccggccacccacccaaccaccacggagaaggcatgattgactttgtggcagagttagcacgtatgacgctggtggtgggctaccccaacgcgccagagtacacaactgttccaccactcagtggcgagcttcctcaccgtgtccgcctagaggtccatggctatgtgggcacctgcctcgctaacatggtggttgaggcgtccggagacacagcagatcacgcttgtcaggaggcagcatacctgatgatggccaaactacgggagcgccacaactacatcttccacgacacggcgtaccgatttcaccctcgtcgagccagcggtgatgatgtcagtactttccgtccgacagccggcgataacgacaccacctttggtcacatgtgtgctgtgatgaggggattggataggatgcactcggatctgcacaaggcgtccaaggccttgaatgatgggaagctcatgaggatcgtcactctgaaggacaagatagcgcgcctgaagagggagaatgctcagttaaagggtcttcccgcgccaggaggagtccggatccgcactacgccccgcaagtcgacaacgacacccgtgtgcatccagcttgcgcccaggaacccacctccatcagcagctcccgcagcacctccagttccgcccacagctccagcagttcctgcagctccagcaccagctccagctctcgttcccgtgtcagctcctgcatccgctctctccttcgcgcctgcattagccgtcagggtccccgccagtggcaatggaggttggttgccagctactcccagtggcagtcgcgacctcagcagcagcagctccagtggctcagagccgggcagcggcgagacttatctgccaggctctaggagtcgctcagagggacctggtcttttcctccagatggtctacaccaggaatggtagccgcacaaccggcgagggcagcaacggcgaagagcgcgctgatggtgtgcatcccaacagtgattctggcaatggtccgccaccacttcctgagaatccgacgctagcccaagtgatggcacatcagacgcagatgatggcagccatgatgcagcagatgcagcaccagcaccagcagatgcaccaaaggatgctgcagcacgccgaacagcagcaccagcagtttggtccccctccctctcagtccaagttgccagagtttctacgcgttagaccacccactttctccagcaccaccaaccccatggaggcgaatgactggctccatgccatagagaagaagctaaatctcctgcagtgcaatgatcaggagaaggtcgctttcgccacacaccagcttcaaggtcctgcgtcagcttggtgggacaatcacatggccacccgcccgccaggcactgaagtcacttgggcggagttctgtcgtagcttcaggaaggcgtaggtgccagacggggtcgtggcacaaaagaagagggaattccaggcactccatcagggcaacaggacagtgaccgagtacctccatgagttccatcgcctcgcgcgatatgcaccggaggatgtccgcactgacgccgagaagcaggaaaagttcatggcaggtctggatgacgagctgaccaaccaactgatatctggggactacgcggattttgaaaggctggtggacaaggcaatccgtcaggaggatcagcaaaacaagatggacgggaagagaaaggcggcacagttccggtccaaccaaggaaaccatcagcgactgcgcttcgctcccgggcagcagggtggacctaccaccatgatcatctgccagtaccgcccgttcaactctagcaacttccaccagggcgccagtggcagtcaaaaccaccatggaggtcagcccaaccgcggtgcagctccacgcccaccagtggcaccggcacagtcaggcccgtccgcgcaagccaagaaggagactggaacaaaaccagggtcctgcttcaactgtggcgagcttggccacttcgctgacaaatgcccgaagcctaggcgtgccgggccaaggattgtccaggctcgtgtcaaccacgcatctgcggaggaggcacaagcagcaccagaggtcgtactgggtacatttcttgttagctcaatccctgcaacagtactttttgattccggtgcaacgcattctttcatttcaaagaaatttgtggggatgcatgggttaaggaaagaagagcttaatacaccaatgagggttcataccctgggaaatagttcaacctcggtcagttttagcccttcagtgctaatagaaatccaaagatcaccatttctagccaacctcattcttcttgaatccaaagacctagatgtcattcttgggatggattggctgaccaagttcaagggagtcattgattgtgcgaatcgcacagtcaccttgaccaacaagaagggagaaaccgtagtgtacaaatcactagtctcaccaaagcaacgggtctccttgaatcagattgaggcggaaatcccagtggtcaccgaggagaagaatccgaggaaattggaagagattcccatagtttgcgagtacccagaagtctttcccgaagacctcactaccatgccacccaagcgagagattgaattccgaattgatttggcaccgggaaccgcgccaatttacaagagaccgtacaggatggcggccaacgaactagcagaggtcaagaagcaggttgatgagcagctgcagaaagggtacattcgaccaagtactttaccttagggtgctccggtcatttttgtggagaagaaggataagacgaagaggaggcgttgattatcgcgcactcaacgaggtcacaatcaagaacaaatatcctttgccgcgaattgatgatttgtttgatcaactgaaaggagctaaagtgttttctaagatagacctgcgatcaggctaccaccagttgagaattcgggaagaggatattccaaagacggccttcaccactcggtacgggctgtatgagtgcacggtcatgtctttcggacttaccaacgcacccgcattcttcatgaatctgataaacaaagtgttcatggaatttctggacaagtttgttgtcgttttcatcgacgacatacttatctattcaaagtctgaagaagaacatgagcaacatctccgtctggtactcgaggagttgaaggagcaccagttatacgccaagttcagcaagtgtgacttttggttgtctgaagtcaaatttctgggtcacgtcattacagctcagggcgtggcagttgatccatcgaacgtggagtcagttaccaaatggaccccacctaagacctgtcgcagattcgaagttttcttgaacttgcaggttattaacgccgattcatcgaaaacttctccaggatcgctcgacccatgactcagttgcttaagaaagatgagaagtttaaatggacagctgagtgcgataagagttttgaggagctcaaaaagaaattagtatccgcaccagttttgattctgcccgaccagatgaaagacttccaagtctactgcgatgcatcccgccacggacttggatgtgtcctaatgcaagagggaagagtggttgcgtatgcctcgcggcagttgtgtccacacgaagggaattatccaactcatgacctagaattggcagcagtggttcatgctttgaagatctggaggcactatctgattggcaaccgctgtgaagtatatacggatcacaagagtctgaaatacatcttcacccaaccggacctaaatctccgacaacaaaaatggttggaattaatcaaagactatgatatgagcattcactaccaccaggggaaagccaatgtggtggcagacgcattaagcaggaagagttactacactgccctatgcatcgagggcatgtgtgaggaattgcggcaggagtttgagcatctcaacgtggcaattgttgaacacgggttcgtagccgttctggaggcacggcctacgctcgtggatcaagtcagagcagctcaagtaaatgatcctgaaatagcagagctgaaaaagaacatgagagtcggaaaagcccgggatttccatgaagatgaacacggcacaatctggttgggcctggttgcttgccttctctctgattctgccttatgtttgaagtaacttactctcccttactcta

SEQ ID NO: 13847 - DNA, 3474 bp, Oryza sativa
  Clone ID: TFbOSC401435j.C1.o23.gm
atggtctacaccaggaatggtagccgcgcaacaggcgagggcaacaacggcgaagagcgcactgagggtgtgcatcccaacagcaattccggcaatggtccgccaccacttcccgagaatccgacgctagcccaagtgatggcacatcagactcagatgatggcagccatgatgcagcagatgcagcagcagcaccagcagatgcaccagcggatgctgcagcacgctgaacagcagcatcagctgtttggtccccctccccctcagtccaagttgccagagtttctacgtgtcaggccacccaccttctccagcaccaccaaccctatggaggcgaatgactggctccatgccatagagaagaagctgaatctcctgcagtgcaatgatcaggagaaggttgctttcgccacacaccagcttcaaggtcctgcgtcagcttggtgggacaatcacatggccacccgcccgccaggcactgaaggtaacatgactgtgacggagtatctccatgagttcaatcgcctcgcgcgatatgcaccggaggatgtccgtactgacgccgagaagcaggaaaaattcctagcaggtctggatgatgagctaaccaaccagttgatatctggagattacgccaatttcgaaaggctggtggacaaggcaatccgtcaggaggatcaacgcaacaagatggacaggaagaggaaggccgctcagttcagggcacctcagggaagtcaccagaggccgcgcttcgctcccgggcagcagggtggacctaccaccatgatcgtccgccagtaccgcccgttcaaccctagcaattttccccagggcgccagtggcagtcagaaccaccatggaggtcagcccaaccgcggtgcagctccacgcccaccaacggcaccggcacagtcaggcctgtccgcgcaagccaagaaggagactggagcaaaaccagggtcctgcttcaactgtggcgagcttggccacttcgctgacaaatgcccgaagcctaggcgtgccgggccaaggtttatccaggctcgtgtcaaccacgcatctgcggaggaggcacaagcagcaccagaggttgtactggtcaccttgaccaacgagaagggagaaacagtagtgtacaaatcaccagactcaccaaagcaaggggtctccttgaatcagattgaagcggaaatcccagtggtcaccgtggaaaagaatttgaggaaattggaagatatccccatagtctgcgagtatccagaagtgttccccgaagacctcactaccatgccacccaagagagagattgaattccggattgacttggcaccgggaaccgctccaatttacaagagaccgtacagaatggcggccaacgaactagcagaggtcaagaagcaggttgatgagcagctgcagaaagggtacattcgaccaagtacttcaccttggggtgctccggtcatttttgtggagaaaaaggataagacgaagaggatgtgcgttgattatcgcgcactcaacgaagtcacaatcaagaacaaatatcctttgccgcgaatcgatgatttgtttgatcaactgaaaggagctaaagtgttttctaagatagacctgcgatcaggctaccaccagttgagaattcgggaagaggatattccaaagacggccttcaccactcggtacgggctatatgagtgcacggttatgtctttcggacttaccaacgcacctgcatttttcatgaatctgatgaacaaagtgttcatggaatttctggacaagtttgttgtggtattcatcgacgacatacttatctattcaaagtccgaagaagaacatgagcaacatctccgtctggtactcgagaagttgaaggagcaccagctatatgctaagttcagcaagtgtgacttctggttgacggaagtcaagtttctggggcatgtcattacagctcagggtgtggcagttgatccatcgaacgtggagtcagttaccaaatggaccccacctaagaccatgtcgcagattcggagttttcttggacttgcgggttattaccgccgattcattgaaaacttctccaggatcgcccgtcctatgactcagttgcttaagaaagatgagaagtttaaatggacagctgagtgcgataagagttttgaggagctcaagaagaaattagtatccgcaccagttttgattctgcccgaccagatgaaagacttccaagtctattgcgatgcatcccgtcacggacttggatgtgtcctgatgcaagagggcagagtggttgcgtatgcctcgcggcagttgcgtccacacgaagggaattatccaacccatgacctggaattggcagcagtggttcatgctttgaagatctggaggcactatctgattggcaaccgctgcgaagtatatacggaccataagagtttgaaatacatcttcacccaaccggacctaaatctccgacaacgaagatggttggaactaatcaaagactatgacatgaacattcactaccacccgggtaaagccaatgtggtggcagatgcattaagcaggaaaagttactgcactgccctatgcatcgagggcatgtgtgagaaattgcagcaggagttggagcgtctcaacgtgggaattgttgaacacgggttcgtagccgctctggaagcacggcctacgctcgtcgatcaagttagagccgctcaagtgaatgatgccgaaatagcagagctgaaaaagaacatgagagtcggaaaggctcgggatttccttgaggatgaacacggcacaatctggttgggagaaagattgtgtgtacctgacgacaaggaactgaaggatctgatactcaccgaggctcatcagacccagtactccattcatccaggcagcaccaaaatggaaaggttgaggattgcccagtctcgacagaagagctacgcggacaaccgccgaagggagctcacttttgaagcaggggattacgtgccgaggcccagccaggccgccccttcctccctctcccgagccactgaccggtggggcccgtttgccggcgccgcgccccgccttgatgacgtcgtcctcgcgacgcgctgccaccatcggtggccgtccgaccgggtcgctgccgccgcgctccgcgctccgtgcccgcgccgttgccggtggtgccgggcagacggttgccgcctcccccttgccgcgccgcgccgctgctctcgcgtgcgccgctttcgcccgcgggagctgtcgccggccgtcgccgcgggtggccgcgccgccgcgcgccgtcgtttggccagccgactttgtgccgtgctgtgccccagccgcgccgcccctggcagcctgatcggcttgggccgatccggaccgtcggttcccgtggaccggcggtggaccgcctcggtggtcccggtccacggtggaccggcgcccttgtgccgctga

SEQ ID NO: 13848 - DNA, 5265 bp, Oryza sativa
  Clone ID: TFbOSC401567j.C1.o10.np
atggccggccacccacccaaccaccgcggagaaggcatgattgactttgtggcagagttggcacgtatgacgctggtggtgggctaccccaacgcgccagagtacacgactgttccaccgctcagtggcgagcttcctcaccgtgttcgcctggaggttcacggctacgtgggtacctgcctagctaatatggtggttgaggcatccggaggcacagcagatcacgcctgtcaggaggcagcatacctgatgatggccagactacgggagcgccacaactacatcttccacgacacggcgtaccgatttcaccctcgtcgagccagcggtgatgatgtcagtactttccgtccgacagccggcgagaacgacactacctttggtcacatgtgtgctgtgatgaggggattggataggatgcactcagacttgcacaaggcgtccaaggccttgaatgatgggaagctcatgaggatcgtcgctctgaaggacgagatagcgcgcctgaagagggataatgctcagttaaagggtcttcccgcgccaggaggagtccggatccgcactacgccccacaagaccacgactgcacccgtgcgcatccagcttgcgcccaagaacccacctccatcagcagctcccgcagcacctccagttccgctcgcagctccggtagttcctgcagctccagtaccagctctagctcccgttcacgtgtcagctcccgcgtctgctctctccttcgctccagcatcagccgctaggggtccagccagtggcaacggaggttggttgtctgctactcccagtggcagctgcgatctcagcagcagtagatccagtggctcagagctgggcagcggcgagacttatctgccaggctccaggagtcgctcagagggacctggtcttttcctccagatggtctacaccaggaatggtagccgcgcaacaggtgagggcagcaacggcgaagagcgcactgagggtgtgcatcccaacagcaattccggcaatggtccgccaccacttcccgagaatccgacgctagcccaagtgatggcacatcagacttagatgatggcagccatgatgcagcagatgcagcagcaacaccagcagatgcaccagcggatgctgcagcacgccgaacagcagcatcagtagtttggtccccctccccctcagtccaagttgctagagtttctacgtgtcaggccacccaccttctccagcaccaccaaccctatggaggcgaatgactggctccatgccatagagaagaagctgaatctcctgcagtgcaatgatcaggagaaggttgctttcgccacacaccagcttcaaggtcctgcgtcagcttggtgggacaatcacatggccacccgcccgccaggcactgaagtcacttgggaagagttctgtcgtagcttcaggaaggcgcaggtggcagatggggtcgtggcacaaaagaagagggaattccgggcactccattagggcaacagaactgtgacggagtatctccatgagttcaatcacctcgcgcgatatgcaccggaggatgtccgcactgacgccgagaagcaggaaaaattcctagcaggtctggatgatgagctaaccaaccagttgatatctggagattacgccgatttcgaaaggctggtggacaaggcaatccgtcaggatgatcaacgcaacaagatggacaggaagaggaaggccgctcagttcagggcacctcagggaagtcaccagaggccgcgcttcgctcccgggcagcagggtggacctaccaccatgatcgtccgccagtaccgcccgttcaaccctagcaactttccccagggcgccagtggcagtcagaaccaccatggaggtcagcccaaccgcggtgcagctccacgcccaccaacggcaccggcacagtcaggcccgtccgcgcaagccaagagggagactggagcaaaaccagggtcctgcttcaactgtggcgagcttggccacttcgctgacaaatgcccgaagcctaggcgtgccgggccaaggtttatccaggctcgtgtcaaccacgcatctgcggaggaggcacaagcagcaccagaggtcgtactgggtacgtttcctgttaactcaatccctgcaacaatactttttgattctggtgcaacacattcgttcatttcaaagaagtttgtcgggatgcatgggttaaggaaagaagagcttagcacaccaatgagggttcatacctcgggaaatagctcaacctcagtcagttttagcccttcagtgctaatagaaatccaaagatcaccatttctagccaacctcattcttctcgaatccaaagacctagatgtcattcttgggatggattggctgaccaagtttaagggagtcatcgattgtgcgaatcgcacagtcaccttgaccaacgagaagggagaaacagcagtgtacaaatcaccagactcaccaaagcaaggggtctctttgaatcagattgaggcggaaatcccagtggacaccgtgaagaagaatttgaggaaattggaagatatacccatagtctgcgagtatccagaagtgttccccgaagaccttactaccatgccacccaagagagagattgaattccggattgacttggcaccgggaaccgctccaatttacaagagaccgtacagaatggcggccaacgaactagcagaggtcaagaagcaggttgatgagcagctgcagaaagggtacattcgaccaagtacttcaccttggggtgctccggtcatttttgtggagaaaaaggataagacgaagaggatgtgcgttgattatcgcgcactcaacgaggtcacaatcaagaacaaatatcctttgccgcgaatcgatgatttgtttgatcaactgaaaggagctaaagtgttttctaagatagacctgcgatcaggctaccaccagttgagaattcgggaagaggatattccaaagacggccttcaccactcggtacgggctatatgagtgcacggttatgtctttcggacttaccaacgcacccgcattcttcatgaatctgatgaacaaagtgttcatggaatttctggacaagtttgttgtggtattcatcgacgacatacttatctattcaaagtccgaagaagaacatgagcaacatctccgtctggtactcgagaagttgaaggagcaccagctatacgccaagttcagcaagtgtgacttctggttgacggaagtcaaatttctgggccatgtcattacagctcagggtgtggcagttgatccatcgaacgtagagtcagttaccaaatggatcccaccgaagaccgtgtcgcagattcgaagttttctaggactggcaggttattaccgccgattcatcgaaaacttctccaggatcgcccgacccatgactcagttgcttaagaaagatgagaagtttaaatggacagctgagtgcgataagagttttgaggagctcaagaagaaattagtatccgcaccagttttgattctgcccgaccagatgaaagacttccaagtctattgcgatgcatcccgtcacggacttggatgtgtcctaatgcaagagggcagagtggttgcgtatgcctcgcggcagttgcgtccacacgaagggaattatccaactcatgacctggaattggcagcagtggttcatgctttgaaaatctggaggcactatctgattggcaaccgctgcgaagtatatacagaccataagagtctgaaatacatcttcacccaaccggacctaaatctccgacaacgaagatggttggaactaatcaaagactatgacatgagcattcactaccacccgggtaaagccaatgtggtggcagacgcattaagcaggaaaagttactgcactgccctatgcatcgagggcatgtgtgaggaattgcggcaggagtttgagcatctcaacgtgggaattgttgaacacgggttcgtagccgctctggaggcacggcctacgctcgtggatcaagtcagagcagttcaagtaaatgattctgaaatagcagagctgaaaaagaacatgagagtcggaaaaacccgggatttccacgaagatgaacacggcacaatctggttgggagaaagattgtgtgtacctgacgacaaggaactgaaggatctgatactcaccgaggctcatcagacccagtactccattcatccaggcagcaccaaaatgtatcaagacctcaaagaaaagttttggtgggtcagcatgaggagagaaaagctgaattcgtcgcactctgcgatgtttgtcaacgagtgaaggcagagcaccaaagaccagcaggtttactccaacctcttcaaatcccagaatggaaatgggaggagattggaatggactttataatagcactgccccggacatcatcgggtcacgattcaatctgggtagtcgtggatcgactcactaaggttgctcacttcataccagtacataccacgtatacgggcaaaaggttggcggagctctacctctcgagaatcatgtgtctacatggagtacccaaaaagattgtatctgatcgagggagtcagttcacctcaaaattctggcagaagctgcaggaagaattggggacccgtttaaatttcagcacggcctatcacccacaaactgatggtcagaccgagcgagtcaatcaaatcttggaagatatgttgagagcttgcgctcttgattttggtggagcttgggacaaaaacttgccatatgcggaattctcgtacaacaacagctaccaggccagtctacagatggcaccgtttgaagctttatacggccggaagtgccgcacacctctcttctgggatcagacaggcaagcgtcaactgttcgggacagaggtattagcggaagcagaagagaaagtcagaatcatcagggaaaggttgaggattgcccaatcttgacagaagagctacgcggataaccgccgaagggagctcacttttgaggcaggggattacgtgtatcttcgtgtcactccgctccggggagtacaccgttttcagacgaaaggcaagttggcaccacgcttcgtgggaccctacaaaatcttggaacgaaggggagaagttgcttatcagttagaacttccatccaatatgatcggcatccatgacgtgttccacgtgtcccaattatttagcaaattacgagttgacaaatatcagcaagactttattc

SEQ ID NO: 13849 - DNA, 4611 bp, Oryza sativa
  Clone ID: TFbOSC401630j.C1.o1.fg
atggccggtcacccacccaaccaccgcggagaaggcatgatcgatttcgtggcagagttggcacgtatgacactggtggtgggctaccccaatgcgccggagtacacgacgattccgctgcttagtggcgagcttcctcaccgtgtccgcttggaggtccatggctacgtggggacttgcctcgctaacatggcggtcgaggcatctggaggcacagcagatcacgcctgtcaggaggcagcctacttgatgatggccagactacgggagcgccacaactacatcttccacgacacggcgtaccgctaccacccccgtcgagccaacggtgatggcgtcagctccttccgtccgacagctggcgagaacgacaccacctttggtcacatgtgtgctgtgatgaggggattggacaggatgcactcggacttgcacaaggcgaccaaggctttgaacgatgggaagctcatgaggatcgtcgctctgaaggacgagatagcgcgcctgaagaaggagaacgctcagctaaagggtcttccagcgccagaaggagtccggatccgcaccacgccccgcaagacgacgactgcacctgtgcgcatccagcttgcgcccaggaacccacctccagcagcagctcccgcagcacctccagttccgcccgcagttcctgcagctccagttccagctcccgcgttcactctctccttcgctccagcatcagccgccaggggtccagccagtggcaccggaggttgcttgtttgggatggtctacaccaggactggcagtcgcgcgacaggcgagggcagcaacggcgaagagcgcactgatggtgtgcaccccaacagcgattctggcaatggtccgccaccacttcccgagaatccgacgcttgcccaagttatggcacatcagactcagatgatggcagccatgatgcagcagatgcagcagcagcaccagcagatgcaccagaggatgatgcagcacgccgaacagcagcatcaacagtttggtccccctccccctcagtccaagttgccagagtttctacgcgtcaggccacccaccttctccagcaccaccaaccctatggaggcgaacgactggctccatgcaatagagaagaagctgaatctcctgcagtgtaatgatcaggagaaggtcgcttttgccacacaccagcttcagggtcccgcgtcagcttggtgggacaaccacatggccacccgcccaccgggtactgaagtcacatgggcagagttctgccgtagcttcaggaaggcacaggtgccagatggggtcgtggcacaaaagaagagggaatttcgtgcactccatcagggcaataggactgtgacagagtacctccatgagttcaatcgcctcgcgcgatatgcaccagaggatgtccgcaccgacgccgagaagcaggagaagttcatggcgggtctggatgacgagctgaccaaccaactgatatctggggactacgccgactttgagaggctggttgacaaggcaatccgtcaggaggaccaacgcaacaagatggacaggaagaggaaggccgctcagttcagggcacatcagggaagtcaccagaggccgcgcttcactcccggacagcagggtggacctaccaccatgatcgtccgccagcaccgcccgttcaaccctagcaacttccaccagggcaccagtggcagtcagaaccaccatggaggtcagcccaaccgcggtgcagctccacgcccatcagtggcaccggcacagtcaggccagcccgcgcaagccaagaaggagactggagcaaaaccagggtcctgcttcaactgtggcgagcttggccacttcgctgacaaatgcccgaagcccaggcgtgccgggccaaggtttatccaggctcgtgtcaaccacgcatctgcgcaggaggcacaaacagcaccggaggtcgtactgggtacgttccctgttaactcaatccctgcaacagtactttttgattctggtgcaacacattctttcatctcaaagaaatttgtcgggatgcatgggttaataagagaggaacttagcacaccgatgcgggttcataccccagggaatagctccacttcggttcaattcagcccttctataacaatagaaattcaaaggtcaccatttctagccaacctcattcttctcgaatccaaagacctagatgtcattcttgggatggattggctgaccaagtttaagggagtcatcgattgtgcgagtcgcacagtcaccttgaccaacgagaagggagaaaccgtggtgtacaaatctctagtctcgccaaagaaaggggtctcgttgaatcagattgagacggaaatcccagtggacaccgtagagaagaacttgagaaaattggaagatatacccatagtctgcgagtatccagaagtgttccccgaagacctcactaccatgccacccaagagagagattgaattccggattgacttggcaccgggaactgctccaatctataagagaccgtacagaatggcggccaacgaattagcagaggtcaagaagcaagttgatgagcagctgcagaaagggtacatacgaccaagcacttcaccttggggcgctccggtcatttttgtggagaaaaaggataagacgaagaggatgtgcgtcgattatcgcgcacttaacgaggtcacaatcaagaataaatatcctttcccgcgaatcgacgatttatttgatcaactgaaaggaactaaagtgttttctaagatagacctgcgatcaggctaccaccagttgaagaatccggaaagaggatattccgaagacggccttcaccactcgtttgttgtggtgttcatcgacgacatacttatctactcaaaatccgaggaagaacatgagcaacatctccgtctggtactcgaaaagttgaaggagcaccagctatacgccaagttcagcaagtgtgacttctggttgacggaagtcaaatttctgggccatgtcattacagctcagggtgtggcagttgatccatcgaacgtggagtcagttaccaaatggaccccacctaagaccgtgtcgcagattcgaagtttccttggacttgcgggttattaccgccgattcatcgaaaatttctccaggatcgcccgacccatgactcagttgcttaagaaggatgagaagtttaaatggacagctgagtgcgataagagctttgaggagctcaagaagaaattagtatccgcaccggttttgatcctgcccgaccagatgaaagacttccaggtctattgcgatgcatcccgtcacggacttggatgtgtcctaatgcaagagggcagagtggttgcatatgcctcgcggcagttgcgtccacacgaaggaaattatccaactcatgacttggaattggcagcagtggttcatgctttgaagatctggaggcactatctgattggcaaccgctgcgaagtatatacggaccataagagtctgaaatacatcttcacccaaccggatctaaaccttcgacaacgaagatggttggaactaatcaaagactatgacatgagtattcactaccacccgggtaaagccaatgtggtggcagacgctttaagccggaaaagttactgcactgccctatgcatcgagggcatgtgtgaggaattgcggcaggagtttgaacatctcaacatgggaattgttgaacacgggttcgtagccgctctggaggcacggcctacgctcgtggatcaagttagagccgctcaagtaaatgatccggaaatagcagagctgaaaaagaacatgagagtcggaaaggctcgggatttctttgaggatgagcatggcacaatctggatgggagaaagattgtgtgtacctgacgacaaggaactgaaggatctgatactcaccgaggctcatcagacccagtactccattcatccaggcagcactaaaatgtatcaagacctcaaagaaaggttttggtgggtcagcatgaggagagaaatagctgaattcgtcgcactctgcgatgtttgccaacgagtgaaagcagagcaccaaagaccagcaggtttactccaacctcttcaaatcccggaatggaaatggaaggagattggaatggactttataacaggactgccccggacatcatcgggtcacgattcaatctgggtagtcgtggatcgactcactaaggttgctcactttatactagtacataccacctatacgggaaagagattggcagaattgtacctcgcaaggatcatgtgtttgcatggggtacccatgaagatactatccgaccgaggtagtcagttcacctcaaagttttggcagaaactgcaggaagaattggggacccgtttaaacttcagcacggcctatcacccgcaaactgatggtcagaccgagcgagtccatcaattcttggaggatatgttgagagcttgcgctcttgattatgatggagcttgggacaaacgcttgccatatgcggaattctcttacaacaacagctaccaggccaatctgcagatggcactgtgtcgcgtcccaaatcgactctaa

SEQ ID NO: 13850 - DNA, 3663 bp, Oryza sativa
  Clone ID: TFbOSC401655j.C1.o2.fg
atggtctacaccaggaatggcacccgcaccacgggcgagggcagcaacggcgaagagcgcactgatggtgtgcatcccaatagtgattccggcaatggtccgccaccactccccgagaatccgacccttgcccaagtaatggctcatcagacgcagatgatgacagccatgatgcagcaaatgcaacagcagcaccaacagatgtaccagaggatgcagcagcaagccgagcagcaccagcagcagtttggcccccctccccctcagtccaaactgccagagtttctacgcgtcaggccacccaccttttctagcaccaccaaccctatgaaggcaaatgattggctccatgccatagagaagaagctcaatctcctgcagtgcaatgatcaggagaaggtcgccttcgccacacaccagctccaaggtcccgcgtcagcttggtgggacaatcacatgactacccgcccgccaggcactgaagtcacttgggcagagttctgccgcaacttcaggaaggcgcaggtgctagatggggtcgtggcacaaaagaagagggaattccgagcactccaccagggcaacaggacagtgacggagtatctccatgagttcgatcgcctcgcgcgatatgcaccggaggatgtccgtactgacgccaagaagcaggagaaattcctagcaggtctggatgatgagctaaccaaccagttgatatccggagattacgccgactttgagaggctggttgacaaggcaatccgtcaggaggatcagcacaacaaaatggataggaagaggaaggcggcgcagttccggtccaaccaagcaagccaccagcgaccgcgcttcattcccagacagcagggtgaacctaccaccatgatcgtccgccagcaccgccctttcaactcaagcaacttccaccagggcgctagtggcagccagaaccaccgtggaggtcagcccaaccgcagtgcaactccgcgcccaccaatggcaccagcacagtcagctccgtctgtgcaagccaagaaggagaccggagcaaagccagggtcctgcttcaactgtggtgagcttggccacttcgctgacaaatgcccgaagcctaggcgtgctgggccaaggtttgtccaggcccgtgtcaaccacgcgtctacagaggaggcacaagcagcaccagaggtcgtactgggtacgtttcctgttaattcaatccctgcaacagtactttttgattctggtgcaatgcattcgttcatttacaagaagtttgtcgggatgcatgggttaataagagaggaacttagcacaccaatgcgggttcataccccagggaatagctccacttcggtacaattcagcccttctgtaacaatagaaatccaaagatcaccatttctagccaacctcattcttctggaatccaaagacctagatgtcattcttgggatggattggctgaccaagttcaagggagtcattgattgtgcgaattgcacagtcaccttgatcaatgagaagggagaaacagtagtgtacaaatcactagtctcaccaaaacaaggggtctctttgaatcagattgaggtggagatcccagtggtcaccgaggagaagaattcgaggaaattggaagagattcccatagtctgcgagtacccagaagtgtttcccgaagacctcactaccatgccacccaagagagagattgaattccggattgatttggcaccgggaaccgctccaatttacaagagaccgtacaggatggcagccaacgaactagcagaggtcaagaagcaggttgatgagcagctgcagaaagggtacattcgaccaagtacttcaccttggggtgcaccggtcatttttgtggagaaaaaggataagacgaagaggatgtgcgtcgactatcgcgcactcaatgaggtcacaatcaagaacaaatatcctttaccgcggatcgatgatttgtttgatcaactgaagggagctaaagtgttttctaagatagacctacgatcaggctaccaccagttgagaattcgggaagaggatattccaaagacggccttcaccactcagtatgggttgtatgagtgcacggttatgtctttcggacttaccaatgcacccgcattcttcatgaacttgatgaacaaagtgttcatggaatttctggataagtttgtggtggtattcattgacgacatactcatctattccaaattggaagaagaacatgagcaacatctccgtctggtactcgagaaattgaaggagcaccagttgtatgccaagttcagcaagtgtgacttctggttgtcggaagtcaaatttctgggtcacattattacagctcaaggcgtggcagttgattcatcgaacgtggagtcagttaccaaatggaccccacctaagaccgtgtcgcagattcggagttttcttggacttgcagggtattaccgtcggttcattgaaaatttctccaggatcgcccgacccatgactcagttgcttaagaaagatgagaaatttaaatggacagccgagtgtgacaagagttttgaggagctcaagaagaaattagtatccgccccagttctgattctgcccgaccagatgaaagacttccaagtctattgcgacgcatcccgccacgggcttggatgtgttctaatgcaagagggtagagtggtcgcatacgcctcgcggcagttgcgtccacatgaagggaattatccaactcatgacctggaattggcagtagtggttcatgctttgaagatctggaggcactatctgattggcaaccgctgcgaagtatatacggaccacaagagtctgaaatacatcttcacccaaccggacctaaatctccgacaacgaagatggttggaactaatcaaagattatgacatgagcattcactaccacccgggtaaagccaatgtggtggcagatgcattaagcaggaaaagctactgcaatgccctatgcaccgaggacatgtgtgaagaattgcagcaggagcttgagcgtctcaacgtgggaattgttgaacataggttcgtagccgctctggaagcacggcctacgcttgtggatcaattcagagcagctcaagtaaatgaccccgaaatagttgaactgaaaaagaatatgagagtgggaaaagcccgggacttccttgaggatgaacatcgcacaatctggatgggagaaagattgtgtgtacctgacgacaaggaactgaaggatctgatactcaccgaggctcatcagactcagtactccattcatccaggcagcaccaaaatgtatcaagacctcaaagaaaagttttggtgggtcagcatgagaagggaaatagctgaattcgtcgcactctgcgacgtttgccaacgagtgaaggcagagcaccaaaggccagtaggtttattccaacctcttcaaatcccgaaatggaagtgggaggagattggaatggactttataacaggactgccccggacatcatcgggtcacgattcaatctgggtagtcgtggatcgactcactaaggttgctcacttcataccagtacataccacctatacggggaagaaattggcagagctgtgcctggcaaggattgagtttgatctattgagataa

SEQ ID NO: 13851 - DNA, 10053 bp, Oryza sativa
  Clone ID: TFbOSC401894j.C1.o32.fg
atgggttccaagatggccggccacccacccaaccaccgcggagaaggcatgatcgactttgtggcagagttggcacgcatgacactggtggtgggctaccccaacgcgccagagtacacgacgattccacagctcagtggcgagcttcctcaccgtgttcgcttggaggtccacggctacgtgggtacctgcctagctaacatggtggtcgaggcatctggaggcacagcagatcatgcctgtcaggaggcagcctacttgatgatggccagactacgggagcgccacaactacatcttccacgacacggcgtaccgcttccacccccgtcgagccaacggtgatgacgtcagctccttccgtccgacagctggcgagaacgacaccacctttggtcacatgtgtgctgtgatgaggggattggacaggatgcactcggacctgcacaaggcgaccaaggccttgaacgatgggaagctcatgaggatcgtcgctctgaaggacgagatagcgcgcctgaagagggagaacgctcagctaaagggtcttccagcgccaggaggagtccggatccgcactacgccccgcaagacgacgacggcacccgtgcgcatccagcttgcgcccaggaacccacctccatccgcagctcccgcagcacctccagttccgcccgcagctccggcagttcctgcagctccagctcccgcgtccgctctctccttcgctcccgcatcagccgccaggggtccagccagtggcaatggaggttgcttgtttgggatggtctacaccaggaatggtagccgcgcaacaggcgagggcagcaacggcgaagaacgcgctgacggtgtgcaccccagcagtgattccggcaatggtccgccaccacttcccgagaatccgacccttgcccaagttatggcacatcagactcagatgatggcagccatgatgcagcagatgcagcagcagcaccagcagatgcaccagaggatgatgcagcacgtcgaacagcagcaccagcagtttggtccccctccccctcagtccaagttgcctgagttcctacgcgagaaggtcgctttcgccacacaccagcttcagggtcccgcgtcagcttggtgggacaatcacatggccacccgcccaccaggtactgaagtcacatgggcagagttctgccgtagcttcaggaaggcgcaggtgccagacggggtcgtggcacaaaagaagagggaattccgggcactccatcagggcaacaggactgtgacagagtacctccacgagttcaatcgcctcgcgcgatatgcaccagaggatgtccgcaccgacgctgagaagcaggagaagttcatggcgggtctggatgatgagctgaccaaccaactgatatccggggactacgctgactttgagaggctggttgacaaggcaatccgccaggaggatcaacgcaacaagatggacaggaagaggaaggccgcacagttcagggcacctcagggaagtcaccagaggccgcgcttcgctcctgggcagcagggtggacctaccaccatgatcgttcgtcagcaccgcccgttcaaccctagcaactttccccagggcgccagtggcagtcagaaccaccatggaggtcagtccaaccgcggtgcagcttcacgcccaccaatggcaccggcacagtcaggccagcccgcgcaagccaagaaggagattggagcaaaaccagggtcctgcttcaactgtggcgagcttggccacttcgctgacaaatgcccgaagcctaggagtgccgggccaaggtttatccaggctcgtgtcaaccacgcatctgcggaggaggcacaagcagcaccagaggtcgtactgggtacgttccctgttaactcaatccctgcaacagtactttttgattctggtgcgacgcattctttcatttcaaagaaatttgtcgggatgcatgggtttataagagaagaacttagcacaccgatgcgggttcataccccagggaatagctccacttcggttcaattcagcccttctataacaatagaaattcaaagatcaccatttctagccaacctcattcttctcgaatccaaagacctagatgtcattcttgggatggattggctgaccaagttcaagggagtcatcgattgtgcgaatcgcacagtcaccttgaccaacgagaagggggaaacggtagtgtacaaatcaccagactcaccaaagcaaggagtctccttgaatcagattgaagcggaaatcccagtggacaccgtggagaggaatttgaggaaattggaagacatacccatagtctccgagtatccagaagtgttccccgaagacctcactaccatgccacccaagagagagattgaattccggattgacttggcaccgggaaccgctccaatttacaagagaccgtacagaatggcggccaacgaactagcagaggtcaagaagcaggttgatgagcagctgcagaaagggtacattcgaccaagtacttcaccttggggtgctccggtcatttttgtggagaaaaaggataagacgaagaggatgtgcgttgattaccgcgcactcaacgaggtcacaatcaagaacaaatatcctttgacgcgaatcgatgatttgtttgatcaactgaaaggagctaaagtgttttctaagatagacctgcgatcaggctaccaccagttgagaattcgggaagaggatattccgaagacggccttcaccactcggtacgggctatatgagtgcacggttatgtccttcggacttactaacgcacccgcattcttcatgaatctgatgaacaaagtgttcatggaatttctggacaagtttgttgaggtgttcatcgacgacattcttatctattcaaagtccgaagaagaacatgaacaacatctccgtctggtactcgagaagttgagggagcaccagctatacgccaagttcagcaagtgtgacttctggttgacggaagtcaaatttctgggccatgtcattacagctcagggtgtggcagtcgacccatcgaacgtggagtcagttaccaaatggaccccaccgaagaccgtgtcgcagattcgaagttttcttggacttgcaggttattaccgtcgattcatcgaaaatttctccagaatcgcccgacccatgactcagttgcttaagaaggatgagaagtttaaatggacagccgagtgcgataagagcttcgaggagctcaagaagaaattagtatccgcaccagttttgattctgcccgacccgatgaaagacttccaagtctattgtgatgcatcccgtcacggacttggatgtgtcctaatgcaagagggcagagtggttgcgtatgcctcgcggcagttgcgtccacacgaagggaattatccaactcatgacttggaattggcaacagtggttcatgctttgaagatctggaggcactatctgattggcaaccgctgcgaagtatatacggaccataagagtctgaaatacatcttcactcaaccggacctaaatctccgacaacgaagatggttggaactaatcaaagactatgacatgagtattcactaccacccgggtaaagccaatgtggtggcagacgctttaagccggaaaagttactgcactgccctatgcatcgagggcatgtgtgaggaattgcgacaggagtttgagcatctcaacgtgggaattgttgaactcgggttcgtagccgctctggaggcacggcctacgctcgtggatcaagttagagcagctcaagcaaatgattctgaaatagcagagctgaaaaagaacatgagagtcggaaaagcccgggatttccacgaagatgagcatggcacaatctggttgggagaaagattgtgtgtacctgacgacaaggaactgaaggatctgatactcaccgaggctcatcagacccagtactccattcacccaggcagcactaaaatgtatcaagacctcaaagaaaggttttggtgggtcagcatgaggagagaaatagctgaattcgtcgcactctgcgatgtttgccaacgagtgaaggcagagcaccaaagaccagcaggtttactccaacctcttcaaatcccggaatggaaatgggaggagattggaatggactttataacaggactgccccggacatcatcgggtcacgattcgatctgggtagtcgtggatcgactcactaaggttgctcacttcataccagtacataccacatatacgggcaaaaggttggcggagctttacctttcgagaatcatgtgcctacatggagtacccaaaaagattgtatctgaccgagggagtcagttcacctcaaaattctggcagaagctacaggaagaactggggacccgtttaaatttcagcacggcctatcacccgcaaactgatggtcagaccgagcgagtcaatcaaatcttggaagatatgttgagagcttgtgctcttgattttggtggagcttgggacaaaagcttgccatatgcggaattctcgtacaacaacagctaccaggccagtctacagatggcaccgtttgaagctttatacggccggaagtgccgcacacctctcttctgggatcagacaggcaaacgtcaactgttcggaacagaagtattagcggaagcagaagagaaagtcagaattatcagggaaagattgaggattgctcagtctcgacagaagagctacgcggataaccgtcgaaaggagctcacttttgaggcaggagattacgtgtatcttcgtgtcactccgctccggggagtacaccggtttcagacgaaaggcaagttggcaccacgcttcgtgggaccatacaaaatcttggaacgaaggggagaagttgcttatcagttagaacttccatccaatatgatcggcatccgtgacgtgttccatgtgtcccaattaaagaagtgcttaagggtacctgaagaacaggctgattcggagcacattgatatccagggggacctaacatatgtggagaagccgtgggtagtactcagtcttgctctacttttcccaacctcagagttcgagttcgggtcagatgaaggtgtgacaaccatcatcgaaaaatacgacggaagcgtcaaccccgccgagtttctccagatctacacgaccgggatcgaggccgccgggggtgacgacagggtcatggcgaatttcttccccatggccctgaagggtcaggcgcggggttggctaatgaacttgccacccgcgtcggtccactcttgggaggatttgtgccagcagttcaccacgaacttccagggcatatatccgcgcccagacgaagaagcggacttgcatgcggtacagcgaagggacgatgagtctcttcgctcatacattcagcggttctgtcaagtccgcaacaccataccgtgcatccccgcacacgcggtgatctacgcgttcagggggggcgtgcggcacaaccgcatgctcgagaagatcgcctccaaggagccccagaccaccgcgcagctttttgagctcgcggaccgtgtggctcgcaaggaggaggcctggacctggaactcctccggttctggtgtggcagctccggccgcccccgggtccgccgctcggtcagggcggcgggacaggaggaggaagaagggctcggcccgttccgacgacgagagtcatgtcctcgccgtcgagggcgcttcgcgggccccccgaaaggggaggcctgcgagcaacaaaaagaaggaggccggcgctcccagcagggagcgcccgaccggcaagtggtgtaccgtgcacaacacctccctccacgacctcgcggactgccgcgcggtcaaaagtttggctgagcggacgagaaagtgggaggaggagaagaggcaggagcgtcgtgagggcaagaccccggcggctcccgccggcaaccggcgaggtgaggccaagcagaaggccaccgccgaggacatcgacgatggcgacgatgacctggggttccaggagcctgaggccaccgtcgccaccgtcgatgggggagcgtgcgctcacgcttctcgccggagcctcaaggccatgaagcgagagcttctggccgcggcccctacccatgaggcgacgtggcgggcgcggtggtcggaggttgccctctccttcgaccagaccgaccacccgccgtgcgttgcccggggaggacagatcgcgatgccgctgggtcatatcgacctcccggtcaccttcggtggttccgccaacttctgcacggagcgggtggacttcgatgtggcggacctcagtctgccctacaacgcggtcctggggaggcccgcgttggtgaagttcatggcggcggtccactacgcctatctccagatgaagatgccgggccccggtggccccatcaccgtccatggcgacctcaaagtcacgcttgcttgtatggagcagcgcgcggaccaccttgccgcggcgtacaagcccgcgggtggcgacgagaggctcagcacctccgtcccggccgccccaaggcagcggatggtcacgtgcgatgaggtctcggtcaaggaggaagacgcgctcgtctccttactgcgggcaaacaccgacgtcttcgcctggagaccggcggacatgcccgaggtccccagggaggtgattgagcaccgtctcgccgtgcagctgggcgcaaggccggtccggcagaaagtgcggcggcaggccccggaacgtcaagccttcatccgcgaggaggtggcgcgacttctggaggccggattcatccgtgaggtcatccatccggagtggctggcgaacccggtcgtcgttcccaaggcgaacggcaagcttcggatgtgcatcgactacaccgaccttaacaaggcatgtcctaaggacccttaccccctgccacgcatagatcagattgtcgactccaccgcggggtgcgaccttttgtgttttctagatgcatactctagttatcatcagattcgcatggctagggaggatgaggaaaaaactgcattcattacccctataggaacttattgttatacgacaatgcctttcgggttaaagaatgcaggtcctacttttcaacgtactactcgaatttctttgggtagccagataggacgcaatgttgaggcctatgttgatgacttggttgtgaagacgcgcaaccaagagaccttactctcggatctagcggaaactttcaaaagtctccgctccgcccgcataaagctgaaccccgataagtgcgtgttcggcgtgcctgcgggcaagcttctcgggttcttggtctctgcccgaggcatcgaggccaaccccgagaagatacgagctatagagcggatgcacccccccagcatgcttagggatgtgcagtgcgtcaccggctgcatggccgccctaagtcggttcatatcgaggctgggagagaaggcactacccctatttaagctcctcaaacgctccgggccgtttacctggacggaggaggctgagcgggccttcactcagttgaaggcgtacctcagttctcccccagtcctggtcgccccggagccagatgagccgttgctactctacctggcggcaaccccgcaggtggtcagcgcggcgttggtcgtggagcgcgacaaggacaaccctcactccgcgcatccccaccctgtgtcgactcgacccgggagagagcagggaggagaggcccccgagccgaacggcggcccaggccctcgacggccggagctggccctccgcctgcttgtccgacggtgccaggtcgtcggcacagaagccgagtgcgccccgtgtggcctctcggacgaagagcgccctggagatgcggcccctggcgaagaggatcggccccgccgaaagatgcagcggcccgtctacttcgttagcgaggccctccgggacgccaagacccgataccctcaggcccagaagatgctttacgctattctgatggcttcgaggaagttgcgccattatttccaggcgcatcgggtcacggtggttacgtcttaccccctcggccaaatcttgcataaccgagagggtactggacgggtggtgagatgggcaatcgaactctctgaattcgatttgcgctttgaaccacgccacgcgatcaagagccaggccctcgccgactttgtggcggagtggaccccagctcccgagcccgtctccgcccccaaggccagctcgggcccctcgcagctgcctcacaccgcctactggggcgccggtgcgggggtcacgttgacctcgccgagcggagacgtcctcagatacctggtccgcctcgactttcgggcgaccaacaatatggcggagtacgagggactccttgcgggactcagagtggcagctggactggggatccgccgcctcctggtgtttggcgactcccagttggtcgttaaccaggtctgtaaggagtaccagtgctctgacccgcagatggacgcttacgtgcgccaggtgcggcgtatggagcgccatttcgacgggatagagcttcggcacgtgcccagacgggataacacggtcgccgacgaactctcaaggctcgcttcctcgcgagcccagaccccaccgggcgcctttgaagaaaggcttgcccagccgtcggcgcgacccgaccccctaggagagacggacgcgcctgaacggcccccgaggcccgtcggagtccaggcctcgggacccgaggggagcgctcccagctcccctagattgattgcttggatcactgagatccaggcgtacctcgcagataagactctacccgaggaccgcgaagggagtgaacgcgtccggcgcatctccaagcgctacgtgctggtggaagggaccctctatcggcgcgcggctaacggagtcctcctgaagtgcattcctcgggaacaaggcgtcgagcttctcgccgatatccatgaaggcgagtgcggagcccactccgtctcacgcaccttggttggcaaggcctttcgccagggtttctattggccgacggctctcaacgatgcggtcgacctggtccggcggtgcagggcgtgccagtttcatgccaggcaaacccatcagccgacccaggccctgcagaccatacctctttcgtggccgtttgctgtctgggggctcgatatcctgggtccgttcaggcgggccccgggcgggttcgagtatctgtatgtcgctgtcgacaagttcactaagtggcccgaggcttatccggtcatcaaaatcgataagcactccgcacttaaattcatcaggggcatcactgctcggtttggggtgcctaatcgtatcattacagataacggcacccagttcactagtgagctcttcggtgactactgcgaagacatgggcatcaagctctgcttcgcctcccccgcccaccccagaagcaatggccaagtggagcgcgccaatgcggaaatcctcaagggcctcaaaaccaagaccttcaacatcctcaagaagcacggcgactcgtggatcgaggagctgccagcggtgctctgggcgaaccgaaccacgccaagccgagcaaccggggaaacgcctttcttcctcgtctacggcgcggaggcggtcctcccatctgagctcaccctgaggtcccctcgggtcaccatgtattgcgaggctgatcaagatcagcttcgccgagacgacctcgactatttggaagagcgaagacggcgcgcggccctccgagccgcgcgctaccagcagagcctgcggcgctaccatcagcgccacgtccgggcccgatcactctgcgtcgacgacctcgtcctacgccgcgtccaaacgcgtgctggactgagcaagctctcaccaatgtgggagggtccgtatcgagtaatcggcgtcccccagccgggctccgttcggctggccacgggcgacggcacagagctgcctaacccgtggaacatcgaacaccttcgtcgcttctacccctag

SEQ ID NO: 13852 - DNA, 4698 bp, Oryza sativa
  Clone ID: TFbOSC401978j.C1.o63.fg
atggccgagcacccacccaaccaccgcggagaaggcatggatgacttcgtggcagagttggcacgcatgacactggtggtgggctaccccaacgcgccggagtacacgactgttccaccgctcagtggcgagcttcctcaccgtgtccgcttggaggtccatggttacgtggggacttgcctcgctaacatggtggtcgaggcgtctggagccacagcagatcacgcatgtcaggaggcagcatatctgatgatggccagactgcgggagcgccacaactacatcttccacaacacggtgtaccgtttccaccctcgtcgagccaacgacagtgatgtcagttccttccgtccgacagccggcgagaacgacaccaccttcagtcacgcgtccaaggccttgaatgatgggaagctcatgaggatcgtcgctctgaaggacgagatagcgcgcctgaagagggagaatgctcagttgaagggtcttcccgcgccaggaggagtccagatccgcaccacgcctcgcaagtcgacaacggcacccgtgcgcatccagcttgcgcccaggaacccacctccgtcagcagctcccgcagcacctccagttccgcccgcagctccagcagttcctacagctccagcgccagccccagctcctgttcccgtgtcagctccagcatccgctctctccttcgcacctgcatcagccgtcaggggccccgccagtggcaatgggggttggttgcctgctactcccagtggcagtcgcgaccgcagcagcagcagctccagtggcatagagccgggcagcggcgagacttatctgccaggctccaggagtcgctcagaggacctgatggtctacaccaggactggcacccgcacgacaggcgagggcagcaacggcgaagaacgcgctgatggtgtgcaccccaacagtgattccggcaatggtccgccaccacttcccgagaatccgacgctagcccaagttatggcacatcagactcagatgatggcagccatgatgcagcagatgcagcagcagcaccagcagatgcaccagaggatgctgcagcacgctgaacagcagcaccggcagtttggtccccctccccctcagtccaagttgccagagtttctacgtgtcaggccacccaccttctccagcaccaccaaccccatggaggcgaatgactggctccatgccatagagaagaagctgaatctcctgcagtgcaatgatcaggagaaggtcgctttcgccacacaccagcttcaaggtcctgcgtcagcttggtgggacaatcacatggccacccgcccgccaggcactgaagtcacttgggcggagttctgtcgtagcttcaggaaggcacaggtgccagacggggtcgtggcacaaaagaagagggaattccgggcgctccatcagggcaataggacagtgacagagtacctccatgagttcaatcgcctcgcgcgatatgcaccggaggatgtccgcactgacgccgagaagcaggaaaagttcatggcaggtctggatgacgagctgaccaaccaactgatatctggggactacgctgattttgaaagactggttgacaaggcaatccgtcaggaggatcagcgcaacaaaatggacaggaagagaaaggcggcacagttccggtccaaccaaggaaaccatcagcgaccgcgtttcactcccggacagcagggtggacctaccaccatgatcgtccgccagcaccgcccgttcaactccagcaacttccaccagggcgctagtggcagtcagaaccaccatggaggtcagcctaaccgcggtgcagctccacgcccaccagtggcaccagcacaatcaggcccgtccgcacaagctaaggagaccgaagccaaacctgggtcctgtttcaactgtggtgagcttggccacttcgccgacaaatgcccgaagcccaggcgtgccgggccaaggaaagaagagcttagtacaccaatgagggttcataccccaggaaatagttcaacctcagtcaattttagcccttcagtgctaatagaaatccaaagatcaccatttctagccaacctcattcttctcgaatccaaagacctagatgtcattcttgggatggattggctgaccaagtttaagggagtcatcgattgtgcgaatcgcacagtcaccttgaccaacgagaagggagaaaccgtggtgtacaaatcactagtctcaccaaagcaaggggtctccttgaatcagatcgagatggaaatcccagtggtcaccgaggagaagaattcgaggaagttggaagagattcctatagtctgcgagtacccagaagtgtttcccgaagatctcactaccatgccacccaagcgaaagattgaattccggattgatttggcaccgggaaccgcgccaatttacaagagaccgtacaggatggcggccaacgaattagcagaggtcaagaagcaggttgatgagcaactgcagaaagggtacattcgaccgagtacttcaccttggggtgctccggtcatttttgtggagaaaaaggataagacgaaaaggatgtgcgttgattatcgcgcactcaacgaggtcacaatcaagaataaatatcatttaccgcggatcgatgatttgtttgatcaactgaagggagctaagttaaggatccgggaagaggatattccaaagacggctttcaccactcgatacgggctgtatgagtgcacggttatgtctttcggacttaccaacgcacccgcattcttcatgaatctgatgaacaaagtgttcatggaatttctcgacaagtttgttgtggttttcatcgacgacattcttatctattcaaagtctgaagaggaacatgagcagcatcttcgtctggtactcgagaagttgaaggagcaccaattatacgccaagttcagcaagtgtgacttctggttgacagaagtcaaatttctgggtcatgttattacagctcagggtgtggcagttgatccatcgaacgtggagtcagttaccaaatggaccccaccgaagaccgtgtcgcagattcgaagttttcttggacttgctggttattaccgccgattcatcgaaaacttctccaggatcgcccgacccatgactcagttgcttaagaaagatgagaagtttaaatggacagctgagtgcgataagagctttgaggagctcaagaagaaattagtatccgcaccagaaggcagagtggttgcgtatgcctcgcgacagttgcgtccacacgaagggaattatccaacccatgatttggaattggcagcagtggttcatgctttgaagatctgggggcactatctgattggcaaccgctgtgaagtatatacggatcacaagagtctgaaatacatcttcacccaaccggatctaaatctccgacaacgaagatggttggaattaatcaaagactatgatatgagcattcactaccacccggggaaagccaatgtggtggcagacgcattaagcaggaaaagttactgcactgctctatgcatcgagggcatgtgtgaggaattgcggcaggagtttgagcatctcaacgtgggaattgttgaacatgggttcgtagccgctctagaagcacggcctacgctcgtcgatcaagttagagccgctcaaataaatgatccggaaatagcagagctgaaaaagaacatgagagtcggaaaggctcgggatttccttgaggatgagcatggcacaatctggatgggagaaagattgtgtgtacctgacgacaaggaactgaaggatctgatactcaccgaggctcatcagacacagtattccattcacccaggcagcactaaaatgtaccaagacctcaaagaaaagttttggtgggtcagtatgagaagagaaatagctgaattcgtcgcactctgcgatgtttgccagcgagtgaaggcagagcatcaaaggccagcaggtttactccaacctcttcaaattccagaatggaaattgcataccacctatacgggaaagagattggcagagttgtacctggcaaggatcatgtgtttgcatggggtacctaagaagatagtatctgaccgagggagtcagttcacctcaaaattttggcagaaactgcagaaagaattggggacccgtttaaatttcagtaccgcctaccatccgcagacagatggtcagaccgagcgagtcaatcaaatcttggaagatatgttgagagcttgcgctcttgacttcggtggagcttgggacaacagcttgccatatgcggaattctcatacaacaacagttaccaagccagtctacagatggcaccgtttgaagctttatacggccggaagtgccgcacacctctcttctgggatcagacaggcgagcgtcaattgttcgggacagaggtattaacggaagcagaagagaaagtcagaaccatcagggaaaggttgagaattgcccagtctcgacagaagagctacgcggataaccgccgaaggaagctcacttttgaagcaggggattatgtgtatcttcgggttaccccgctccggggagtgcaccgttttcaaaccaaaggcaagttagcaccacgtttcgtgggaccctacaaaatcttggaacgaagggggaagttgcttattagctag

SEQ ID NO: 13853 - DNA, 4196 bp, Oryza sativa
  Clone ID: TFbOSC402030j.C1.o1.np
atggtgaacactcgcgccagtggaagtggaaacaataacaatgaagggaacccaactcttgctcaagtcctggctcaacagactcagttaatgaacatgatgatacagcagatgcagaaccagctcaaccaagggaacaacaatgctccaccgccgcagaacaagttaactgattttcttcgtgtaaggccacctaccttttctagcactaccaacccagtagaagcaggtgattggctacacgctgttgagaagaagttggaactgctccagtgtacggatcaggagaaagttgttttcgcttcacatcagttgcaaggacctgcatcagaatggtgggatcatttccggatgaacagagcagaaggacaaccaatcacttgggaagagtttactgaaggattcaagaagacacacatacctgtaggagttgttgctttgaagaagcgtgagtttagggcgcaggagaagttcttggaaggcttaaaggatgaactgtcagttacgttaatctcccatgactatgttgattttcagcagctggttgacaaagcaattcgacttgaagacaagaagaacaggatggataaccgtaaaaggaaaatgattgtattccaggaggcacaaggtagtagccagaggcagcgtatcacgttcaaccctagcaactttccccagggcgccagtggcagtcagaaccaccatggaggtcagtccaaccgcggtgcagctccacgcccaccaatggcaccggcacagtcaggcccgcccgcgcaagccaagaaggagactggagcaaaaccagggtcctgcttcaactgtggtgagcttggccacttcgctgacaaatgcccgaagcctaggcgtgccgggccaaggtttatccaggctcgtgtcaaccacgcatctgcggaggaggcacaagcagcaccagaggttgtactgggtacgttttctattaactcaatccctgcaacagtactttttgattctggtgcaacgcattcgttcatttcaaagaagtttgttgggatgcatgggttaataagagaggaacttagcacaccgatgcgggttcataccccagggaatagctccacttcggttcaattcagcccttctataacaatagaaattcaaagatcaccatttctagccaacctcattcttctcgaatccaaagacctagatgtcattcttgggatggattggctgaccaagtttaagggggtcatcgattgtgcgaatcgcacagtcaccttgaccaacgagaagggagaaaccgtggtgtacaaatcactagtctcaccaaagcaaggggtctctttgaatcagatgaaattggaagatatacccatagtctgcgagtatccggaagtgttcctcgaagacctcactaccatgccacccaagagagagattgattccggattgacttggcaccgggaaccgccccaatttacaagagaccgtacagaatggcggccaacgaattagccgaggtcaagaagcaggttgatgagcagctgcagaaagggtacattcgaccaagtacttcaccttggggtgctccggtcatttttgtagagaaaaaggataagacgaagaggatgtgcgttgattatcgcgcactcaacgaggtcaccatcaagaacaaatatcctttgccgcgaatcgatgatttgtttgatcaactgaaaggagctaaagtgttttctaagatagacctgcgatcaggctaccaccagttgagaattcgggaggaggatattccgaagacggccttcaccactcggtacgggctatatgagtgcacggttatgtcgttcggacttaccaacgcacccgcattcttcatgaatctgatgaacaaagtgttaatggaatttctggacaagtttgttgtggtgttcatcgacgacattcttatctattcaacgtccgaagaagaacatgaacaacatctccgtctagtactcgagaagttaaaggagcaccagctatacgccaagttcagcaagtgtgacttctggttgacggaagtcaaatttctgggccatgtcattacagctcagggtgtggcagttgatccatcaaacgtggagtcagttaccaaatggaccccgccgaagaccgtgtcgcagattcgaagttttcttggacttgcaggttattttaaatggacaactgagtgcgataagagttttgaggagctcaaaaagaaattagtatccgcaccagttttgattctgcccgaccagatgaaagacttccaagtctattgcgatgcatcccgtcacggacttggatgtgtcctaatgcaagagggcatagtggttgcgtatgcctcgcggcagttacgtccacacgaagggaattatccaactcatgacctggaattggcagcagtggttcatgctttgaagatctggaggcactatctgattggcaaccgctgcgaagtatatacggaccataagagtctgaaatacatcttcacccaaccggacctaaatctccgacaacgaagatggttggaactaatcaaagactatgacatgagtattcactaccacccgggtaaagccaatgtggtggcagacgcattaagccggaaaagttactgcactgccctatgcatcgagggcatgtgtgaggaattgtggcaggagtttgagcatctcaacgtgggaattgttgaacacgggtttgtagccgctctggaggcacggcctacgctcgtggatcaagtcagagcagctcaagtaaatgattctgaaatagcagagctgaaaaagaacatgagggtcggaaaagcccgggatttccacgaagatgagcatggcacaatctggttgggagaaagattgtgtgtacctgacgacaaggaactgaaggatctgatactcaccgaggctcatcagacccagtactccattcatccaggcagcactaaaatgtatcaagacctcaaagaaaagttttggtgggtcagcatgaggagagaaatagctgaattcgtcgcactctgcgatgtttgccaacgagtgaaggcagagcaccaaagaccagcaggtttactccaacctcttcaaatcctggaatggaaatgggaggagattgggatggactttataacgggactgccccggacatcgtcgggtcacgactcgatctgggtagtcgtggatcgactcactaaggttgctcacttcataccagtacataccacgtatacgggcaaaaggttggcggagctttacctttcgagaatcatgtgcctacatggagtacccaaaaagattgtatctgaccgagggagtcagttcacctcaaaattctggcagaagctgcaggaagaattggggacccgtttaaatttcagcacggcctatcacccgcaaactgatggtcagaccgagcgagtcaatcaaatcttggaagatatgttgagagcttgcgctctcgattttggtggagcttgggacaaaagcttgccatatgcggaattctcgtacaacaacagctaccaggccagtctacagatggcaccgtttgaagctttatacggccggaagtgccgcacacctctcttctgggatcagacaggcgagcgtcaactgttcgggacagaggtattagcggaagcagaagagaaagtcagaatcatcagggaaaggttgaggattgcccagtctcgacagaagagctacgcggataaccgccgaagggagctcacttttgaggcaggagattacgtgtatcttcgtgtcactccgctccggggagtacaccgttttcagacgaaaggcaagttggcaccacgcttcgtgggaccatacaaaatcttggaacgaaggggagaagttgcttatcagttagaacttccatccaatatgatcggtatccatgacgtgttccacgtgtcccaattaaagaagtgcttaagggtacctgaagaacaggctgattcgaaacacattgatatccaggaggacctaacatacgtggagaagccgattcgtatacttgataccagcgaaagaagaaccagaaacaaggtcaacaggttttgccgagttcagtggagtcatcattcagaagaggaagcaacctgggaaagggaggatgagttgaaagccgcccatccgcacctcttcaccagctcctccgaatctcggggccgagattccgtt

SEQ ID NO: 13854 - DNA, 1768 bp, Oryza sativa
  Clone ID: TFbOSC402030j.C1.o4.fg
atggtggttgaggcgtccggaggcacagcagatcacgcctgtcaggaggcagcatacctgatgatggccagactacgggagcgccacaactacatcttccatgacatggcataccgttttcaccctcgtcgagccagtggtgatgatgtcagcaccttccgtccgacaaccggccagaacgacaccacctttggtcacatgtgtgctgtgatgagtggattggataggatgcactcggacctgcacaaggcgaccaaggccttgaacgatgggaagctcatgaggatcgtcgctctgatggacgagatagcgcgcctgaagagggagaatgctcagttaaagggtcttcccgcgccaggaggagtccggatccgcaccacaccccgcaagacgacgacggcacccgtgcgcatccagcttgcgcccaggaacccacctccatcagcagctcccgcagcacctccagttccgcccgcagttcctgcagctccagctccagctcccgcgtccgctctctccttcgctccagcatcagccgccaggggtccagccagtggcaacggaggttgcttgcttgggatggtctacaccaggaatggtagccgcgcaacaggcgagggcagcaacggcgaagagcgcactgatggggcgcatccccacagcgattccggcaatggtccgccaccacttcccgagaatccgacgctagtccaagtaatggcacatcagacccagatgatggcagccatgatgcagcaccagcaccagcagatgcaccagcggatgctgcagcacgccgaacagcagcatcaacagtttggtccccctccccctcagtccaagttgccagagtttctacgtgtcaggccacccaccttctccagcaccaccaaccctatggaggcgaatgactggctccatgccatagagaagaagctgaatctcctgcaatgcaatgatcaggagaaggttgctttcgccacacaccagcttcaaggtcccgcgtcagcttggtgggacaatcacatggccacccgcccaccaggtactgaagtcacttgggtagagttctgccgtagcttcaggaaggcgcaggtgccagatggggttgtggcacaaaagaagagggaattccgggcactccatcagggcaacaggactgtgacagagtacctccacgagttcaatcgcctcgcgcgatatgcaccagaggatgtccgcaccgacgccgagaagcaggaaaagttcatggcgggtctggatgacgagctgaccaaccaactgatatctggggactacgctgacgttgagaggctggttgacaaggcaatccgtcaggaggatcaacgcaacaagatggacaggaagaggaaagccgcacagttcagggcacctcagggaagtcaccagaggccgcgcttcgctcccaggcagcagggtggacctaccaccatgatcgttcgtcagcaccgcccgttcaaccctagcaactttccccagggcgccagtggcagtcagaaccaccatggaggtcagtccaaccgcggtgcagctccacgcccaccaatggcaccggcacagtcaggcccgcccgcgcaagccaagaaggagactggagcaaaaccagggtcctgcttcaactgtggtgagcttggccacttcgctgacaaatgcccgaagcctaggcgtgccgggccaaggtttatccaggctcgtgtcaaccacgcatctgcggaggaggcacaagcagcaccagaggttgtactgg

SEQ ID NO: 13855 - DNA, 3804 bp, Oryza sativa
  Clone ID: TFbOSC404489j.C1.o1.fg
atggtctacaccaggactggcacccgcacgacaggcgagggcagcaacggcgaagaacgcgctgatggtgtgcaccccagcagtgattccggcaatggtccgccaccacttcccgagaatccgacccttgcccaagttatggcacatcagactcagatgatggcagccatgatgcagcagatgcagcaacagcaccagcagatgcaccagaggatgatgcagcacgccgaacagcagcaccagcagtttggtccccctccccctcagtccaagttgcctgagttcctacgtgtcaggccacccaccttctccagcaccaccaaccctatggaggcaaatgactggctccatgcaatagagaagaagctgaatctcctgcagtgcaatgatcaggagaaggtcgcttttgccacacaccagcttcaaggtcctgcgtcggcttggtgggataatcacatggccacccgcccaccgggtactgaagtcacatgggcagagttctgccgtagcttcaggaaggcacaggtgccagatggggtcgtggcacaaaagaagagggagtttcgtgcactccatcagggcaacaggactgtgacggagtacctccatgagtttaatcgcctcgcgcgatatgcaccagaggacgtccgcaccgacgccgagaagcaggagaagttcatggcgggtctggatgacgagctgaccaaccaactgatatctggggactacgctgactttgagaggctggttgacaaggcaatccgtcaggaggatcaacgcaacaagatggacaggaagaggaaggccgcacagttcagggcacctcagggaagtcaccagaggccgcgcttcactcccggacagcagggtggacctaccaccatgatcgttcgtcagcaccgcccgttcaatcctagcaactttcctcagggcgccagtggcagtcagaaccaccatggtggtcagtccaaccgcggtgcagctccacgcccaccaatggcaccggcacagtcaagcccgcccgcgcaagccaagaaggagactggagcaaaaccagggtcctgtttcaactgtggcgagcttggccacttcgctgacaaatgcccgaagcccaggcgtgccgggccaaggtttatccaggctcgtgtcaaccacgcatctgcggaggaggcacaagcagcaccagaggttgtactgggtacgtttcctgttaactcaatccctgcaacagtactttttgattctggtgcaacgcattctttcatttcaaagaaattcgtggggatgtatgggttaaggaaagaagagcttagcacaccaatgagagttcataccccgggaaatagttcaacctcagtcagttttagcccttcagtgctaatagaaatccaaagatcaccatttctagccaacctcattcttcttgaatccaaagacctagacgtcattcttgggatggattggctgaccaagtttaagggagtcatcgattgtgcgaatcgtactgtcaccttgaccaacgagaagggggaaacggtagtgtacaaatcaccagactcgccaaagcaaggagtctccttgaatcagattgaagcggaaatcccagtggacaccgtggagaagaatttgaagaaattggaagacatacccatagcctccgaatacccagaagtgtttcctgaagacctaactaccatgccacccaagagagagattgaattccggattgacttggcaccgggaaccgctccaatttacaagagaccgtacagaatggcggtcaacgaactagcagaggtcaagaagcaggttgatgagcagctgcagaaagggtacattcgaccaagtacttcaccttggggtgctccggtcatttttgtggagaaaagggataagacgaagaggatgtgcgttgattatcgcgcactcaacgaggtcacaatcaagaacaaatatcccttgccgcgaatcgacgatttatttgatcaactgaaaggagctaaagtgttttctaagatagacatgcgatcaggctaccaccagttgcgaattcgggaagaggatattccgaagacggccttcaccactcggtacgggctatatgagtgcacggttatgtccttcggacttaccaacgcacctgcattctttatgaatctgatgaacaaagtgttcatggaatttctggacaagtttgttgtggtattcatcgacgacatacttatctactcaaaatccgaggaagaacatgagcaacatctccgtctggtactcgagaagttgaaggagcaccagctatacgccaagttcagcaagtgtgacttctggttgacggaagtcaaatttctgggccatgtcattacagcccagggtgtggcagttgatccgtcgaacgtagagtcagtcaccaagtggaccccaccgaagaccgtgtcgcagattcgaagttttctaggactggcaggttattaccgccggttcatcgaaaacttctccagaatcgcccgacctatgactcagttgcttaagaaagatgagaagtttaaatggacagctgagtgcgataagagttttgaggagctcaagaagaaattagtatccgcaccggttttgattttgcccgaccagatgaaagacttccaagtctattgcgatgcatcccgtcacggacttggatgtgtcctaatgcaagaaggcagagtggttgccagtggttcatactttgaagatctggaggcacggccaacgctcgtggatcaagtcagagcagctcaagtaaatgattctgaaatagcagagctgaaaaagaatatgagagtcgggaaagcccgggatttccacgaagatgaacacggcacaatctggttgggagaaagattgtgtgtacctgacgacaaggaactgaaggatctgatactcactgaggctcatcagacccagtactccattcatccaggcagcactaaaatgtatcaagatctcaaagaaaagtttttgtgggtcagcatgaggagagaaatagctgaattcgtcgcactctgcgatgtttgccaacgagtgaaggcagagcaccaaagaccagcagcttgggacaaaagcttgccatatgcggaattctcgtacaacaacagctaccaggccagtctacagatggcaccgtttgaagctttatacggccggaagtgccgcacacctctcttctgggatcagacaggcgagcgtcaactgtttggaacagaggtattagcggaagcagaagagaaagtcaggatcatcagggaaaggttgagaattgcccagtctcgacagaagagctacgcggataaccgtcgaagggagctcacttttgaggcaggagattacgtgtatcttcgtgtcactccgctccggggagtacaccggtttcagacgaaaggcaagttggtaccacgcttcgtgggaccatacaaaatcctggaacgcaggggggaagttgcttatcagttagaacttccatccaacatgatcggcatccatgacgtgttccacgtgtcccaactaaagaagtgcttaagggtacctgaagaacaggctgattcggaacacattgatatccaggaggacctaacatatgtggagaagccggttcgtatacttgataccagcgaaaggagaaccagaaacaaggtcacccggttttgccgagttcagtggagtcatcattcagaagaggaagcaacctgggaaagggaagatgagttgaaagccgcccatccgcacctcttcaccagcacctccgaatctcggggccgagattccgtttaa

SEQ ID NO: 13856 - DNA, 5153 bp, Oryza sativa
  Clone ID: TFbOSC404956j.C1.o1.np
atggccggtcacccacccaaccaccgcggagaaggcatgatcgatttcgtggcagagttggcacgtatgacactggtggtgggctaccccaacgcgccggagtacacgacgattccgccgctcagtggcgagcttcctcaccgtgtccgcttggaggtccatggctacgtggggacttgcctcgctaacatggcggtcgaggcatctggaggcacagcagatcacgcctgtcaggaggcagcctacttgatgatggccagactacgggagcgccacgactacatcttccacgacacggcgtaccgctaccacccctgtcgagccaatggtgatggcgtcagctccttccgtccgacagctggcgagaacgacaccacctttggtcacatgtgtgctgtggtgaggggattggacaggatgcactcggacttgcacaaggcgaccaaggctttgaacgatgggaagctcatggggatcgtcgctctgaaggacgagatagcgcgcctgaagaaggagaacgctcagctaaagggtcttccagtgccaggaggagtccggatccgcaccacgccccgcaagacgacgactgcacctgtgcgcatccagcttgcgcccaggaacccacctccagcagcagctcccgcagcacctccagttccgcccgcagttcctgcagctccagttccagctcccgcgttcactctctccttcgctccagcatcagccgccagaggtccagccagtggtaccggaggttgttccctccagatggtctacaccaggaatggtagccgtgcaacaggcgagggcagcaacggcgaagaacgcgctgatggtgtgcaccccaacagtgattctggcaatggtccaccaccacttcccgagaatccgacgcttgcccaagttatggcacatcagactcagatgatggcagccatgatgcagcagatgcagcagcagcaccagcagatgcaccagaggatgatgcagcacgccgaacagcagcatcaacagtttggtccccctccccctcagtccaagttgccagagtttctacgcgtcaggccacccaccttctccagcaccaccaaccctatggaggcgaacgactggctccatgcaatagagaagaagctgaatctcctgcagtgtaatgatcaggagaaggtcgcttttgccacacaccagcttcagggtcccgcgtcagcttggtgggacaaccacatggccacccgcccaccgggtactgaagtcacatgggcagagttctgccgtagcttcaggaaggcacaggtgccagatggggtcgtggcacaaaagaagagggaatttcgtgcactccatcagggcaacaggactgtgacagagtacctccatgagttcaatcgcctcgcgcgatatgcaccagaggatgtccgcaccgacgccgagaagcaggagaagttcatggcgggtctggatgacgagctgaccaaccaactgatatctggggactacgccgactttgagaggctggttgacaaggcaatccgtcaggaggaccaacgcaacaagatggacaggaagaggaaggccgctcagttcagggcacatcagggaagtcaccagaggccgcgcttcactcccggacagcagggtggacctaccaccatgatcgtccgccagcaccgcccgttcaaccctagcaacttccaccagggcaccagtggcagtcagaaccaccatggaggtcagcccaaccgcggtgcagctccacgcccatcagtggcaccggcacagtcaggccagcccgcgcaagccaagaaggagacgggagcaaaaccagggtcctgcttcaactgtggcgagcttggccacttcgctgacaaatgcccgaagcccaggcgtgccgggccaaggtttatccaggctcgtgtcaaccacgcatctgcggaggaggcacaaacagcaccggaggtcgtactgggtacgttccctgttaactcaatccctgcaacagtactttttgattctggtgcaacgcattctttcatctcaaagaaatttgtcaggatgcatgggttaataagagaggaacttagcacaccgatgcgggttcataccccagggaatagctccacttcggttcaattcagcccttctataacaatagaaattcaaaggtcaccatttctagccaacctcattcttctcgaatccaaagacctagatgtcattcttgggatggattggctgaccaagtttaagggagtcatcgattgtgcgagtcgcacagtcaccttgaccaacgagaagggagaaaccgtggtgtacaaatctctagtctcgccaaagaaaggggtctcgttgaatcagattgagacggaaatcccagtggacaccgtagagaagaacttgagaaaattggaagatatacccatagtctgcgagtatccagaagtgttccccgaagacctcactaccatgccacccaagagagagattgaattccggattgacttggcaccgggaactgctccaatctataagagaccgtacagaatggcggtcaacgaattagcagaggtcaagaagcaagttgatgagcagctgcagaaagggtacatacgaccaagcacttcaccttggggcgctccggtcatttttgtggagaaaaaggataagacgaagaggatgtgcgtcgattatcgcgcacttaacgaggttacaatcaagaataaatatcctttaccgcgaatcgacgatttatttgatcaactgaaaggagctaaagtgttttctaagatagacctgcgatcaggctaccaccagttgagaatccgggaagaggatattccgaagacggccttcaccactcggtacggactatatgagtgcacggttatgtctttcggacttaccaacgcacccgcattcttcatgaatctgatgaacaaagtgttcatggagtttctggacaagtttgttgtggtgttcatcgacgacattcttatctattcagagtccgaagaagaacatgaacaacatctccgtctagtactcgagaagttgaaggagcaccagctatacgccaagttcagcaagtgtgacttctggttgacggaagtcaaatttctgggccatgtcattacagctcagggtgtggcagttgatccatcgaacgtggagtcagttaccaaatggaccccacctaagaccgtgtcgcagattcgaagttttctaggactggcaggttattatcgccgattcatcgaaaatttctccaggatcgcccgacccatgactcagttgcttaagaaggatgagaagtttaaatggacagctgagtgcgataagagctttgaggagctcaagaagaaattagtatccgcaccggttttgatcctgcccgaccagatgaaagacttccaggtctattgcgatgcatcccgtcacggacttggatgtgtcctaatgcaagagggcagagtggttgcatatgcctcgcggcagttgcgtccacacgaaggaaattatccaactcatgacttggaattggcagcaatggttcatgctttgaagatctggaggcactatctgattggcaaccgctgcgaagtatatacggaccataagagtctgaaatacatcttcacccaaccggatctaaaccttcgacaacgaagatggttggaactaatcaaagactatgacatgagtattcactaccacccgggtaaagccaatgtggtggcagacgctttaagccggaaaagttactgcactgccctatgcatcgagggcatgtgtgaggaattgcggcaggagtttgaacatctcaacatgggaattgttgaacacgggttcgtagccgctctggaggcacggcctacgctcgtggatcaagttagagccgctcaagtaaatgatccggaaatagcagaactgaaaaagaacatgagagtcggaaaggctcgggatttccacgaagatgagcatggcaccatctggatgggagaaagattgtgtgtacctgacgacaaggaactgaaggatctgatactcaccgaggctcatcagacccagtactccattcatccaggcagcactaaaatgtatcaagacctcaaagaaaggttttggtgggtcagcatgaggagagaaatagctgaattcgtcgcactctgcgatgtttgccaacgagtgaaagcagagcaccaaagaccagcaggtttactccaacctcttcaaatcccggaatggaaatgggaggagattggaatggactttataacaggactgccccggacatcatcgggtcacgattcaatctgggtagtcgtggatcgactcactaaggttgctcactttataccagtacataccacctatacgggaaagagattggcagaattgtacctcgcaaggatcatgtgtttgcatggggtacccaggaagatagtatccgaccgaggtagtcagttcacctcaaagttttggcagaaactgcaggaagaattggggacccgtttaaacttcagcacggcctatcacccgcaaactgatggtcagaccgagcgagtcaatcaaatcttggaggatatgttgagagcttgcgctcttgattttggtggagcttgggacaaaagcttgccatatgcggaattctcgtacaacaacagctaccaggccagtctacagatggcaccgtttgaagctttatacggccggaagtgccgcacacctctcttctgggatcagacaggcgaacgtcaactgttcggaacagaagtattagcggaagcagaagagaaagtcagaatcatcagggaaaggttgaggattgctcagtctcgacagaagagctacgcggataaccgtcgaagggagctcacttttgaggcaggagattacgtgtatcttcgtgtcactccgctccggggagtacaccgttttcagacgaaaggcaagttggcaccacgcttcgtgggaccatacaaaatcttggaacgaaggggagaagttgcttatcagctagaacttccatccaatatgggcgacatccgtgacgtgttccacgtgtcccaattaaagaagtgtttaatggtacctgaaggacaggctgattcggaacacattggggacagagctcgaattcgtatcatggtcaagcg

SEQ ID NO: 13857 - DNA, 5358 bp, Oryza sativa
  Clone ID: TFbOSC407404j.C1.o8.fg
atggaaaaacctaagagccctctgaatcctttttcattgcatatgttcttcgcaattggatttgttccgggaaaatggggatctgttcttgtggttcaagggaaaaatcttggtcgctcgtttaaaatggccggtcacccacccaaccaccgcggagaaggcatgatcgactttgtggcagagctggcacgcatgacactggtagtgggctaccccgacgcgccggagtacacgaccatcccaccgctcagtggcgagcttccttaccgtgtccgcttggaggtccatggctacgtggggacttgcctcgctaacatggcggtggaggcgtcaggaggcacagcagatcacgcctgtcaggaggcagcctacttgatgatggccaggctacgggagcgccacgactacatcttccacgacacggcgtaccgctaccacccccgtcgagcccatggtgatggcgtcagctccttccgtccgacagctggcgagaacgacaccaccttcggtcacatgtgtgctgtgatgaggggattggataggatgcactcggacctgcacaaggcgaccaaggccttgaacgatgggaagctcatgaggatcgtcgctctgaaggacgaggtagcgcgcctgaagaaggagaatgctcagttgaagggccttccagcgccaggaggagtccggatccgcactacgccccgtaagaggacgactgcacctgtgcgcatccagcttgcgcccaggaacccacctccaccagcagctcccgcagcagctccagttccgcccgcagttcctgcagctccagctccagctcccgcgttcactctctccttcgctccagcatcagccgccagaggttcagccagtggtaccggaggttgcttgtttgggatggtctacaccaggactggtagccgcgcaacaggcgagggcagcaacggcgaagaacgcgctgatggtgtgcaccccaacggtgattctggcaatgcagatgcatcagaggatgatgcagcacgccgaacagcagcaccagcagttggtccccctcccccccagtccaagttgcctgagtttctacgtgtcaggccacccaccttctccagcaccaccaaccctatggaggcaaatgactggctccatgcgatagagaagaagctgaatctcctgcagtgcaatgaccaggagaaggtcgctttcgccacacaccagcttcagggtcctgcgtcagcttggtgggacaaccacatggccacccgcccaccgggtactgaagtcacatgggcagagttctgccgtagcttcaggaaggcacaggtgccagatggggtcgtggcacaaaagaagagggaattccgtgcgctccatcagggcaacaggactgtgacagagtacctccatgagttcaatcgcctcgcgcgatatgcaccagaggatgtccgcaccgacgccgagaagcaggagaagttcatggcgggtctggatgatgagctgaccaaccaactgatatctggggactacgccgactttgagaggctggttgacaaggcaatccgccaggaggatcagcgcaacaaaatggacaggaaaagaaaggcggcgcagttccggtccaaccaaggcagtcagcaccgaccgcgcttcactcccggacagcagggtggacctaccaccatgatcgtccgccagcaccgcccgttcaactccagcaacttccaccagggcactagtggcagtcagaaccaccagggaggccagcccaaccgcggtgcagctccacgcccaccaatggcaccggcacagtcagcccagcccgcgcaagccaagaaggagacgggagcaaaaccagggtcctgcttcaactgtggcgagcttggccacttcgctgacaaatgcccgaagcccaggcgtgccgggccaaggtttatccaggctcgtgtcaaccacgcgtctgcggaggaggcacaagcagcaccagaggtcgtactgggtacgttccctgttaactcaatccctgcaacagtactttttgattctggtgcaacgcattctttcatttcaaagaaattcgtgggaatgtatgggctaaggaaagaagagcttagcacaccaatgagggttcgtaccccgggaaatagttcaacctcagtcagttttagcccttcagtgctaatagaaatccaaagatcaccatttctagccaacctcatccttctcgaatccaaagacctagatgtcattcttgggatggattggctgaccaagtttaagggagtcatcgattgtgcgaatcgcacagtcaccctgaccaatgagaaaggagaaaccgtggtgtacaaatccctagtctcgccaaagaaaggagcctcgttgaatcagattgaaacggaaatcccagtggacaccgtggggaagaacttgagaaaattggaagatatacccatagtctgcgagtatccggaagtgttccccgaaaacctcactaccatgccacccaagagggagattgaattccggattgacttggcaccgggaaccgctccaatttacaagagaccatacaggatggcggccaacgaattagcagaggtcaagaagcaagttgatgagcagctgcagaaagggtacatacgaccaagcacttcaccttggggcgctccggtcatttttgtggagaaaaaggataagacgaagaggatgtgcgtcgattatcgcgcacttaacgaggtcacaatcaagaataaatatcccttaccgcgaatcgacgatttatttgatcaactgaaaggagctaaagtgttctctaagatagacctgcgatcaggctaccaccagctgagaatccgggaagaggatattccgaagacggccttcaccactcggtacgggctatatgagtgcacggttatgtctttcggacttaccaacgcacccgcattcttcatgaatctgatgaacaaagtgttcatgaaatttctggacaagtttgttgtggtattcatcgacgacattcttatctattcaaagtccgaggaagaacatgaacaacatctccgtctggtactcgagaagttgaaggagcaccagctatacgccaagttcagcaagtgtgacttctggttgacggaagtcaaatttctgggccatgtcattacagcccagggtgtagcagttgatccatcgaacgtggagtcagttacaaaatggaccccaccaaagaccgtgtcgcagattcggagttttctaggactggcaggttattaccgccgattcatcgaaaacttctccagaatcgcccgacccatgactcagttgcttaagaaggatgagaagtttaaatggacagctgagtgcgataagagctttgaggagctcaaaaagaaattagtatccgcaccagtattgattctgcccgacccgacgaaagacttccaagtctattgtaatgcatcccgtcacggacttggatgtgtcctaatgcaagagggcagagtggttgcgtatgcctcgcggcagttgcgtccacacgaaggaaattatccaactcatgacttggaattggcagcagtggttcatgctttgaagatctggaggcattatctgattggaaaccgctgcgaagtatatacggaccataagagtctgaaatacatcttcacccaaccggatctaaaccttcgacaacgaagatggttggaactaatcaaagactatgacatgagtattcactaccacccgggtaaagccaatgtggtggcagacgctttaagccggaaaagttactgcactgccctatgcatcgagggcatgtgtgaggaactgcggcaggaatttgaacatctcaacatgggaattgttgaacacgggtttgtagccgctttggaggcacggcctacgctcgtggatcaagtcagagccgctcaagtaaatgatccggaaatagcagaattgaaaaagaacatgagagtcggaaaggctcgggatttccttgaggatgagcatggcacaatctggatgggagaaagattgtgcgtaccggacgacaaggaattgaaggatctgatactcaccgaagctcatcagacccagtactccattcatccaggcagcactaaaatgtatcaagacctcaaagaaaagttttggtgggtcagcatgaggagagaaatagctgaattcgtcgcactctgcgatgtttgccaacgagtgaaagcagagcaccaaagaccagcaggtttactccaacctctccaaatcccggaatggaaatgggaggagattggaatggactttatcacaggactgccccggacatcatcgggacatgattcaatctgggtagtcgtggatcgactcaccaaggtggctcactttataccagtacataccacctatacgggaaagagattggcagaattgtacctcgcaaggatcatgtgtttgcatggggtacccaagaagatagtctccgaccgaggtagtcagttcacctcaaagttctggcagaagctgcaggaagaaatggggacccgtttaaatttcagcacggcctatcacccgcaaactgatggtcagacagagcgagtcaatcaaatcttggaagatatgttgagagcttgcgctcttgattttggtggagcttgggacaaaagcttaccatatgcggaattctcgtataacaacagctaccaggccagtctacagatggcaccgtttgaagctctatacggccggaagtgccgcacacctctcttctgggatcagacaggcgaacgtcagctgttcggaacagaagtattagcggaagcagaagagaaagtcagaatcatcagggagagattgaggattgctcagtctcgacagaagagctacgcggataaccgtcgaagggagctaacttttgaggccggagattacgtgtatcttcgtgtcaccccgctccggggagtacaccgctttcagacaaaaggcaagttggcaccacgcttcgtgggaccgtacaaaattttggaacgaaggggagaagttgcctatcagctagaacttccatccactatgatcggcatccatgacgtgttccatgtgtcccaattaaagaagtgtttaagggtacctgaagaacaggctaattcggaacacattgatatccaagaggacctaacatatgtggagaagccggttcgcatacttgacactagcgaaaggagaaccagaaacaaggtcaccaggttttgccgtgttcagtggagtcatcattcagaagaggaagcaacctgggaaagggaagatgagttgaaggccgcccatccgtacctcttcaccagctccaccgaatctcggggccgagattccgtttaa

SEQ ID NO: 13858 - DNA, 5031 bp, Oryza sativa
  Clone ID: TFbOSC407849j.C1.o7.fg
atgggttgcaagatggccggtcacccacccaaccaccacggagaaggcatgatcgactttgtggcagagttggcacgcatgacactggtggtgggctaccccaacgcgccagagtacacgacgattccaccgctcagtggcgagcttcctcaccgtgttcgcctggaggtccatgactacgtggccggcgagaacgacaccacctttggtcacatgtgtgctgtgatgagggggttggataggatgcactcggacctgcacaaggcgaccaaggccttgaacgatgggaagctcatgaggatcgtcgctctgaaggacgagatagcgcgcctgaagagggagaatgctcagttaaagggtcttcccgcgccaggaggagtccggatccgcactacgccccgcaagacgacgacggcacccgtgcgcatccagcttgcgcccaggaacccacctccatcagcagctcccgcagcacctccggttccgcccgtagttcctgcagctccagctccagctcccgcgtccgctctctccttcgctccagcatcagccgccaggggtccagccagtggcaccggaggttgcttttttgggatggtctacaccaggaatggtagccgcgcgacaggcgagggcagcaacggcgaagagcgcactgatggggcgcatccccacagcgattctggcaatggtccgccaccacttcccgagaatccgacgctagcccaagtaatggcacatcagacccagatgatggcagccatgatgcagcagatgcagcagcagcaccagcagatgcaccagcggatgctgcagcacgccgaacagcagcatcagcagtttggtccccctccccctcagtccaagttgccagagttcctacgtgtcaggccacccaccttctccagtaccaccaaccctatggaggcgaatgattggctccatgccatagagaagaagctgaatctcctgcagtgcaatgatcaggagaaggttgctttcgccacacaccagcttcaaggtcctgcgtcagcttggtgggataaccacatgaccacccgcccaccaggtattgaagtcacttgggcagaattctgccgtagcttcaggaaggcacaggtgccagacggggtcgtggcacaaaagaagagggaatttcgtgcactccatcagggcaacaggactgtgacggaatacctccatgagttcaatcgcctcgcgcgatatgcaccagaggatgtccgtaccgacgccgagaagcaggaaaagttcatggcaggtctggacgacgagctgaccaaccaactgatatctggggactacgctgactttgagaggctggttgataaggcaatccgtcaggaggatcaacgcaacaagatggacaggaagaggaaggccgcacagttcagggcacctcagggaagtcaccagaggtcgcgcttcgctcccgggcagcagggtggacctaccaccatgatcgtccgtcagcaccgcccgttcaaccctagcaactttccccagggcaccagtggcagtcagaaccaccatggaggtcagtccaatcgcggtgcagctccacgcccaccaatggcaccggcacaatcaggcccgcccgcgcaagccaagaaggagacaggagcaaaaccagggtcctgcttcaactgtggcgagcttggccacttcgctgacaaatgcccgaagcctaggcgtgccgggccaaggtttatccaggctcgtgtcaaccacgcatctgcggaggaggcacaagcagcaccagaggtcatactgggtacgttccctattaactcaatccctgcaatagtactttttgattctggtgcgacgcattatttcatttcaaagaagtttgtcgggatgcaagggttaataagagaggaacttagcacaccaatgcgggttcataccccagggaatagctccacttcggttcaattcagcccttctataacaatagaaatccaaagatcaccatttctagccaacctcattcttctcgaatccaaagacctagatgtcattcttgggatggattggctgaccaagtttaagggagtcatcgattgtgcgaatcgcacagtcaccttgaccaacgagaagggagaaacggtagtgtacaaatcaccagactcaccaaagcaaggggtctctttgaatcagattgagacggaaatcccagtagacaccgtggagaaaaacttgaggaaattggaagatatacccatagtctgcgagtatccagaagtttttcccgaagacctcactaccatgccacccaagagagagattgaattccggattgacttggcaccgggaaccgctccaatttacaagagaccgtatagaatggcggccaacgaattagccgaggtcaagaagcaggttgatgagcagctgcagaaagggtacattcgaccaagtacttcaccttggggtgctccggtcatttttgtggagaaaaaggataaaacgaagaggatgtgcgttgattatcgcgcactcaacgaggtcacaatcaagaacaaatatcccttgccgcaaatcgacgatttatttgatcaactgaaaggagctaaagtgttttctaagatagacctgcgatcaggctaccaccagttgagaattcgggaagaggatattccgaagacggccttcaccactcggtacgggctatatgagtgcacggttatatccttcagacttactaacgcacctgcattcttcatgaatctgatgaacaaagtgttcatggaatttctggacaagtttgttgtggtattcatcgacgacatacttatctattcaaagtccgaagaagaacatgagcaacatctccgtctggtactcgagaagttgaaggagcaccagctatacgccaagttcagcaagtgtgacttctggttgacggaagtcaaatttctgggccatgtcattacagctcagggtgtggtagttgatccgtcgaacgtagagtcagttaccaaatggaccccaccgaagaccgtgtcgcagattcgaagttttctaggactggcaggttattaccgccgattcatcgaaaacttctccagaatcgcccgacccatgactcagttacttaagaaagatgagaagtttaaatggacagctgaatgcgataagagttttgaggagctcaagaagaaattagtatccgcaccagttttgattctgcccgaccagatgaaagacttcaaagtctattgcgatgcatcccgtcacggacttggatgtgtcctaatgcaagagggcagagtggttgcgtatgcctcgcggcagttgcgtccacacgaagggaattatccaactcatgacctggaattggcagcagtggttcatgctttgaagatctggaggcactatctgattggtaaccgctgcgaagtatatacggaccataagagtctgaaatacatcttcacccaaccggacctaaatctccgacaacgaagatggttggaactaatcaaagactatgacatgagtattcactaccacccgggtaaagccaatgtggtggcagacgctttaagccggaaaagttactgcactgccctgtgcatcgagggcatgtgtgaggaattgcggcaggagtttgagcatctcaacatgggaattgttgaacacgggtttgtggccgctctggaggcacggcctacgctcgtggatcaagtcagagcagctcaagtaaatgattctgaaatagcagagctgaaaaagaacatgagagtcggaaaagcccgggatttccacgaagatgagcatggcacaatctggttgggagaaagattgtgtgtacctgacgacaaggaactgaaggatctgatactcaccgaggctcatcagacccagtactccattcatccaggcagcactaaaatgtatcaagacctcaaagaaaagttttggtgggtcagcatgaggagagaaatagctgaattcgtcgcactctgcgatgtttgccaacgagtgaaggcagagcaccaaagaccagcaggtttactccaacctcttcaaatcccggaatggaaatgggaggagattggaatggactttataacgggactgccccggacatcgtcgggtcacgattcgatctgggtagtagtggatcgactcactaaggttgctcacttcataccagtacataccacatatacgggcaaaaggttggcggagctttacctttcgagaatcatgtgcctacatggagtacccaaaaagattgtatctgaccgagggagtcagttcacctcaaaattctggcagaagctgcaggaagaattggggacccgtttaaatttcagcacggcctatcacccgcaaactgatggtcagaccgagcgggtcaatcaaatcatggaagatatgttgagagcttgcgctgttgattttggtggagcttgggacaaaagcttgccatatgcggaattctcgtacaacaacagctaccaggccagtctacagatggcaccgtttgaagctttatacggccagaagtgccgcacacctctcttctgggatcagacaggtgagcgtcaactgttcggaacagaggtattagcggaagcagaagagaaagtcagaatcatcagggaaaggttgaggattgcccagtctcgacagaagagctacgcggataaccgtcgaagggagctcacttttgaggcaggagattacgtgtatcttcgtgtcactccgctccggggagtacaccgttttcagacgaaaggcaagttggcaccatgcttcgtgggaccatacaaaatcctggaacgaaggggggaagttgcttatcagttagaacttccatccaacatgatcggcatccatgacgtgttccacgtgtcccaattaaagaagtgcttaagggtacctgaagaacaggctgattcggaacacattgatatccaggaggacctaacatacgtggaaaagccggttcgtatacttgataccagtgaaaggagaaccagaaacaaggtcacctga

SEQ ID NO: 13859 - DNA, 4146 bp, Oryza sativa
  Clone ID: TFbOSC409054j.C1.o4.gm
atggtctacaccaggactggcaaccgcacgacaggcgagggcagcaacggcgaagaacgcgctgatggtgtgcaccccaacagtgattctggcaatggtccgccaccacttcccgagaacccgaccctggcccaagttatggcgcatcagactcagatgatggcagccatgatgcagcagatgcagcagcagcaccagcagatgcaccagaggatgatgcagtacgctgaacagcagcaccagcagtttggtccccctcccccgcaatccaagttgcctgagttcctgcgagtcaggccacccaccttctccagcaccaccaaccccatggaggcaaacgactggctccatgcaatagagaagaagctgaatctcctgcagtgcaatgatcaggagaaggtcgctttcgccacacaccagcttcagggtcctgcgtccgcttggtgggacaaccacatggccacccgcccaccgggtactgaagtcacatgggcagagttctgccgtagcttcaggaaggcacaggtgccagatggggtcgtggcacaaaagaagagggaatttcgtgcactccatcagggcaacaggacggtgacagagtacctccacgagttcaatcgcctcgcgcgatatgcaccggaggatgtccgcactgacgccgagaaacaagaaaagtttatggcaggcctggatgacgagctgaccaaccaactgatatccggggactacgctgactttgaaaggctggttgacaaggcaatccgtcaggaggatcagcgcaacaaaatggacaggaaaagaaaggcggcgcagttccggtccaaccaaggtagtcagcaccgaccgcgcttcactcctggacagcagggtggacctaccaccatgatcgtccgtcagcaccgcccgttccactctggcaacttccaccagggcgctagcggcagtcagaaccaccagggaggccagcccaaccgcggtgcagctccacgcccaccaatggcaccagcacagtcagcccagcccgcgcaagccaagaaggagacgggagcaaaaccagggtcctgcttcaactgtggcgagcttggccacttcgctgacaaatgcccgaagcccaggcgtgccggaccaaggtttatccaggctcgtgtcaaccacgcatctgtggaggaggcacaagcagcaccagaggtcgtactggtcaccctgaccaatgagaaaggagaaaccgtggtgtacaaatctctagtctcgccaaagaaaggagcctcgttgaatcagattgagacggaaatcccagtggacaccgaagagaagaacttgagaaaattggaggacatacccatagtctgcgagtatccagaggtgttccccgaagacctcaccaccatgccacccaagagggagattgaattccggattgatttggcaccaggaaccgctccaatctataagagaccgtacagaatggcggccaacgaattagcagaggtcaagaagcaagttgacgaacagctgcagaaagggtacattcgacccagcacttcaccttggggcgctccggtcatttttgtggagaaaaaggataagacaaagaggatgtgcgtcgattatcgcgcacttaacgaggtcacaatcaagaataaatatcctttgccgcgaatcgacgatttatttgatcaactgaaaggagctaaagtgttctctaagatagacctgcgatcaggctaccaccagttgagaatccgggaagaggatattccgaagacggccttcaccactcggtacgggctatatgagtgcacggttatgtccttcggacttactaacgcacccgcattcttcatgaatctgatgaacaaagtgttcatggaatttttggacaagtttgttgtggtattcatcgacaacattcttatctattcaaagtccgaagaggaacatgaacaacatctccgtctggtactcgagaagttgaaggagcaccagctatacgccaagttcagcaagtgtgacttctggttgacggaagtcaaatttctgggtcatgtcattacagctcagggtgtagcagttgatccatcgaacgtggagtcagttaccaagtggaccccaccgaagacagtgtcgcagattcgaagttttctaggactggctggttattaccgtcgtttcatcggaaacttctcaagaatcgcccgacccatgactcagttgcttaagaaagacgagaagtttaaatggacagctgagtgcgacaagagctttgaggagctcaaaaggaaattagtatccgcaccggttttgatcctgcccgaccagacgaaagacttccaagtctattgcgatgcatcccgtcacggacttggatgcgtcctaatgcaagagggcagagtggttgcatatgcctcgcggcagttgcgtccacacgaaggaaattatccaactcatgacttggaattggcagcagtggtccatgctttgaagatctggaggcactatctgatcggcaaccgctgcgaagtatatacggaccataaaagtctgaaatacatcttcacccaaccagacctaaaccttcgacaacgaagatggttggaactaatcaaagactatgacatgagtattcactaccacccgggtaaagccaatgtggtggcagacgctttaagccggaaaagttactgcactgctctatgcatcgagggcatgtgtgaggaattgcgacaggagcttgaacatctcaacatgggaattgttgaacacgggttcgtagccgctctggaggcacggcctacgctcgtggatcaagttagagccgctcaagtaaatgatccggaaatagcagaactgaaaaagaacatgagagtcggaaaagctcgggatttccacgaggatgagcatggcacaatctggatgggagaaagattgtgtgtaccggacgacaaggaattgaaggatctgatactcaccgaagctcatcagacccagtactccattcacccaggcagcaccaaaatgtaccaagaccttaaagaaaaattttggtgggtcagcatgagaagggaaatagctgaattcgtcgcactctgcgatgtttgccaacgagtgaaagcagagcaccaaagaccagcaggtttactccaacctctccaaatcccggaatggaaatgggaggagattggaatggactttataacgggactgccccggacatcatcgggacatgattcaatctgggtagtcgtggatcgactcaccaaggaagaattggggacccgtttaaacttcagcacggcctatcacccgcaaactgatggtcagaccgagcgtgtcaatcaaatcttggaggatatgttgagagcttgcgctcttgattttggtggagcttgggacaaaagcttaccatatgcggaattctcgtacaacaacagctaccaggccagtctacagatggcaccgtttgaagctctatacggccggaagtgccgcacaccgcttttctgggatcagacaggcgaacgtcaactgttcggaacagaagtattagcggaagcagaagagaaagtcagaatcatcagggaaaggttgaggattgctcagtctcgacagaagagctacgcggataaccgccgaagggagctcacttttgaggcaggagattacgtgtatcttcgtgtcaccccgctccggggagtacaccgctttcagacaaaaggcaagttggcaccacgcttcgtgggaccatacaaaattttggaacgaagaggagaagttgcctatcaactagaacttccgtccaacatgatcggcatccatgacgtgttccacgtatcccaattaaagaagtgtttaagggtacctgaagaacaggctgattcggaacacattgatatccaggaggacctaacatatgtggagaagccggccgaggcccagcccgacagccggccgcccgcccgcctcctctcggggtcgccgacagattccgatctctccgacgctccggtgtacttcgagatagtcgccgaggcaagggtgggcgtgatggagcggggcgggccctgcgacggcctctgtcgcttccggattcacctaggcacgagaggggactgcccgtcgcccgctggggacgggggtgaaacctga

SEQ ID NO: 13860 - DNA, 4887 bp, Oryza sativa
  Clone ID: TFbOSC409192j.C1.o1.fg
atgggttgcaagatggccggtcacccacccaaccaccgcggagaaggcatgattgattttgtggcagagttggcaagcatgacgctggtggtaggctaccccaacgcgccagagtacacgacgattccaccgctcagtggcgagcttcctcaccgtgttcgcttggaggtccacggctacgttggtacctgcctagccaatatggtggttaaggcatccggaggctcagcagatcacgcctgtcaggaggcagcatacctgatgatggccagactacaggagcgccacaactacatcttccacgacacggcataccggtttcaccctcgtcgagccagcaatgatgatgtcagtaccttccgtccgacagctggcaagaacgacaccacctttggtcacatgtgtgctgtgatgaggggattggataggatgcactcggatctgcaccaggcgaccaaggccttgaacgatgggaagctcatgaggatcgtcgctctgaaggacgagatagcgcgcctgaagagggagaacgctcagttaaagggtcttcccgcgccaggaggagtccggatccgcactacgccccgcaagactacgacggcacccgtgcgcgccagcttgcgcccaggaacccacctccatcagcagctcccgcagcacctccagttccgcccgcagttcctgcagctccagctccagctcccgcgtccgctctctccttcgctccagcatcagccgccagaggtccagccagtggcaccggagatggtctacaccaggaatggtagccgcgcaacaggcgagggcagcaacggcgaagagcgcactgatggggcgcatccccacagcgattccggcaatggtccgccaccacttcccgagaatccgacgctagcccaagtgatggcacatcagacacagatgatggcagccatgatgcagcagatgcagcagcagcaccagcagatgcaccagaggatgctgcagcacgccgaacagcagcaccagcagtttggtccccctccccctcagtccaagttgcctgagttcctacgtgagaaggttgctttcgccacacaccagcttcaaggtcccgcgtcagcttggtgggacaatcacatggccacccgcccaccaggtactgaagtcacttgggcagagttctgccgtagcttcaggaaggcgcaggtgccagatggggtcgtggcacaaaagaagagggaattccgggcgctccatcagggcaacaggactgtgacagagtacctccatgagttcaatcgcctcgcgcgatatgcaccagaggatgtccgcaccgacgccgagaagcaggaaaagttcatggtgggtctggatgacgagctgaccaagcaactgatatctggggactacgctgactttgagaggctggtggacaaggcaatccgtcaggaggatcaacgcaacaagatggacaggaagaggaaggccgcacagttcagggcacctcagggaagtcaccagaggccgcgcttcgctcccgggcagcagggtggacctaccaccatgatcgtccgccagtaccgcccgttcaatcctagcaactttcctcagggcgccagtggcagtcagaaccaccatggaggtcagcccaaccgcggtgcagctccacgcccaccaatggcaccggcacagtcaggcccgcccgcgcaagccaagaaggagactggagcaaaaccagggtcctgcttcaactgtggcgagcttggccacttcgctgacaaatgcccgaagcctaggcgtgccgggccaaggtttatccaggctcgtgtcaaccacgcatctgcggaggaggcacaagcagcaccagaggttgtactgggtacgtttcctgttaactcaatccctgcaacagtactttttgattctggtgcaacgcattctttcatttcaaagaaatttgtggggatgtatgggttaaggaaagaagagcttagcacaccaatgagagttcataccccgggaaataggtcaacctcagtcagttttagcccttcagtgctaatagaaatccaaagatcaccatttctagccaacctcattcttctcgaatccaaagacctagatgtcattcttgggatggattggctgaccaagttcaagggagtcatcgattgtgcgaatcacacagtcactttgaccaacgagaagggagaaaccgtggtgtacaaatcactagtctcaccaaagcaaggggtctctttgaatcagattgaagcagaaatcccagtggacaccgtggagaagaacttgaggaaattggaagatatacccatagtctgcgagtatccggaagtgttccccgaagacctcactaccatgccacccaagagagagattgaattccggattgacttggcaccgggaaccgctccaatttacaagagaccgtacagaatggcggccaacgaattagccgaggtcaagaagcaggttgatgagcagctgcagaaagggtacattcgaccaaaaaaagataagacgaagaggatgtgcgttgattatcgcgcactcaacgaggtcacaatcaagaacaaatatcccttgccgcgaatcgacgatttatttgatcaactgaaaggagctaaagtgttttctaagatagacctgcgatcaggctaccaccagttgagaattcgggaagaggatattccgaagacggccttcaccactcggtacgggctatatgagtgcacggttatgtccttcggacttactaacgcacctgcattcttcatgaatctgatgaacaaagtgttcatggaatttctggacaagtttgttgtggtattcatcgacgacatacttatctactcaaaatccgaagaagaacatgagcaacatctccgtctggtactcgagaagttgaaggagcaccagctatacgccaagttcagcaagtgtgacttatggttgacggaagtcaaatttctgggccatgtcattacagcccagggtgtggcagttgatccgtcgaacgtagagtcagtcaccaagtggaccctaccgaagatcgtgtcgcagattcgaagttttctaggactggcaggttattaccgccgattcatcgaaaacttctccagaatcgcccgacccatgactcagttgcttaagaaagatgagaagtttaaatggacagctgagtgcgataagagttttgaggagctcaagaagaaattagtatccgcaccggttttgattctgcccgaccagatgaaagacttccaagtctattgcgatgcatcccgtcacggacttggatgtgtcctaatgcaagagggcagagtggttgcgtatgcctcacggcagttgcgtccacacgaagggaattatccaactcatgacctggaattggcagcagtggttcatgctttgaagatctggaggcactatctgattggcaaccgctgcgaagtatatacggaccataagaactatgacatgagcattcactaccacccgggtaaagccaatgtggtggcagacgcgttaagcaggaaaagttactgcactgccctgtgcatcaagagcatgtgtgaggaattgcggcaggagtttgagcatctcaacgtgggaattgttgaacacgggttcgtagccgctctggaggcacggcctacgctcgtggatcaagtcagagcagctcaagtaaatgattctgaaatagcagagctaaaaaagaacatgagagtcgggaaagcccgggatttccacgaagatgaacatggcacaatctggttgggagaaagattatgtgtacctgacgacaaggaactgaaggatctgatactcaccgaggctcatcagacccagtactccattcatccaggcagcactaaaatgtatcaagacctcaaagaaaagttttggtgggttagcatgaggagagaaatagctgaattcgtcgcactctgcgatgtttgccaacgagtgaaggcagagcaccaaagaccagcaggtttactccaatctcttcaaatcccggaatggaaatgggaggagattggaatggactttataacaggactgccccggacatcatcgggtcacgattcgatctggatagtcgtggatcgactcactaaggttgctcatttcataccagtacataccacatatacgggcaaaaggttggcggagctttacctttcgagaatcatgtgcctacatggagtacccaaaaagattgtatccgaccgagggagtcagttcacctcaaaattctggcagaagctgcaggaagagttggggacccgtttaaatttcagcacggcctatcacccgcaaactgatggtcagaccgagcgagtcaatcaaatcttggaagatatgttgagagcttgcgctcttgattttggtggagcttgggacaaaagcttgccatatgcggaattctcgtacaacaacagctaccaggccagtctacagatggcaccgtttgaagctttatacggccggaagtgccgcacacctctcttctgggatcagataggcgagcgtcaactgttcggaacagaggtattagcggaagcagaagagaaagtcagaatcatcagggaaaggttgaggattgcccagtctcgacagaagagctacgcggataaccgtcgaagggagctcacttttgaggcaggagattacatgtatcttcgtgtcactccgctccggggagtacaccgttttcagaccaaaggcaagttggcaccacgcttcgtgggaccatacaaaatcctggaacgaaggggggaagttgcttatcagctagaacttccatccaacatgatcggcatccatgacgtgttccacgtgtcccaactaaagaagtgcttaagggtacctgaagaatag

SEQ ID NO: 13861 - DNA, 3429 bp, Oryza sativa
  Clone ID: TFbOSC409799j.C1.o20.fg
atggtctacaccaggaatggtagtcgcgcaacaggcgagggcagcaacggcgaagagcgcactgatggtgtgcatcccaatagcaattccggcaatggtccgccaccacttcccgagaatccgacgctagcccaagtgagggcacatcagggaagtcaccagaggccgcgcttcactcccgggcagcagggtggacctaccaccatgatcgtccgccagtaccgcccgttcaaccctagcaactttccccagggcgccagtggcagtcagaaccaccatggaggtcagcccaaccgcggtgcagctccacgcccaccagtggcaccagcacagtcaggcccgtccgcgcaagccaagaaggagactggaacgaaaccagggtcctgcttcaactgtggcgagcttggccatttcgccgacaaatgcccgaagcccaggtgtgccgggccaaggtttgtccaggctcgtgtcaaccacgcgtctgtagaggaggcgcaagcagcaccagaggtcgtactgggtacgttccctgttaactcaatccctgcaacagtactttttgattctggtgcaacgcattctttcatttcaaagaaatttgtggggatgcatgggttaaggaaagaagagcttagcacaccaatgagggttcataccccgggaaatagttcaacctcagtcagttttagcccttcagtgctaatagaaatccaaagatcaccatttctagccaacctcattcttctcgaatctaaagacctagatgtcattcttgggatggattggctgaccaagtttaagggagtcatcgattgtgcgaatcgcacagtcaccttgaccaacgagaagggagaaaccgtggtgtacaaatcactagtctcaccaaagcaaggggtctccttgaatcagattgaggcggaaatcccagtggacaccgtggagaagaatttgaggaaattggaagatatacccatagtctgcgagtatccagaagtgttccccgaagacctcactaccatgccacccaagagagagattgaattccggattgacttggcaccgggaaccgctccaatttacaagagaccgtacagaatggcggccaacgaactagcaaaggtcaagaagcaggttgatgagcagctgcagaaagggtacattcgaccaagtacttcaccttggggtgctccggtcatttttgtggagaaaaaggataagacgaagaggatgtgcgttgattatcgcgcactcaacgaggtcacaatcaagaacaaatatcccttgccgcgaatcgatgatttgtttgatcaactgaaaggagctaaagtgttttctaagatagacctgcgatcaggctaccaccagttgagaattcgggaagaggatattccaaagacggccttcaccactcggtatgggctatatgagtgcacggttatatctttcggacttaccaacgcacccgcattcttcatgaatctgatgaacaaagtgttcatggaatttctggacaagtttgttgtggtattcatcgacgacatacttatctattcaaagtccgaagaagaacatgagcaacatctccgtctggtactcgagaagttgaaggagcaccagctatacgccaagttcagcaagtgtgacttctggttgacggaagtcaaatttctgggccatgtcattacagctcagggtgtggcagttgatccatcgaacgtggagtcagttatcaaatggaccccacctaagaccgtgtcgcagattcggagttttcttgtacttgcgggttattaccgccgattcattgaaaacttctccaggatcgcccgtcccatgactcagttgcttaagaaagatgagaagtttaaatggacagctgagtgcgataagagttttgaggagctcaagaagaaattagtatccgcaccagttttgattctgcccgaccagatgaaagacttccaagtctattgcgatgcatcccgtcacggacttggatgtgtcctaatgcaacagggcagagtggtcgcgtatgcctcgtggcagttgcgtccacacgaagggaattatccaactcatgacctggaattggcagcagtggttcatgctttgaagatctggaggcactatctgattggcaaccgctgcgaagtatatacggaccataagagtctgaaatacatcttcacccaaccggacctaaatctgcgacaacgaagatggttggaactaatcaaagactatgacatgagcattcactaccacccgggcaaagccaatgtggtggcagacgcattaagcaggaaaagttactgcactgccctatgcatcgagggcatgtccgctctggaagcacggcctacgctcgtcgatcaagttagagccgctcaagtgaatgatcccgaaatagcagagctgaaaaagaacatgagagtcggaaaggctcgggatttccttgaggatgaacacggcacaatctggttgggagaaagattgtgtgtacctgacgacaaggaactgaagaatctgatactcaccgaggctcatcagacccagtactccattcatccaggcagcaccaaaatgtatcaagacctcaaagaaaagttttggtgggtcagcatgaggagagaaatagctgaattcgtcgcactctacgatgtttgccaacgagtgaaggcagagcaccaaagaccagcaggtttactccaacctcttcaaatcccggaatggaaatgggaggagatcagaatggactttataacaggtctgccccggacatcatcgggtcacgattcaatctgggtagtcgtggatcgactcactaaggatcagacaggtgagcgtcaactgttcgggacagaggtattagcggaagcagaagagaaagtcagaaccatcagggaaaggttgaggattgcccagtctcgacagaagagctacgcggataaccgccgaagggagctcacttttgaggcaggagattacgtgtatcttcgtgtcactccgctccggggagtacaccgttttcagacgaaaggcaagttggcaccacgcttcgtgggaccatacaaaatcttggaacgaaggggggaagttgcttatcagctagaacttccatccaatatgatcggcatccatgacgtgttccacgtgtcccaattaaagaagtgcttaagagtacccgaagaacaagctgattcggagcatattgatatccaggaggacctgacatatgtggagaagccggttcgtatacttgataccagcgaaagaagaaccagaaacaaggtcaccaggttttgccgagttcagtggagtcaccattcagaggaggaagcaacctgggaaagggaagatgagttgaaagccgcccatccgcacctcttcgccagctcctccgaatctcgggaccgagattccgtttaa

SEQ ID NO: 13862 - DNA, 4461 bp, Oryza sativa
  Clone ID: TFbOSC411348j.C1.o4.fg
atggtctacaccaggactggtagccgcgcaacaggcgagggcagcaacggtgaagaacgcgctgatggtgtgcaccccaacggtgattctggcaatggtccgccaccacttcccgagaatccgacgcttgcccaagttatggcacatcagactcagatgatggccgcgatgatgcagcagatgcagcagcagcaccagcagatgcatcagaggatgatgcagcacgccgaacagcagcaccagcagtttggtccccctccccctcagtccaagttgcctgagtttctacgtgtcaggccacccaccttctccagcaccaccaaccctatggaggcaaatgactggctccatgcgatagagaagaagctgaatctcctgcagtgcaatgatcaggagaaggtcgctttcgccacacaccagcttcagggtcctgcgtcagcttggtgggacaaccacatggccacccgcccaccgggtacggaagttacgtgggcagagttctgccgtagctttaggaaggcacaggtgccagacggggttgtagcgcaaaagaagagggaattccgggcgctccatcagggcaacaggacagtgacagagtacctccacgagttcaatcgcctcgcgcgatatgcaccagaggatgtccgcactgacgccgagaaacaggaaaagtttatggcaggcctggatgacgagctgaccaaccaactgatatccggggactacgctgactttgaaaggctggtcgacaaggcaatccgtcaggaggatcagcgcaacaaaatggacaggaaaagaaaggcggcgcagttccgatccaaccaaggtagtcagcaccgaccgcgcttcactcccggacagcagggtggacctaccaccatgatcgtccgacagcaccgcccgttccactctagcaacttccaccagggcgctagcggcagtcagaaccaccagggaggccagcccaaccgcggtgcagctccacgcccaccaatggcaccggcacagtcagcccagcccgcgcaagccaagaaggagacgggagcaaaaccagggtcttgcttcaactgtggcgagcttggccacttcgctgacaaatgcccgaagcccaggcgtgccgggctaaggtttatccaggctcgtgtcaaccacgcgtctgcggaggaggcacaagcagcaccagaggtcgtactgggtacgttccctgttaactcaatccctgcaacagtactttttgattctggtgcaacgcattctttcatttcaaagaaatttgtggggatgtatgggttaaggaaagaagagcttagcacaccaatgagggttcataccccgggaaatagttcaacctcagtcagttttagcccttcagtgctaatagaaatccaaagatcaccatttctagccaacctcattcttctcgaatccaaagacctagatgtcattcttgggatggattggctgaccaagtttaagggagtcatcgattgtgcgaatcgcacagtcaccctgaccaatgagaaaggagaaaccgtggtgtacaaatctctagtctcgccaaagaaaggagcctcgttgaatcagattgagacggaaatcccagtggacaccgaagagaagaacttgagaaaattggaggacatacccatagtctgcgagtatccagaggtgttccccgaagacctcaccaccatgccacccaagagggagattgaattccggattgatttggcaccaggaaccgctccaatctataagagaccgtacagaatggcggccaacgaattagcggaggtcaagaagcaagttgatgaacagctgcagaaagggtacatacgaccaagcacttcaccttggggcgctccggtcatttttgtggagaaaaaggataagacgaagaggatgtgcgtcgattatcgcgcacttaacgaggtcacaatcaagaataaatatcctttaccgcggatcgacgatttgtttgatcaactgaaaggagctaaagtgttttctaagatagacctgcgatcaggttaccaccagttgagaatccgggaagaggatattccgaagacggccttcaccactcggtacgggctatacgagtgcacggttatgtctttcggacttactaacgcacccgcattcttcatgaatctgatgaacaaagtgttcatggaatttctggacaagtttgttgtggtattcatcgacgacattcttatctattcaaagtccgaagaggaacatgaacaacatctccgtctggtactcgagaagttgaaggagcaccagctatacgccaagttcagcaagtgtgacttctggttgacggaagtcaaatttctgggtcatgtcattacagctcagggtgtagcagttgatccatcgaacgtggagtcagttacaaaatggaccccaccaaagaccgtgtcgcagattcggagttttctaggactggcaggttattaccgccgattcatcgaaaacttctccagaatcgcccgacccatgactcagttgcttaagaaagacgagaagtttaaatggacagctgagtgcgacaagagctttgaggagctcaaaaggaaattagtatccgcaccggttttgatcctgcccgaccagacgaaagacttccaagtctattgcgatgcatcccgtcacggacttggatgtgtcctaatgcaagagggcagagtggttgcatatgcctcgcggcagttgcgtccacacgaaggaaattatccaactcatgacttggaattggcagcagtggtccacgctttgaagatctggaggcactatctgatcggcaaccgctgcgaagtatatacggaccataaaagtctgaaatacatcttcacccaaccagatctaaaccttcgacaacgaagatggttggaactaatcaaagactatgacatgagtattcactaccacccgggtaaagccaatgtggtggcagacgctttaagccggaaaagttactgcactgctctatgcatcgagggcatgtgtgaggaattgcggcaggagtttgaacatctcaacgttggaattgttgaacacgggttcgtagccgctctggaggcacggcctacgctcgtggatcaagttagagccgctcaagtaaatgatccggaaatagcagaactgaaaaagaacatgagagtcggaaaagctcgggatttccacgaggatgagcatggcacaatctggatgggagaaagattgtgtgtaccggacgacaaggaattgaaggatctgatactcaccgaagctcatcagacccagtactccattcacccaggcagcaccaaaatgtaccaagaccttaaagaaaaattttggtgggtcagcatgaggagagaaatagctgaattcgtcgcactctgcgatgtttgccaacgagtgaaagcagagcaccaaagaccagcaggtttactccaacctcttcaaatcccggaatggaaatgggaggagattggaatggactttataacaggactgccccggacatcatcgggacatgattcaatctgggtagtcgtggatcgacttaccaaggtggctcactttataccagtacataccacctatacgggaaagagattggcagaattgtacctcgcaaggatcatgtgtttgcatggggtacccaagaagatagtatccgaccgaggtagtcagttcacctcaaagttctggcagaagctgcaggaagaaatggggacccgtttaaatttcagcacggcctatcacccgcaaactgatggtcagacagactaccaggccagtctacagatggcaccgtttgaagctctatacggccggaagtgccgcacacctctcttctgggatcagacaggcgaacgtcagctgttcggaacagaagtattagcggaagcagaagagaaagtcagaatcatcagggagagattgaggattgctcagtctcgacagaagagctacgcggataaccgtcgaagggagctaacttttgaggccggagattacgtgtaccttcgtgtcaccccgctccggggagtacaccgctttcagacaaaaggcaagttggcaccacgcttcgtgggaccgtacaaaattttggaacgaaggggagaagttgcctatcagctagaacttccatccactatgatcggcatccatgacgtgttccatgtgtcccaattaaagaagtgtttaagggtacctgaagaacaggctaattcggaacacattgatatccaagaggacctaacatatgtggagaagccggttcgcatacttgacactagcgaaaggagaaccagaaacaaggtcaccaggttttgccgtgttcagtggagtcatcattcagaagaggaagcaacctgggaaagggaagatgagttgaaggccgcccatccgtacctcttcaccagctccaccgaatctcggggccgagattccgtttaa

SEQ ID NO: 13863 - DNA, 3852 bp, Oryza sativa
  Clone ID: TFbOSC4117j.C1.o2.fg
atgccgatgacgcggcgctcaccccatatccctcgcctccttttcctccacgagctcgaatccgagagtttcgattcggcagcgacgacgttggagtgggtggtgcttgaggcgatcatggtgctgcttctgacgctgccagtgctggacaggctcccggtgcgggatgatctccgtggtgcggagcgcgctgaagacgatgatgttgatggtgctcttctgcctcttcctgctgatggacatctactggaacgtgtcgattggcccgaccgtgacccgcccaccgccgacttgcacccgcgccagacgacgcaaggagagagaaagaggggggaattggggaagaggagggtgagctatgtctggtttcaagttcagggagagccagccgacgctcagccgagcacggacgcgagctgcgccttgaaggaagaggaaggcggggtggccatgggcgccggcgaggagctcaaggaaggaggagggaaggcccaaggtctgtggggcgcggtggagccggagggcgatgatctcgtcgactatcggcaggaccggcaggcgctcgccgcgatacttcgcgccgtgcccgccgagatgctcgccacgctcgctgtcaaggagacggcgcaggaggcgtgggaagcgatcaagactcgccgtatcggtgtgcagcgcgtgcgtgaggtgaatgcacagcagctgcgccgagaattcggtgatatcctcttcaaggacggtgaaaccgtcgacgacttctcgatgcggatcggcggcctcgccaacaaccttcgcaccttaggtgataatatcactgaagctgaggtcgttcagaaattgttgcaggttgtcccagaacatctccagcaaatagccatctcgattgagaccttgctcgacgtcaatgaggtgtctctcgaggaggttactgggcgtctgcgctccgtcgagcaacgcaagcagcgcaagactgcggcggcatcgagtcaggtcgacgccaatggccgtctcctcttcaccgaggaagaatggctggcgaaattccgcaaggcggcctctctgcaagacgccgctcactcctccggcggcaacggcgaccaccggggtcgagggcgtgggaagaaggacggtggagccccgaaggaggcccagcccaagccagccaacccgggaggccgtaacccgggaaattgcaagaattgcggcaagaggggacattgggccaaagactgtcgcagcaagcccaaggcccagcaagcttacgtagcccaggaggaggacgaagagcctgctctgctcctagccaaggtgcagctggatccgccgcgtcctcgcgtcgctgcaccgacaaacgtcgtctcgccaccgagcgcgccgagggcgccttcgccgatgggcgaactcgccgtagtcgaggcaagggtcttcgcgcagctagacgacggtggcgaacatgatccggcaatgtggatcctggatactggcgcaaccaaccatatgaccgggtcccgctccgctttcgccgagctcgacacggtggtcaccggcactgtcaggtttggcgacggctcggtggttcgcatcgagggccgcggcaccgtcctgttctcctgcaggttcggggaacaccgcggcatcgccggggtctactacatcccgcggctcatggcgaacatcgtcagccttggacagctggatcgttccggcagcaaggtactgattcatcacggcgtcctgcgcgtgtgggatcctcgagggcacctactcgtccgtgtccgacgctccgacgactgcctctacaccatcaatctgtacatcgaccgtccggtctgcctcgcggcaaggagcgccgagccggcgtggcggtggcacgccaggagcaaggatgaggccgcgaacgccatcaagcactttcaggcccgtgcagaggtggagtccgggcgcaaactccgtgcactgcgcacggatcgtggcggcgaattcacctcaatcgaatttggggaatactgcgccaatctcggagttggtcggcagttgacggcgccctactccccgcagcagaacggagtagtggagcatcgaaaccaaaccatcgtcgccactgcccgcagcatgttgaaggcgaagggtgttcctgggcggttctggggagaggccatgtccacagcggtctttctcttgaatcgttcgccgacgaaaagcttggacaaccaaacgccctatgaagcatggtatggccaacggcccgctatgcatttccggcgcactttcgggtgcagggggcacgtcaagatcaccaagcccgggctgaagaaactcgatgaccggagtgcgccaatggtgctcctcggctacgtgcaaggctcgaaggcctaccggctctatgatccactcgagctccatgttgtgagcgccgacgaacctgcttcactggctgaggcggatccaaactggcgtggcgccatgcaagacgagcttaacgcgatcgtcgacaacgacacttggtcgctcactgacctaccccatggccaccgtgcaattgggctaaaatgggtctacaagctgaaacgtgacgaacagggggcgatcggggtggacttcgacgaggtcttcgcacctgtcgcccggctggaatcggtgcgcctccttctcgccgtcgccgcgcaccaagggtggcaagtccaccacatggacgtcaagtcggcattcctcaacggcgagctgctcgaggaagtttatgtctcgcagccgctgggtttcgtcgacgacaaccacaagaacaaggtgtatcgcctgcacaaagctctttacggcttgcgccaggcgcctcgcgcgtggaatgccaaacttgatagctccttgctgtcactcggctttcaccgcagcagctccgagcatggtgtgtacacacgcaccaggggaggaagacgactgacggtgggcgtctacgtcgatgacctcatcatcaccggcgatcacgacgacgagatccgcagcttcaagggagagatgatgaagctcttcaagatgagtgatttggggcactcagatactacctcggcatcgaggttacccaggacagtgatgggatcacgctggggcaagccgcatatgccggcaagattcttgagaaggcaggactcaaggactgcaatccctgtcagactcccatggagcttggttgggagtctgcgctatctcgtcaacacgcgacccgacctggcattctctgttgggtatgtcagtcgcttcatggagtcacccagggaagatcatctcgcagccgttcggcgcatactgcgctatgtggcaggcactcgctgctggggaattcgatttggcccaggtgcacggtgcgctttgccaatgttggttggttactctgacagtgatctggctggcgatccagatgagcgaaagagcacgtccggccagattttcttcgtcaatggcgggcctatcacttggcagtcctccaagcagaaggtggtggcattgtcctcctgtgaggccgagtacatcgccgcagccgccgcaacatgtcaaggagtatggctcgcgcggctgttagcggaggtgctgggcgacgagatcgccgcaccgctgctgaaggtggacaaccagtccacaatatcattgataaaaaatccagtgcatcatgaccggagtaagcatatcgatgtcaaatatcattatatccgggagtgtgcagaaaagaaactgatcgaaatgatgttcgtgggaactgcggagcagctcggtgatatattcaccaaatctctgggcagaaccaggtttcaggagcttcgtttaaagatcggtgtctgttctcttgacaagagcggtcagacttaa

SEQ ID NO: 13864 - DNA, 5130 bp, Oryza sativa
  Clone ID: TFbOSC412583j.C1.o1.fg
atggccggtcacccacccaaccaccgcggagaaggcatgatcgacttcgtggcagagctggcacgcatgacactggtggtgggctaccccaacgcgccagagtacacgaccatcccaccgctcagtggcgagcttcctcaccgtgtccgcttggaggtccatggctacgtggggacttgcctcgctaacatggcggttgaggcgtcaggaggcacagcagatcatgcctgtcaggaggcagcctacttgatgatggccaggttacgggagcgccacgactacatcttccacgacacggcgtaccgctaccacccccgtcgagcccatggtgatggcgtcagctccttccgtccgacagctggcgagaacgacaccaccttcggtcacatgtgtgctgtgatgaggggattggaccggatgcactcggacctgcacaaggcgaccaaggccttgaatgatgggaagctcatgaggatcgtcgctctgaaggacgagatagcgcgcctgaagaaggagaatgctcagttgaagggtcttccagcaccaggaggagtccggatccgcactacgccccgtaagaggacgactgcacccgtgcgcatccagcttgcgcccaggaacccacctccagcagcagcagctccggcagttcctccagctccagctccagctccagctccagctcccgcgttcactctctccttcgctccagcatcagccgccagaggaccagccagtggtaccggaggttgcttgtttgggatggtctacaccaggactggcaaccgcacgacaggcgagggcagcaacggtgaagaacgcgctgatggtgtgcaccccaacagtgattctggcaatggtccgccaccacttcccgagaatccgacgcttgcccaagttatggcacatcagactcagatgatggcagccatgatgcagcagatgcagcagcagcaccagcagatgcaccaaaggatgatgcagcacgccgagcagcagcaccagcagtttggtccccctccccctcagtccaagttgccagaatttctacgcgtcaggccacccaccttctccagcaccaccaaccccatggaggcgaacgactggctccatgcaatagagaagaagctgaatctcctgcagtgcaatgatcaggagaaggtcgcttttgccacacaccagcttcagggtcctgcgtcagcttggtgggacaaccacatggccacccgcccaccgggtactgaagtcacatgggcagagttctgccgtagcttcaggaaggcacaggtgccagatggggtcgtggcacaaaagaagagggaattccgtgcgctccatcagggcaacaggactgtgacagagtacctccatgagttcaatcgcctcgcgcgatatgcaccagaggatgtccgcaccgacgccgagaagcaggagaagttcatggcgggtctggatgatgagctgaccaaccaactgatatctggggactacgctgactttgagaggctggtcgacaaggcaatccgtcaggaggaccaacgcaacaagatggacaggaagaggaaggccgctcagttcagggcacctcagggaagtcaccagaggccgcgcctcactcccggacagcagggtggacctaccaccatgatcgtccgccagcaccgcccgttcaaccctagcaacttccaccagggcaccagtggcagtcagaaccaccatggaggtcagcccaaccgcggtacagctccacgcccaccgatggcaccggcacagtcaggccagcccgcacaagccaagaaggagacgggagcaaaaccagggtcctgcttcaactgtggcgagcttggccacttcgctgacaaatgcccgaagcccaggcgtgccggaccaaggtttatccaggctcgtgtcaaccacgcatctgcggaggaggcacaagcagcaccagaggtcgtactgggtacgtttcctgttaactcaatccctgcaacagtactttttgattctggtgcaacgcattctttcatctcaaagaaatttgtcgggatgcatgggttaataagagaggaacttagcacaccgatgcgggttcataccccagggaatagctccacttcggttcaattcagcccttctataacaatagaaattcaaaggtcaccatttctagccaacctcattcttctcgaatccaaagacctagatgtcattcttgggatggattggctgaccaagtttaagggagtcatcgattgtgcgagtcgcacagtcaccttgaccaacgagaagggagaaaccgtggtgtacaaatctctagtctcaccaaagaaaggggtctcgttgaatcagattgagacggaaatcccagtggacaccgtagagaagaacttgcggaagttggaagatatacccatagtctgcgagtatccagaagtgttccccgaagacctcactaccatgccacccaagagagagattgaattccggattgacttggcaccgggaaccgctccaatttacaagagaccatacaggatggcggccaacgaagtagcagaggtcaagaagcaagttgatgagcagctgcagaaagggtacatacgaccaagcacttcaccttggggcgctccggtcatttttgtggagaaaaaggataagacgaagaggatgtgcgtcgattatcgcgcacttaacgaggtcacaatcaagaataaatatcctttaccgcggatcgatgatttgttcgatcaactgaaaggagctagagtgttttctaagatagacctgcgatcaggctaccaccagttgagaatctgggaagaggatattccgaagacggccttcaccactcggtacgggctatatgagtgcacggttatgtctttcggacttaccaacgcacccgcattcttcatgaacctgatgaacaaagtgttcatggaatttttggacaagtttgttgtggtgttcatcgacgacattcttatctactcaaaatccgaggaagaacatgagcaacatctccgtctggtactcgaaaagttgaaggagcaccagctatacgccaaattcagcaagtgtgacttctggttgacggaagtgaaatttctgggtcatgtcattacggctcagggtgtggcagtcgacccatcgaacgtggagtcagttaccaaatggaccccacctaagaccgtgtcgcagattcggagttttctaggactggcaggttattaccgccgattcatcgaaaatttctccaggatcgcccgacccatgactcagttgcttaagaaagatgagaagtttaaatggacagctgagtgcgataagagttttgaggagctcaagaagaagttagtatccgcaccagtattgattctgcccgacccgacgaaagacttccaagtctattgtgatgcatcccgtcacggacttggatgtgtcctaatgcaagagggcagagtggttgcgtatgcctcgcggcagttgcgtccacacgaaggaaattatccaactcatgacttggaattggcagcagtggttcatgctttgaagatctggaggcactatctgattggaaaccgctgcgaagtatatacggaccataagagtctgaaatacatcttcacccaaccggacctaaaccttcgacaacgaagatggttggaactaatcaaagactatgacatgagtattcactaccacccgggtaaagccaatgtggtggcagacgcattaagccggaaaagttactgcactgccctatgcatcgagggcatgtgtgaggaattgcggcaggagtttgagcatctcaacgtgggaattgttgaacacgggttcgtagccgctctggaggcacggcctactctcgtggatcaagtcagagcagctcaagtaaatgattctgagatagcagagctgaaaaagaatatgagagtcggaaaggctcgggatttccacgaggatgagcatggcacgatctggatgggagaaagattgtgtgtacctgacgacaaggaactgaaggatctgatactcaccgaggctcatcagacccagtactccattcacccaggcagcaccaaaatgtaccaagacattaaagaaaaattttggtgggtcagcatgagaagggaaatagctgaattcgtcgcactctgcgatgtttgccaacgagtgaaagcagagcaccaaagaccagcaggtttactccaacctcttcaaatcccggaatggaaatgggaggagattggaatggactttataacaggactgccccggacatcatcgggtcacgattcaatctgggtagtcgtggatcgactcaccaaggtggctcactttataccagtacataccacctatacgggaaagagactggcagaattgtacctcgcaaggatcatgtgtttgcatggggtacccaggaagatagtatccgaccgaggtagtcagttcacctcaaagttttggcagaaattgcaggaagaattggggacccgtttaaatttcagcacggcatatcacccgcaaactgatggcgaacgtcaactgttcggaacagaagtattaacggaagcagaagagaaagtcagaatcatcagggaaaggttgaggattgctcagtctcgacagaagagctacgcggataaccgtcgaagggagctcacttttgaggcaggagattacgtgtatcttcgtgtcactccgctccggggagtacaccgttttcagacgaaaggcaagttggcaccacgcttcgtgggaccatacaaaattttggaacgaaggggagaagttgcttatcagttagaacttccatccaatatgatcggcatccatgacgtgttccacgtgtcccaattaaagaagtgtttaagggtacctgaagaacaggctgattcggaacacattgatatccaggaggacctaacatatgtggagaagccggttcgcatacttgataccagcgaaaggagaaccagaaacaaggttactaagttttgccgagttcagtggagtcatcattcagaagaggaagcaacctgggaaagggaagatgagttgaaagccgcccatccgcacctcttcaccagctcctccgaatctcggggccgagattccgtttaa

SEQ ID NO: 13865 - DNA, 5475 bp, Oryza sativa
  Clone ID: TFbOSC413746j.C1.o1.np
atggccggccacccacccaaccaccgcggagaaggcatgattgactttgtggcagagttagcacgtatgacgctggtggtgggctaccccaacgcgccagagtacacgactgttccaccgcttagtggcgagcttcctcaccgtgtccgcctggaggtccatggctatgtgggcacctgcctcgctaacatggtggttgaggcgtccggaggcacagcagatcacgcctgttaggaggcagcatacctgatgatggccagactacgggagcgccacaactacatcttccacgacacggcgtaccgatttcaccctcttcgagccagcggtgatgatgtcagtactttccgtccgacagccggcgagaacgacactacctttggtcacatgtgtgctgtgatgaggggattggataggatgcactcggacctgcacaaggcgtccaaggccttgaatgatgggaaactcatgagaatcgtcgctctgaaggacgagatagcgcgcctgaagagggagaatgctcagttaaagggtcttcccgcgccaggaggagtccggatccgcactacgccccgtaagacgacaactgcacccgtgcgcatccagcttgcgcccaggaacccacctccatcagcagctcccgcagcacctccaattccgcccgtagctccagtagttcctgtagctccagcaccagctctaactcccgttcctgtgtcagctcccacgtccgctctctccttcgctccagcatcagccgccaggggtccagccagtggcaacggaggttggttgtctgctactcccaatggcagtcgcgatcttagcagtagtagctccagtggctcagagccgggcagcggcgagacttatctgccaggctccaggagtcgctttgagggacctgatctcttcctccagatggtctacaccaggaatggtagccgcgcaacaggcgagggcagcaacggcgaagagcacactgatggtgttcatcccaacagcgattccggcaatggtccgccaccacttcccgagaatccgacgctagcccaagtgatggcacatcagactcagatgatggcagccatgatgcagcagatgcagcagcagcaccagtagatgcaccagaggatgctgcagcacgccgaacaacagcaccagcagtttggtccccctccccctcagtccaagttgccagagtttctacgtgtcaggccacccactttctccagcaccaccaaccctatggaggcgaatgattggctccatgccatagagaagaagctgaatctcctgcagtgcaatgatcaggagaaggttgctttcgccacacaccagcttcaaggtcttgcgtcagcttggtgggacaatcacatggccacccgcccgccaggcactgaagtcacttgggcagagttctgtcgtagcttcaggaaggcgcaggtgccagatggggtcgtggcacaaaagaagagagaattccgagcactccaccagggcaacaggacggtgacggagtatctccatgagttcaatcgcctcgcgcgatatgcaccggaggatgtccgtactgacgccgagaagcaggaaaaattcctagcaggtctggatgatgagctaaccaaccagttgatatctggagattacgccgatttcgaaaggctggtggacaaggcaatccgtcaggaggatcaacgcaacaagatggacaggaagaggaaggccgctcagttcagggcacatcagggaagtcaccagaggccgcgcttcgctaccgggcagcagggtggacctaccaccatgatcgtccgccagtaccgcccgttcaaccctagcaacttcccccagggcgccagtggcagtcagaaccaccatggaggtcagcccaaccgtggtgcagctccacgcccaccagtggcaccggcacagtcaggcccgtccgcgcaagccaagaaggagactggaacaaaaccagggtcctgcttcaactgtggcgagcttggccacttcgctgacaaatgcccgaagcctaggcgtgccgggttaaggtttgtccaggctcgtgtcaaccacgcatctgcggaggaggcacaagcagcaccggaggtcgtactgggtacgtttcctgttaactcaatccctgcaacagtactttttgattctggtgcaacgcattctttcatttcaaagaagtttgtcgggatgcatgggttaataagagaggaacttagcacaccaatgcgggttcataccccagggaatagctccacttcggttcaattcagcccttctataacaatagaaattcaaagatcaccatttctagctaacctcattcttctcgaattcaaagacctagatgtcattcttgggatggattggctaaccaagttcaagggagtcattgattgtgcgaatcgcacagtcaccttgaccaacgagaagggagaaacagtagtgtacaaatcaccagactcaccaaagcaaggggtctccttgaatcagattaggcggaaatccagtggtcaccgtggagaagaatttgaggaaattggaagatatccccatagtctgcgagtatccagaagtgttccccgaagacctcactaccatgccacccaagagagagattgaattccggattgacttggcaccgggaaccgctccaatttacaagagaccgtacagaatggcggccaacgaactagcagaggtcaagaagcaggttgatgagcagctgcagaaagggtacattcgaccaagtacttcaccttggggtgctccggtcatttttgtggagaaaaaggataagacgaagaggatgtgcgttgattatcgcgcactcaacgaggtcacaatcaagaataaatatcctttgccgcgaatcgatgatttgtttgatcaactgaaaggagctaaagtgttttctaagatagacctacgatcacgctaccaccagttgagaattcgggaagaggatattccaaagacggccttcaccactcggtacgggctgtatgagtgcacggttatgtccttcggacttaccaacgcacccacattcttcatgaatctgatgaacaaagtgttcatggaatttctggacaagtttgttgtcgttttcatcgacgacttacttatctattcaaagtctgaagaagaacacgagcagcatctccgtctggtactcgagaagttgaaggagcaccagctatacgccaagttcagcaagtgtgacttctggttgacggaagtcaaatttctgggccatgtcattacagctcagggtgtggcagttgatccatcgaacgtggagtcagttaccaaatggaccccacctaagaccgtgtcgcagatttagagttttcttggacttgcgggttattacagccgattcattgaaaacttctccaggatcgcccgacccatgaagatgagaaagatgagaagtttaaatggacagctgagtgcgataagagttttgaggagctcaagaagaaattagtatccgcaccagttttgattctgcccgaccagatgaaagacttccaagtctattgcgatgcatcccgtcacggacttggatgtgtcctaatgcaagagggcagagtggtcgcgtatgcctcgcggcatttgagtccacacgaagggaattatccaactcatgacctggaattggcagcagtggttcatgctttgaagatctggaggcactatctgattggcaaccgctgcgaagtatatacggaccataagagtctgaaatacatcttcacccaaccggacctaaatctccgacaacgaagatggttggaactaatcaaagactatgacatgagcattcactaccacccgggtaaagtcaatgtggtggcagacgcattaagcaggaaaagttactgcactaccctatgcatcgagggcatgtgtgaggaattgcggcaggagtttgagcatctcaacgtgggaattgttgaacacgggttcatagccgctctggaggcacggcctacgctcgtggatcaagtcagagcaggtcaagtgaatgatcctgaaatagcagagctgaaaaagaacatgagagtcgaaaaggctcgggatttccttgaggatgaacacggcacaatctggttgggagaaagattgtgtgtacttgacgacaaggaattgaaggatctgatactcaccgaggctcatcagacccagtactccattcatccaggcagcaccaaaatgtatcaagacctcaaagaaaagttttggtgggtcagcatgaggagagaaatagctgaattcgtcgcactctgcgatgtttgtcaacgagtgaaggcagagcaccaaagaccagcaggtttactccaacctcttcaaatcctggaatggaaatgggaggagattggaatggactttataacaggacttccccggacatcatcgggtcacgattcaatctaggtagtcgtggatcgactcactaaggttgctcacttcataccagtacataccacgtatacgggcaaaaggttggcggagctctacctctcgagaatcatatgtctacatggagtacccaaaaagattgtatctgatcgagggagtcagttcacctcaaaattctggcagaagctgcaggaagaattggggacccgtttaaatttcagcacggcctatcacccgcaaactaatggtcagaccgagcgagtcaatcaaatcttggaagatatgttgagagcttgcgctcttgattttggtggagcttgggataaaagcttgccatatgcggaattctcgtacaacaacagctaccaggccagtctacagatggtaccgtttgaagctttatacggccggaagtgccgcacacctctcttctgggatcaggcaggcgagcgtcaactgttcgggatagaggtattagcggaagcagaagagaaagtcagaaccatcagggaaaggttgaggattgcccagtctcgacagaagagctacgcggataaccgccgaagggagctcacttttgaagcaggggattacgtgtatcttcttgtcactccgctccggggagtacaccgttttcagacgaaaggtaagttggcaccacgcttcgtgggaccatacaaaatcttggaacgaaggggggaagttgcttatcagctagaacttccatccaatatgatcggcatccatgacgtgttccacgtgtcccaattaaagaagtgcttaagagtacccgaagaacaaactgattcggagcatattgatatccaggaggacctgacatatgtggagaagccggttcgtatacttgataccagcgaaagaagaaccagaaacaaggtcaccaggttttgccgagttcagtggagtcaccatccagaggaggaagcaacctgggaaagggaagatgagttgaaagccgcccatccgcacctcttcgctagctcctccgaatctcggggccgagattccgtt

SEQ ID NO: 13866 - DNA, 5019 bp, Oryza sativa
  Clone ID: TFbOSC414115j.C1.o1.fg
atggtggttgaggcgtccggaggcacagcagatcacgcctgtcaggaggcagcatacctgatgatggccagactacgggagcgccacaactacatcttccatgacatggcataccgttttcaccctcgtcgagccagtggtgatgatgtcagcaccttccgtccgacaaccggccagaacgacaccacctttggtcacatgtgtgctgtgatgagtggattggataggatgcactcggacctgcacaaggcgaccaaggccttgaacgatgggaagctcatgaggatcgtcgctctgatggacgagatagcgcgcctgaagagggagaatgctcagttaaagggtcttcccgcgccaggaggagtccggatccgcaccacaccccgcaagacgacgacggcacccgtgcgcatccagcttgcgcccaggaacccacctccatcagcagctcccgcagcacctccagttccgcccgcagttcctgcagctccagctccagctcccgcgtccgctctctccttcgctccagcatcagccgccaggggtccagccagtggcaacggaggttgcttgcttgggatggtctacaccaggaatggtagccgcgcaacaggcgagggcagcaacggcgaagagcgcactgatggggcgcatccccacagcgattccggcaatggtccgccaccacttcccgagaatccgacgctagtccaagtaatggcacatcagacccagatgatggcagccatgatgcagcaccagcaccagcagatgcaccagcggatgctgcagcacgccgaacagcagcatcaacagtttggtccccctccccctcagtccaagttgccagagtttctacgtgtcaggccacccaccttctccagcaccaccaaccctatggaggcgaatgactggctccatgccatagagaagaagctgaatctcctgcaatgcaatgatcaggagaaggttgctttcgccacacaccagcttcaaggtcccgcgtcagcttggtgggacaatcacatggccacccgcccaccaggtactgaagtcacttgggtagagttctgccgtagcttcaggaaggcgcaggtgccagatggggttgtggcacaaaagaagagggaattccgggcactccatcagggcaacaggactgtgacagagtacctccacgagttcaatcgcctcgcgcgatatgcaccagaggatgtccgcaccgacgccgagaagcaggaaaagttcatggcgggtctggatgacgagctgaccaaccaactgatatctggggactacgctgacgttgagaggctggttgacaaggcaatccgtcaggaggatcaacgcaacaagatggacaggaagaggaaagccgcacagttcagggcacctcagggaagtcaccagaggccgcgcttcgctcccaggcagcagggtggacctaccaccatgatcgttcgtcagcaccgcccgttcaaccctagcaactttccccagggcgccagtggcagtcagaaccaccatggaggtcagtccaaccgcggtgcagctccacgcccaccaatggcaccggcacagtcaggcccgcccgcgcaagccaagaaggagactggagcaaaaccagggtcctgcttcaactgtggtgagcttggccacttcgctgacaaatgcccgaagcctaggcgtgccgggccaaggtttatccaggctcgtgtcaaccacgcatctgcggaggaggcacaagcagcaccagaggttgtactgggtacgttttctattaactcaatccctgcaacagtactttttgattctggtgcaacgcattcgttcatttcaaagaagtttgttgggatgcatgggttaataagagaggaacttagcacaccgatgcgggttcataccccagggaatagctccacttcggttcaattcagcccttctataacaatagaaattcaaagatcaccatttctagccaacctcattcttctcgaatccaaagacctagatgtcattcttgggatggattggctgaccaagtttaagggggtcatcgattgtgcgaatcgcacagtcaccttgaccaacgagaagggagaaaccgtggtgtacaaatcactagtctcaccaaagcaaggggtctctttgaatcagattgaagcagaaatcccagtggacaccgtggagaagaatttgaggaaattggaagatatacccatagtctgcgagtatccggaagtgttcctcgaagacctcactaccatgccacccaagagagagattgattccggattgacttggcaccgggaaccgccccaatttacaagagaccagaaaaaggataagacgaagaggatgtgcgttgattatcgcgcactcaacgaggtcaccatcaagaacaaatatcctttgccgcgaatcgatgatttgtttgatcaactgaaaggagctaaagtgttttctaagatagacctgcgatcaggctaccaccagttgagaattcgggaggaggatattccgaagacggccttcaccactcggtacgggctatatgagtgcacggttatgtcgttcggacttaccaacgcacccgcattcttcatgaatctgatgaacaaagtgttaatggaatttctggacaagtttgttgtggtgttcatcgacgacattcttatctattcaacgtccgaagaagaacatgaacaacatctccgtctagtactcgagaagttaaaggagcaccagctatacgccaagttcagcaagtgtgacttctggttgacggaagtcaaatttctgggccatgtcattacagctcagggtgtggcagttgatccatcaaacgtggagtcagttaccaaatggaccccgccgaagaccgtgtcgcagattcgaagttttcttggacttgcaggttattaccgccgattcatcgaaaacttctccagaatcgcccgacccatgactcagttgcttaagaaagatgagaagtttaaatggacaactgagtgcgataagagttttgaggagctcaaaaagaaattagtatccgcaccagttttgattctgcccgaccagatgaaagacttccaagtctattgcgatgcatcccgtcacggacttggatgtgtcctaatgcaagagggcatagtggttgcgtatgcctcgcggcagttacgtccacacgaagggaattatccaactcatgacctggaattggcagcagtggttcatgctttgaagatctggaggcactatctgattggcaaccgctgcgaagtatatacggaccataagagtctgaaatacatcttcacccaaccggacctaaatctccgacaacgaagatggttggaactaatcaaagactatgacatgagtattcactaccacccgggtaaagccaatgtggtggcagacgcattaagccggaaaagttactgcactgccctatgcatcgagggcatgtgtgaggaattgtggcaggagtttgagcatctcaacgtgggaattgttgaacacgggtttgtagccgctctggaggcacggcctacgctcgtggatcaagtcagagcagctcaagtaaatgattctgaaatagcagagctgaaaaagaacatgagggtcggaaaagcccgggatttccacgaagatgagcatggcacaatctggttgggagaaagattgtgtgtacctgacgacaaggaactgaaggatctgatactcaccgaggctcatcagacccagtactccattcatccaggcagcactaaaatgtatcaagacctcaaagaaaagttttggtgggtcagcatgaggagagaaatagctgaattcgtcgcactctgcgatgtttgccaacgagtgaaggcagagcaccaaagaccagcaggtttactccaacctcttcaaatcctggaatggaaatgggaggagattgggatggactttataacgggactgccccggacatcgtcgggtcacgactcgatctgggtagtcgtggatcgactcactaaggttgctcacttcataccagtacataccacgtatacgggcaaaaggttggcggagctttacctttcgagaatcatgtgcctacatggagtacccaaaaagattgtatctgaccgagggagtcagttcacctcaaaattctggcagaagctgcaggaagaattggggacccgtttaaatttcagcacggcctatcacccgcaaactgatggtcagaccgagcgagtcaatcaaatcttggaagatatgttgagagcttgcgctctcgattttggtggagcttgggacaaaagcttgccatatgcggaattctcgtacaacaacagctaccaggccagtctacagatggcaccgtttgaagctttatacggccggaagtgccgcacacctctcttctgggatcagacaggcgagcgtcaactgttcgggacagaggtattagcggaagcagaagagaaagtcagaatcatcagggaaaggttgaggattgcccagtctcgacagaagagctacgcggataaccgccgaagggagctcacttttgaggcaggagattacgtgtatcttcgtgtcactccgctccggggagtacaccgttttcagacgaaaggcaagttggcaccacgcttcgtgggaccatacaaaatcttggaacgaaggggagaagttgcttatcagttagaacttccatccaatatgatcggtatccatgacgtgttccacgtgtcccaattaaagaagtgcttaagggtacctgaagaacaggctgattcgaaacacattgatatccaggaggacctaacatacgtggagaagccgattcgtatacttgataccagcgaaagaagaaccagaaacaaggtcaacaggttttgccgagttcagtggagtcatcattcagaagaggaagcaacctgggaaagggaggatgagttgaaagccgcccatccgcacctcttcaccagctcctccgaatctcggggccgagattccgtttaa

SEQ ID NO: 13867 - DNA, 1626 bp, Oryza sativa
  Clone ID: TFbOSC414616j.C1.o3.fg
atggctcaactaggccggctttgtgccgtgctgtgccccagccgcgccgcccctggccgcccgatcggcttgggccgattcggaccgtcggttcccgtggaccggtggtggaccgcctcggtggtcccgggatttaatacgcaaaatagtctggaaatttgggttaaatttctgggcgtgacaaagtggtatcagagccaactcgactgtaggttgagccaaatggtcaaaccttgtcaaacatggaggagaaaccgccagcttcatgcctgtccagaagtcaagtcgagtctcaagcttcgtgcagcaaagagtgagaagcaattggtcagcatgagggacaatttcaacggatcaggatcccgtcagtttcatggatcaactcagctcaattctataagcttcccacgtcaacctctcaaagatcagccacaatcccaagtcatggctaatcagactcagacagtggaagagttgttacggcagatgcgacatcgatccctgaagataactgcagccaagttaccgtcagaccaaagggaagtaagtgctacctgttatgattgtggtgagcaaggtcattatataaggaactgtccatggaaggtgttcaccaggtcacctgaaaaggacgagaagcagtgcccaggaagtaaccaagctccaagtcagtctactaacaagaaagatggtactctgcagcacagctctggagcgaataggaagggaactgatcatgtgcctaaggattatcagcggaactcggtcctagttatgaccaagaaagaacaagggacaaccgtgcaaccctttcatcaaccaatggcagtcgacgacatcagtcacaatccttctgctcttcctccaattctagccccggtggacgccaaccatggaagaagcaacgtcgctagggatgttcataaatcgctgcttgttccagtttcagctgccaaagtgcataatcagaagcctgcaccccaggaccaagcaagtcgattctgtcgcaactgtcgtaagccaggacattgtttcagtgattgtcctcttccaagagcagcaaaggcagttcgtcgtgattcacaagttatcagcactgcccacgaccccaatcgacacctgaatgtgcaacctccgcctcaacggatcatcgtcaagggcaccgtaagaggccgcattgttccaccggccatcgtttcaagcctacagcaccagcgccagcagggtaagcaatgcaaggagaacaacagctcgctacagttacaaagaggcagtatgctccttcatcagcacccgcagcaagtgtcgtcagcaccaggtcgctcgactgttgtcagttctagcaatgcacctcgtattgctccaatccggaggcccatcgacaaaccaccgctcggcaatcccgcgagtaagaagtcccacctgctacggcagtcaagagagttgttactccaccatcgaagaccaacaagcagagcaacgttcccggtgagacttcagctagtaggaactaaagggacaagtcagtcaggtttgaatgatggaagcaacaacagttccagtcaagacctctacttttcaggtctaaaaggcagttctaatcagcagcagtctacaatggtttga

SEQ ID NO: 13868 - DNA, 5409 bp, Oryza sativa
  Clone ID: TFbOSC416746j.C1.o17.fg
atggccggtcacccacccaaccaccgcggagaaggcatgatcgacttcgtggcagagctggcacgcatgacactggtagtgggctaccccgacgcgccggagtacacgaccatcccaccgctcagtggcgagcttcctcaccgtgtccgcttggaggtccatggttacgtggggacttgcctcgctaacatggcggtcgaggcgtcaggaggcacagcagatcacgcttgtcaggaggcagcctacctgatgatggccagactacgggagcgccacaactacattttccacgacacggcgtaccgctaccaccccagtcgagcccacggtgatggcgtcagctccttccgtccaacagctggcgagaacgacaccacctttggccacatgtgtgcggtgatgaggggtttggacaggatgcactcggatctgcacaaggcgaccaaggccttgaatgatgggaagctcatgaggatcgtcgctctaaaggacgaggtagcgcgtctgaagaaggagaacgctcagctgaagggtctcccagcgccaggaggagtccggatccgcactacgccccgtaagaggacgactgcaccggtgcgcatccagcttgcgcccaggaacccacctccaccagcagctcccgcagcagctccagctccgcccgcagttcctgcagctccagctccagctcccgcgttcactctctccttcgctccagcatcagccgccggaggttcagccagtggtaccggaggatggctatctgctactcccagtggcagcggcgagactgatccgtcagactccaggagtcgctcagaggggccaggttgcttgtttgggatggtctacaccaggactggcaaccgcgccacaggcgagggcagcaacggtgaagaacgcgctgatggtgtgcaccccaacggtgattctggcaatgggccgccaccacttcaggagaatccgacgcttgcccaagttatggcacatcagactcagatgatggccgccatgatgcagcagatgcagcaccagcaccagcagatgcatcagaggatgatgcagcacgccgaacagcagcaccagcagtttggtccccctcccccgcagtccaagttgcctgagttcctgcgagtcaggccacccaccttctccagcaccaccaaccccatggaggcaaacgactggctccatgcaatagagaagaagctgaatctcctgcagtgcaatgatcaggagaaggttgctttcgccacacaccagcttcagggtcctgcgtcagcttggtgggacaaccacatggccacccgcccaccgggtactgaagtcacatgggcagagttctgccgtagcttcaggaaggcacaggtgccagacggggttgtagcgcaaaagaagagggaattccgagcgctccatcagggcaacaggacagtgacagagtacctccacgagttcaatcgcctcgcgcgatatgcaccagaggatgtccgcactgacgccgagaaacaggaaaagtttatggcaggcctggatgacgagctgaccaaccaactgatatccggggactacgctgactttgaaaggctggttgacaaggcaatccgtcaggaggatcagcgcaacaaaatggaccggaaaagaaaggcggcacagttccggtccaaccaaggtagtcagcaccgaccgcgcttcactcccggacagcagggtggacctaccaccatgatcgtccgtcagcaccgcccgttcaactccagcaacttccaccagggcactagtggcagtcagaaccaccatggaagccagcccaaccgcggtgcagctccacgcccaccaatggcaccggcacagtcaggccagcccgcgcaagccaagaaggagacgggagcaaaaccagggtcttgcttcaactgtggcgagcttggccacttcgctgacaaatgcccgaagcccaggcgtgccggaccaaggtttatccaggctcgtgtcaaccacgcgtctgcggaggaggcacaagcagcaccagaggtcgtactgggtacgtttcctgttaactcaatccctgcaacagtactttttgattctggtgcaacgcattcgttcatctcaaagaaatttgtcgggatgcatgggttaataagagaggaacttagcacaccgatgcgggttcataccccagggaatagctccacttcggttcaattcagcccttctataacaatagaaatccaaagatctccatttctagccaacctcatccttctcgactccaaaggcctagatgtcatccttgggatggattggctgaccaagtttaagggagtcatcgattgtgcgaatcgcacagtcaccttaaccaacgagaagggagaaaccgtggtgtacaaatccctagtctcgccaaggaaaggggtctcgttgaatcagattgagacggaaatcccagtggacaccgtagagaagaactcgagaaaattggaagatatacccatagtctgcgagtatccggaagtgttccccgaagacctcaccaccatgccacccaagagagagattgaattccggattgacttggcaccgggaactgccccaatctataagagaccgtacaggatggcggccaacgaattagcagaggtcaagaagcaagttgatgaacagctgcagaaagggtacatacgaccgagcacttcgccttggggcgctccggtcatttttgtggagaaaaaggataagacgaagaggatgtgcgtcgattaccgcgcacttaacgaggtcacaatcaagaataaatatcctttgccgcgaatcgacgatttatttgatcaactgaaaggagctaaagtgttctctaagatagacctgcgatcaggctaccaccagttgagaatccgggaagaggatattccgaagacggccttcaccactcggtacgggctatatgagtgcacggttatgtccttcggacttactaacgcacccgcattcttcatgaatctgatgaacaaagtgttcatggaatttttggacaagtttgttgtggtattcatcgacgacattcttatctattcaaagtccgaggaagaacatgaacaacatctccgtctggtactcgagaagttgaaggagcaccagctatacgccaagttcagcaagtgtgacttctggttgacagaagtcaaatttctgggccatgtcattacagctcagggtgtagcagttgatccatcgaacgtggagtcagttacaaaatggaccccaccaaagaccgtgtcgcagattcggagttttctaggactggcaggttattaccgccgattcatcgaaaacttctccagaatcgcccgacccatgactcagttgcttaagaaggatgagaagtttaaatggacagctgagtgcgataagagctttgaggagctcaaaaagaaattagtatccgcaccagtattgattctgcccgacccgacgaaagacttccaagtctattgtgatgcatcccgtcacggacttggatgtgtcctaatgcaagagggcagagtggttgcgtatgcctcgcggcagttgcgtccacacgaaggaaattatccaactcatgacttggaattggcagcagtggttcatgctttgaagatctggaggcattatctgattggaaaccgctgcgaagtatatacggaccataaaagtctgaaatacatcttcacccaaccagacctaaaccttcgacaacgaagatggttggaactaatcaaagactatgacatgagtattcactaccacccgggtaaagccaatgtggtggcagacgctttaagccggaaaagttactgcactgctctatgcatcgagggcatgtgtgaggaattgcggcaggagttagaacatctcaacgttggaattgttgaacacgggttcgtagccgctctggaggcacggcctacgctcgtggatcaagttagagccgctcaagtaaatgatccggaaatagcagaactgaaaaagaacatgagagtcggaaaggctcgagatttccacgaggatgagcacggcacaatctggatgggagaaagattgtgtgtacccgacgacaaggagttgaaggatctgatactcacggaagctcatcagacccagtactccattcacccaggcagtactaaaatgtaccaagaccttaaagaaaaattttggtgggtcagcatgaggagagaaatagctgagttcgtcgcactctgcgatgtttgccagcgagtgaaagcagagcaccaaagaccagcaggtttactccaacctcttcaaatcccggaatggaaatgggaggagattggaatggactttataacgggactgccccggacatcatcgggacatgattcaatttgggtagtcgtggatcgactcaccaaggtggctcactttataccagtacataccacctatacgggaaagagattggcagaattgtaccttgcaaggatcatgtgtttgcatggggtacccaagaagatagtatccgaccgaggtagtcagttcacctcaaagttctggcagaagctgcaggaagaattggggacccggttaaatttcagcacggcctatcacccgcaaactgatggtcagaccgagcgtgtcaatcaaattttggaggatatgttgagagcttgcgctcttgattttggtggagcttgggacaaaagcttaccatatgcggaattctcgtacaacaacagctaccaggccagtctacagatggcaccgtttgaagctttatacggccgaaagtgccgcacacctctcttctgggatcagacaggcgaacgtcaactgttcggaacagaagtattagcggaagcagaagagaaagtcagaatcatcagggaaaggttgaggattgctcagtctcgacagaagagctacgcggataaccgccgaagggagctcacttttgaggcaggagattacgtgtatcttcgtgtcaccccgctccggggagtacaccgcttccagaccaagggcaagttggcaccacgcttcgtgggaccatacaaaattttggaacgaaggggagaagttgcctatcagctagaacttccgtccaacatgatcggcatccatgacgtgttccacgtatcccaattaaagaagtgtttaagggtacctgaagaacaggctgattcggaacacattgatatccaggaggacctaacatatgtggagaagccggttcgtatacttgataccagcgaaaggagaaccagaaataaggtcaccaggttttgccgagttcagtggagtcatcattcagaagaggaagcaacctgggaaagggaagatgagttgaaagccgcccatccgcacctcttcaccagctcctccgaatctcggggccgagattccgtttaa

SEQ ID NO: 13869 - DNA, 4995 bp, Oryza sativa
  Clone ID: TFbOSC418148j.C1.o15.fg
atggctacgtggggacttgcctcgctaacatggcgggttgaggcatctggaggcacagcagatcacgcctgtcaggaggcagcctacttgatgatggccagactacgggagcgccacaactacatcttccacgacacggcgtaccgctaccaccccagtcgagccaacggtgatggcgtcagctccttccgtccgacagctggcgagaacgacaccacctttggtcacatgtgtgctgtgatgagaggattggataggatgcactcggacctgcacaaggcgaccaaggccttgaatgatgggaagctcatgaggatcgtcgctctgaaggacgagatagcgcgcctgaagaaggagaacgctcagctaaagggtctcccagcaccaggaggagtccggatccgcactacgccccgtaagaggacgactgcacccgtgcgcatccagcttgcgcccaggaacccacctccaccagcagctcccgcagctccggcagttcccgcagttcctccagctccagctccagctccagctcccgcgttcactctctccttcgctccagcatcagccgccagaggtccagccagtggtaccggaggttggttgtccgctactcccagtggcagcgacgagactgatctgtcaggctccaggagccgctcagagggaccaggttgcttgtttgggatggtctacaccaggactggcaaccgcacgacaggcgagggcagcaacggcgaagaacgcgctgatggcgtgcaccccaacagcgattccggcaatggtccgccaccacttcccgagaatccgacgcttgcccaagttatggcacatcagactcagatgatggcagccatgatgcagcagatgcagcagcagcaccagcagatgcaccagaggatgatgcagcacgccgaacagcagcaccagcagtttggtccccctccccctcagtccaagttgccggagtttctacgtgtcaggccacccaccttctccagcaccaccaaccctatggaggcaaatgactggctccatgcgatagagaagaagctgaatctcctacagtgcaatgatcaggagaaggtcgctttcgccacacaccagcttcagggtcctgcgtcagcttggtgggacaaccacatggccacccgcccaccgggtactgaagtcacatgggcagagttctgccgtagcttcaggaaggcacaggtgccagacggggtcgtggcacaaaagaagagggaattccgggcgctccatcagggcaacaggactgtgacagagtacctccatgagttcaatcgcctcgcgcgatatgcaccagaggatgtccgcaccgacgccgagaagcaggagaagttcatggcgggtctggatgacgagctgaccaaccaactgatatctggggactacgccgactttgagaggctggttgacaaggcaatccgccaggaggatcaacgcaacaagatggataggaagaggaaggccgctcagttcagggcacatcagggaagtcaccagaggccgcgcttcactcccgggcagcagggtggacctaccaccatgattgttcgtcaacaccgcccattcaaccccagcaacttccaccagggctccagtggcagccagaatcaccatggaagtcagcccaaccgcggtacagctccacgcccaccgatggcaccggcacagtcaggccagcccgcacaagccaagaaggagacgggagcaaaaccagggtcctgcttcaactgtggcgagcttggccacttcgctgacaaatgcccgaagcccaggcgtgccggaccaaggtttatccaggctcgtgtcaaccacgcatctgcggaggaggcacaagcagcaccagaggtcgtactgggtacgtttcctgttaactcaatccctgcaacagtactttttgattctggtgcaacgcattctttcatctcgaagaaatttgtcgggatgcatgggttaataagagaggaacttagcacaccgatgcgggttcataccccagggaatagctccacttcggttcaattcagcccttctataacaatagaaattcaaaggtcaccatttctagccaacctcatccttctcgaatccaaagacctagatgtcattcttgggatggattggctgaccaagtttaagggggtcatcgattgtgcgaatcgcacagtcaccttgaccaacgagaagggagaaacagtggtgtacaaatctctagtctcacccaagaaaggagcctcgttgaatcagattgagacgaaaatcccagtggacaccgaagagaagaacttgagaaaattggaggacatacccatagtctgcgagtatccagaggtgttccccgaagacctcaccaccatgccacccaagagggagattgaattccggattgatttggcaccaggaaccgctccaatctataagagaccgtacagaatggcggccaacgaattagcggaggtcaagaagcaagttgatgaacagctgcagaaagggtacatacgaccaagcacttcaccttggggcgctccggtcatttttgtggagaaaaaggataagacaaagaggatgtgcgtcgattatcgcgcacttaacgaggtcacaatcaagaataaatatcctttgccgcgaatcgacgatttatttgatcaactgaaaggagctaaagtgttctctaagatagacctgcgatcaggctaccaccagttgagaatccgggaagaggatattccgaagacggccttcaccactcggtacgggctatatgagtgcacggttatgtccttcggacttactaacgcacccgcattcttcatgaatctgatgaacaaagtgttcatggaatttctggacaagtttgttgtggtattcatcgacgacatacttatttattcaaagtccgaggaagaacatgaacaacatctccgtctagtactcgagaagttgaaggagcaccagctatacgccaagttcagcaagtgtgacttctggttgacggaagttaaatttctgggccatgtcattacagctcagacgaaagacttccaagtctattgcgatgcatcccgtcacggacttggatgtgtcctaatgcaagagggcagagtggttgcgtatgcctcgcggcagttgcgtccacacgaaggaaattatccaactcatgacttggaattggcagcagtggtccatgctttgaagatctggaggcactatctggtcggcaaccgctgcgaagtatatacggaccataaaagtctgaaatacatcttcacccaaccagacctaaaccttcgacaacgaagatggttggaactaatcaaagactatgacatgagtattcactaccacccgggtaaagccaatgtggtggcagacgctttaagccggaaaagttactgcactgctctatgcatcgagggcatgtgtgaggaattgcgacaggagcttgaacatctcaacatgggaattgttgaacacgggttcgtagccgctctggaggcacggcctacgctcgtggatcaagttagagccgctcaagtaaatgatccggaaatagcagaactgaaaaagaacatgagagtcggaaaggctcgggatttccttgaggatgagcatggcacaatctggatgggagaaagattgtgtgtaccggacgacaaggaattgaaggatctgatactcaccgaagctcatcagacccagtactccattcatccaggcagcactaaaatgtatcaagacctcaaagagaagttttggtgggtcagcatgaggagagaaatagctgaattcgtcgcactctgcgatgtttgccagcgagtgaaagcagagcaccaaagaccagcaggtttactccaacctctccaaatcccggaatggaaatgggaggagattggaatggactttataacaggactgccccggacatcatcgggacatgattcaatctgggtagtcgtggatcgactcaccaaggtggctcactttataccagtacataccacctatacgggaaagagattggcagaattgtacctcgcaaggatcatgtgtttgcatggggtacccaagaagatagcatccgaccgaggtagtcagttcacctcaaagttctggcagaagctgcaggaagaattggggacccgtttaaacttcagcacggcctatcacccgcaaactgatggtcagaccgagcgtgtcaatcaaatcttggaggatatgttgagagcttgcgctcttgattttggtggagcctgggacaaaagcttaccatatgcggaattctcgtacaacaacagctaccaggccagtctacagatggcaccgtttgaagctctatacggccggaagtgccgcacacctcttttctgggatcagacaggcgaacgtcaactgttcggaacagaagtattagcggaagcggaagagaaagtcagaatcatcagggaaaggttgaggattgctcagtctcgacagaagagctacgcggataaccgtcgaagggagctcacttttgaggcaggagattacgtgtatcttcgtgtcactccgctccggggagtacaccgtttccagacgaaaggcaagttggcaccacgcttcgtgggaccatacaaaattttggaacgaaggggagaagttgcttatcagctagaacttccatccaacatgatcggcatccatgacgtgttccacgtgtcccaactaaagaagtgcttaagggtacctgaagaacaggctgattcggagcacattgatatccaggaggacctaacatacgtggagaagccggttcgcatacttgataccagtgaaaggagaaccagaaacaaggtcacccggttttgccgagttcagtggagtcatcattcggaagaggaagcaacctgggaaagggaagatgagttgaaagccgcccatccgcacctcttcaccagctcctccgaatctcggggccgagattccgtttaa

SEQ ID NO: 13870 - DNA, 5334 bp, Oryza sativa
  Clone ID: TFbOSC420097j.C1.o7.fg
atggccggtcacccacccaaccaccgcggagaaggcatgatcgactttgtggcagagctggcacgcatgacactggtagtgggctaccccaacgcgccggagtacacgaccattccgccgctcagtggcgagcttcctcaccgtgtccgcttggaggtccatggctacgtggggacttgcctcgctaacatggcggtcgaggcatctggaggcacagcagatcacgcctgtcaggaggcagcctacttgatgatggccagaatacgggagcgccacgactacatcttccacgacacggcgtaccgctaccacccccgtcgagcccatggtgatggcgtcagctccttccgtccgacagctggcgagaacgacaccacctttggtcacatgtgtgctgtgatgaggggattggaccggatgcactcggacctgcacaaggcgaccaaggccttgaacgatgggaagctcatgaggatcgtcgctctgaaggacgagatagcgcgcctgaagaaggagaacgctcagctaaagggtcttccagcgccaggaggagtccggatccgcaccacgccccgcaagacgacgactgcacctgtgcgcatccagcttgcgcccaggaacccacctccaccagcagctcccgcagcaccttcagttccgcccgcagttcctgcagctccagctccagctcccgcgttcactctctccttcgctccagcatcagccgccagaggttcagccagtggtaccggaggctgcttgtttgggatggtctacaccaggaatggtagccgtgcaacaggcgagggcagcaacggcgaagaacgcgctgatggtgtgcaccccaacagtgattctggcaatggtccgccaccacttcccgagaatccgacccttgcccaagttatggcacatcagactcagatgatggcagccatgatgcagcagatgcagcagcagcaccagcagatgcaccaaaggatgatgcagcacgccgagcagcagcaccagcagtttggtccccctccccctcagtccaagttgccagagtttctacgcgtcaggccacccaccttctccagcaccaccaaccctatggaggcgaacgactggctccatgccatagagaagaagctgaacctcctgcagtgcaatgatcaggagaaggtcgctttcgccacacaccagcttcagggtcctgcgtcagcttggtgggacaaccacatggccacccgcccaccgggtactgaagtcacatgggcagagttctgccgtagcttcaggaaggcacaggtgccagacggggtcgtggcacaaaagaagagggaattccgggcgctccatcagggcaacaggactgtgacagagtacctccatgagttcaatcgcctcgcgcgatatgcaccagaggatgtccgcaccgacgccgagaagcaggagaagttcatggcgggtctggatgacgagctgaccaaccaactgatatctggggactacgccgactttgagaggctggttgacaaggcaatccgtcaggaggaccaacgcaacaagatggacaggaagaggaaggccgctcagttcagggcacatcagggaagtcaccagaggccgcgcttcactcccggacagcagggtggacctaccaccatgatcgtccgtcagcaccgcccgttcaaccctagcaacttccaccagggcactagtggcagtcagaaccaccatggaagtcagcccaaccgcggtgcagctccacgcccatcagtggcaccggcacagtcaggccagcccgcacaagccaagaaggagacgggagcaaaaccagggtcctgcttcaactgtggcgagcttggccacttcgctgacaaatgcccgaagcccaggcgtgccggaccaaggtttatccaggctcgtgtcaaccacgcatctgcggaggaggcacaagcagcaccagaggtcgtactgggtacgtttcctgttaactcaatccctgcaacagtactttttgattctggtgcaacgcattctttcatctcaaagaaatttgtcgggatgcatgggttaataagagaggaacttagcacaccgatgcgggttcataccccagggaatagctccacttcggttcaattcagcccttctataacaatagaaattcaaagatcaccatttctagccaacctcattcttctcgaatccaaagacctagatgtcattcttgggatggattggctgaccaagtttaagggagtcatcgattgtgcgagtcgcacagtcaccttgaccaacgagaagggagaaacagtggtgtacaaatctctagtctcgccaaagaaaggggtctcgttgaatcagattgagacggaaatcccagtggacaccgtagagaagaacttgagaaaattggaagatatacccatagtctgcgagtatccagaagtgttccccgaagacctcactaccatgccacccaagagagagattgaattccggattgacttggcaccgggaactgctccaatctataagagaccgtacagaatggcggccaacgaattagccgaggtcaagaagcaggttgatgagcagctgcagaaagggtacattcgaccaagcacttcaccttggggcgctccggtcatttttgtggagaaaaaggataagacgaagaggatgtgcgttgattatcgcgcactcaacgaggtcacaatcaagaataaatatcctttgccgcgaatcgacgatttatttgatcaactgaaaggagctaaagtattttctaagatagacctgcgatcaggctaccaccagctgagaatccgggaagaggatattccgaagacggccttcaccactcggtacgggctatatgagtgcacggttatgtctttcggacttaccaacgcacccgcattcttcatgaatctgatgaacaaagtgttcatggaatttctggacaagtttgttgtggtattcatcgacgacatacttatctactcaaaatccaaggaagaacatgagcaacatctccgtctggtactcgaaaagttgaaggagcaccagctatacgccaagttcagcaagtgtgacttctggttgacggaagtaaaatttctgggtcatgtcattacagctcagggtgtggcagtcgacccatcgaacgtggagtcagttaccaaatggaccccacctaagaccgtgtcgcagattcggagttttctaggactggcaggttattaccgccgattcatcgaaaatttctccaggatcgcccgacccatgactcagttgcttaagaaagatgagaagtttaaatggacagctgagtgcgataagagtttcgaggagctcaagaagaaattagtatccgcaccagttttgattctgcccgacccgacgaaagacttccaagtctattgtgatgcatcccgtcacggacttggatgtgtcctaatgcaagagggcagagtggttgcgtatgcctcgcggcagttgcgtccacacgaaggaaattatccaactcatgacttggaattggcagcagtggttcatgctttgaagatctggaggcactatctgattggcaaccgctgcgaagtatatacggaccataagagtctgaaatacatcttcacccaaccggatctaaaccttcggcaacgaagatggttggaactaatcaaagactacgacatgagtattcactaccacccgggtaaagccaatgtggtggcagacgctttaagccggaaaagttactgcactgccctatgcatcgagggcatgtgtgaggaattgcggcaggagtttgaacatctcaacatgggaattgttgaacacgggtttgtagccgctctggaggcacggcccactctcgtggatcaagtcagagcagctcaagtaaatgattctgagatagcagagctgaaaaagaatatgagagtcggaaaagcccgggatttccacgaagatgagcatggcacaatctggatgggagaaagattgtgtgtacctgacgacaaggaattgaaggatctgatactcaccgaggctcatcagacccagtactccattcatccaggcagcactaaaatgtatcaagacctcaaagaaaagttttggtgggtcagcatgaggagagaaatagctgaattcgtcgcactctgcgatgtttgccaacgagtgaaggcagagcaccaaagaccagcaggtttactccaacctcttcaaatcccggaatggaaatgggaggagattggaatggactttataacaggactgccccggacatcatcgggtcacgattcaatctgggtagtcgtggatcgactcactaaggttgctcacttcataccagtgcataccacatatacgggcaaaaggttggcggagctttacctttcgagaatcatgtgcctacatggagtacccaaaaagattgtatctgaccgagggagtcagttcacctcaaaattctggcagaagctgcaggaagaaatggggacccgtttaaatttcagcacggcctatcacccgcaaactgatggtcagaccgagcgagtcaatcaaatcttggaggatatgttgagagcttgcgctcttgattttggtggagcttgggacaaaagcttgccatatgcggaattctcgtacaacaacagctaccaggccagtctacagatggcaccgtttgaagctttatacggccggaagtgccgcacgccgctcttctgggatcagacaggcgaacgtcaactgttcggaacaaaagtattagcggaagcagaagagaaagtcagaatcatcagggaaaggttgaggattgctcagtctcgacagaagagctacgcggataaccgtcgaagggagctcacttttgaggcaggagattacgtgtatcttcgtgtcactccgctccggggagttcaccgttttcagacgaaaggcaagttggcaccacgcttcgtgggaccatacaaaattttggaacgaaggggagaagttgcttatcagttagaacttccatccaatatgatcggcatccatgacgtgttccacgtgtcccaattaaagaagtgtttaagggtacctgaagaacaggctgattcggaacacattgatatccaggaggacctaacatatgtggagaagccggttcgcatacttgataccagcgaaaggaggaccagaaataaggtcactaggttttgccgagttcagtggagtcatcattcagaagaggaagcaacctgggaaagggaagatgagttgaaagccgcccatccgcacctcttcaccagctcctccgaatctcggggccgagattccgtttaa

SEQ ID NO: 13871 - DNA, 4541 bp, Oryza sativa
  Clone ID: TFbOSC4211j.C1.o3.np
cgagaaatggataaaggaggaccagcggaggagatgggccgaaggccaggccaggtgggcctagcccacgttcggattccggcaatggtccgccaccacttcccgagaatccgacccttgcccaagttatggcacatcagactcagatgatggcagccatgatacagcagatgcagcagcagcaccagcagatgcaccagaggatgatgcagcacgtcgaacagcagcaccagcagtttggtccccctccccctcagtccaagttgccagagtttctacgcgtcaggccacccaccttctccagcaccaccaaccccatggaggcgaatgactggctccatgccatagagaagaagctgaatctcctgcagtgcaatgatcaggagaaagtcgctttcgccacacaccagcttcagggtcccgcgtcagcttggtgggacaatcacatggccacccgcccaccaggtactgaagtcacatgggcagagttctgccgtagcttaaggaaggcgcaggtgccagacggggtcgtggcacaaaagaagagggaattccgggcactccatcagggcaacaggactgtgacacagtacctccacgagttcaatcgcctcgcgcgatatgcaccagaggatgtccgcaccgacgccgagaagcaggagaagttcatggcgggtctggatgatgagctgaccaaccaactgatatccggggactacgctgactttgagaggctggttgacaaggcaatccgccaggaggatcaacgcaacaagatcgacaggaagaggaaggccgctcagttcagggcacctcagggaagtcaccagaggccgcgcttcactcccgggcagcagggtggacctaccaccatgatcgtccgtcagcaccgcccgttcaaccctagcaactttccccagggcactagtggcagtcagaaccaccatggaggtcagcccaaccgcggtgcagctccacgcccatcagtggcaccggcacagtcaggccagcccgcgcaagccaagaaggagactggagcaaaaccagggtcctgcttcaactgtggcgagcttggtcacttcgctgacaaatgcccaaagcccaggcgtgccgggccaaggtttatccaggctcgtgtcaaccacgcgtctgcagaggaggcacaaacagcaccggaggtcgtactgggtacgtttcctgttaactcaatccctgcaacagtacttttcgattctggtgcaacgcattctttcatttcaaagaaatttgtggggaggtatgggttaaggaaagaagagcttagcacaccaatgagggttcataccccgggaaatagttcaacctcagtcagttttagcccctcagtgctaatagaaatccaaagatcaccatttctagccaacctcattcttcttgaatccaaagacctagatgtcattcttgggatggattggctgaccaagtttaagggagtcatcgattgtgcgaatcgcacagtcaccttgaccaacgagaagggagaaacagtggtgtacaaatctctagtctcaccaaagaaaggggtctcgttgaatcagattgagacggaaatcccagtggataccgtagagaagaacttgagaaaattggaagatatacccatagtctgcgagtatccagaagtgttccccgaagacctcactaccatgccacccaagagagagattgaattccggattgacttggcaccgggaaccgctccaatctataagagaccatacagaatggcggccaacgaattagcagaggtcaagaagcaagttgatgagcagctgcagaaagggtacatacgaccaagcacttcaccttggggcgctccggtcatttttgtggagaaaaaggataagacgaagaggatgtgcgttgattatcgcgcactcaacgaggtcacaatcaagaataaatatcctttgccgcgaatcgacgatttatttgatcaactgaaaggagctaaagtattttctaagatagacctgcgatcaggctaccaccagctgagaatccgggaagaggatattccgaagacggccttcaccactcggtacgggctatatgagtgcacggttatgtctttcggacttaccaacgcacccgcattcttcatgaatctgatgaacaaagtgttcatggaatttctggacaagtttgttgtggtattcatcgacgacatacttatctactcaaaatccgaggaagaacatgagcaacatctccgtctggtactcgaaaagttgaaggagcaccagctatacgccaagttcagcaagtgtgacttctggttgacagaagtcaaatttctgggtcatgtcattacagctcagggtgtggcagtcgacccatcgaacgtggagtcagttaccaaatggaccccaccgaagaccgtgtcgcagattcgaagttttcttggacttgcaggttattaccgtcgattcatcgaaaatttctccagaatcgcccgacccatgactcagttgcttaagaaggatgagaagtttaaatggacagccgagtgcgataagagcttcgaggagctcaagaagaaattagtatccgcaccagttttgattctgcccgacccgatgaaagacttccaagtctattgtgatgcatcccgtcacggacttggatgtgtcctaatgcaagaggacagagtggttgcgtatgcctcgcggcagttgcgtccacacgaagggaattatccaactcatgacttggaattggcagcagtggttcatgctttgaagatctggaggcactatctgattggcaaccgctgcgaagtatatacggaccataagagtctgaaatacatcttcacccaaccggacctaaatctccgacaacgaagatggttggaactaatcaaagactatgacatgagtattcactaccacccgggtaaagccaatgtggtggcagacgctttaagccggaaaagttactgcactgccctatgcatcgagggcatgtgtgaggaattgcggcaggagtttgagcatctcaacatgggaattgttgaacacgggtttgtagccgctctggaggcacggcccactctcgtggatcaagtcagagcagctcaagtaaatgattctgagatagcagagctgaaaaagaacatgagagtcggaaaagcccgggatttccacgaagatgagcatggcacaatctggatgggagaaagattgtgtgtacctgacgacaaggaactgaaggatctgatactcaccgaggctcatcagacccagtactccattcacccaggcagcactaaaatgtatcaagacctcaaagaaaagttttggtgggtcagcatgaggagagaaatagctgaattcgtcgcactctgcgatgtttgccaacgagtgaaggcagagcaccaaagaccagcaggtttactccaacctcttcaaatcccggaatggaaatgggaggagattggaatggactttataacaggactgccccggacatcatcgggtcacgatttgatctgggtagtcgtggatcgactcactaaggttgctcacttcataccagtacataccacatatacgggcaaaaggttggcggagctttacctttcgagaatcatgtgcctacatggagtacccaaaaagattgtatctgaccgagggagtcagttcacctcaaaattctggcagaagctacaggaagaactggggacccgtttaaatttcagcacggcctatcacccgcaaactgatggtcagaccgagcgagtcaatcaaatcttggaagatatgttgagagcttgtgctcttgattttggtggagcttgggacaaaagcttgccatatgcggaattctcgtacaacaacagctaccaggccagtctacagatggcaccgtttgaagctttatacggccggaagtgccgcacacctctcttctgggatcagacaggcgaacgtcaactgttcggaacagaagtattagcggaagcagaagagaaagtcagaatcatcagggaaagattgaggattgctcagtctcgacagaagagctacgcggataaccgtcgaagggagctcacttttgaggcaggagattacgtgtatcttcgtgtcactccgctccggggagtacaccggtttcagacgaaaggcaagttggcaccacgcttcgtgggaccatacaaaatcttggaacgaaggggagaagttgcttatcagttagaacttccatccaatatgatcggcatccatgacgtgttccatgtgtcccaattaaagaagtgcttaagggtacctgaagaacaggctgattcgaagcacattgatatccaggaggacctaacatatgtggagaagccggttcgtatacttgataccagcgaaagaagaactagaaataaggtcaccaggttttgccgagttcagtggagtcatcattcagaagaggaagcaacctgggaaagggaagatgagttgaaagccgcccatccgcacctcttcaccagctcctccgaatctcggggc

SEQ ID NO: 13872 - DNA, 3900 bp, Oryza sativa
  Clone ID: TFbOSC5112j.C1.o1.np
atggccgagcacccacccaaccaccgcggagaaggcatgggtgatttcgtggcagagttggcacgcatgacactggtggtgggctaccccaacgcgccggagtacacgactgttccaccgctcagtggcgagcttcctcaccgtgtccgcttggaggtccatggctacatggggacttgcctcgctaaaatggtggttgaggcgtctggaggcacagcagatcacgcatgtcaggaggcagcatatctgatgatggccagactacgggagcgccacaactacatcttccacgacacggcgtaccggttccaccctcgtcgagccagcggcagtgatgtcagttccttccgtccgacagccggcgagaacgacaccacctttggtcacatgtgcgctgtgatgagggggatggacaggatgcactcggacctgcacaaggcgtccaaggccttgaatgatgggaagcttgtgaggatcattgctctgaaggacgagatagcgcgtctgaagagggagaatgctcaattgaagggtcttcccgcgccaggaggagttcggatccgcactacgccccgcaagtcgacaacggcacccgtgcgcgtccagcttgcgcctaggaacccacctccgtcagcagctcccgcagctccagcagttcccgcagcacctccagttccgcccgcagctccagcagttcctgcagctccagcgccagctccagctcctgttcccatgtcagctcctgcatctgctctctccttcgctcctgcatcagccgtcaggggccccgccagtggaaatggaggttgcttcctccagatggtctacaccaggaatggcacccgcacgacaagcgagggcagcaacggcgaagaacgcgctgatggtgtgcaccccaacagtgattccggcaatggtccgccaccatttcccgagaatctgacgctggcccaagtaatggcacatcagactcagatgatggcagccatgatgcagcagatgcagcagcagcaccagcagatgcaccagaggatgctgcagcacgccgaacagcagcaccagcagtttggtccccctcctcctcagtccaagctgcccgagtttctacgcgtcaggccacccaccttctccagcaccaccaaccccatggaggcgaatgactggctccatgccatagagaagaagctgaatctcctgcagtgcaatgatcaggagaaggtcgctttcgccacacaccagcttcaaggtcctgcgtcagcttggtgggacaatcacgtggccacccgcccgccaggcactgaagtcacttgggcggagttctgtcgtagcttcaggaaggcgcaggtgccagacggggtcgtggcacaaaagaagaggggattccgggcactccatcagggcaacaggacagtgacagagtacctccatgagttcaatcgcctcgcgcgatatgcaccggaggatgtctgcaccgacgccgagaagcaggagaaattcctagcaggcctggatgatgagctaaccaaccagctgatatctggagactatgccgactttgaaaggttggttgacaaggcaatccgtcaggaggatcagcgcaacaaaatggacaggaagagaaaggcggcacagttccggtccaaccaaggaaaccatcagcgaccgcgcttcactctcggacagcagggtggacctaccaccatgatcgtccgccagcaccgcacgttcaagtctagcaacttccaccagggcgccagtggcagtcagaaccaccatggaggtcagcctaaccacggtgcagctccacacccaccagtggcaccagcacagtcaggcccgtccgcgcaagccaaggagactggagcaaagccagggtcctgcttcaactgtggtgagcttggccacttcgccgacaaatgcccgaagcctaggcgtgccgggtcaaagtttgtccaggctcgtgtcaaccacgcgtctgcaaaggaggcgcaagcagcaccagaggtcgtactgggtacgtttcctgttaactcaatccctgcaacagtactttttgattctggtgcaacgcattcgttcatttcaaagaagtttgtcaggatgcatgggttaataagagaggaacttagcacaccaatgcgggttcataccccagggaatagctccacttcggtacaattcagcccttctataacaatagaaattcaaagatcaccatttctagccaacatcattcttcttgattccaaagacctagatgtcattcttgggatggattggctgaccaagtttaagggagtcattgattgtgcgaatcgcacagtcaccttgactaacgagaagggagaaacaatagtgtataaatcactagtctcaccaaagcaaggggtctccttgaatcagattgaggcggaaaccccagtggtcaccgaggggatgaattcgaggaaattggaagaaattcccatagtctgcgagtacccagaagtgtttcccaaagacctcaccaccatgccacccaagagagagattgaattccggattgatttggccccgggaaccgccccaatctacaagagaccgtataggatggcagccaatgaactagccgaggtcaagaaacaggttgatgagcagctgcagaaagggtacatacgaccaagtacctcaccttggggtgctccggtcatttttgtggagaaaaaggataagacgaagaggatgtgcgtcgattatcgcgcactcaacgaggtcacaatcaagaataaataccctttaccacgaatcgatgacttgtttgaccaactgaagggagctaaggtgttctctaagatagacctgcgatcaggctatcaccagttaagaattcgggaagaagatattccaaagacggctttcaccacccggtacgggctgcatgagtgcacggttatgtctttcggacttaccaacgcacccgcattcttcatgaatctgatgaacaaagtgttcatggaatttctcgacaagtttgtggtggttttcatcgacgacatacttatctattcaaagtctgaagaagaacatgagcagcatctccgtctggtactcgagaagttgaaggagcaccaattatacgccaagttcagcaagtgtgacttctggttgacggaagtcaaatttctgggccatgttattatagctcagggcatggcagttgatccatcgaacgtggagtcagttaccaaatggaccccaccgaagaccgtgtcgcagattcgaagttttcttagactggcgggttattaccgccaattcatcgaaaacttctccaggatcgctcgacccatgactcagttgcttaagaaagatgaaaagtttaaatggacagctgagtgcgataagagctttgaggagctcaaaaagaaattagtatccgccccagttctgattctgcccgaccagatgaaagatttccaggtctattgcgacgcatctcgccacgggcttgggtgtgttctaatgcaggaaggcagagtggtagcgtatgcctcgcgatagtcgcgtccacacgaagggaattatccaacccatgatctggaattggcagcagtggttcatgctttgaagatctggaggcactatctgattggcaaccgctgtgaagtatatacggatcataagagtctgaaatacatcttcacccaaccggatctaaatctccgacaacgaagatggttggaactaatcaaagactatgacatgagcattcactaccacccggggaaagccaatgtggtggcagacgcattaagcaggaaaagttactgcactgctctatgcatcgagggcatgtgtgaggaattgcagcaagagtttaagcggctcaacgtgggaattgttgaacacgggttcatagct

SEQ ID NO: 13873 - DNA, 5478 bp, Oryza sativa
  Clone ID: TFbOSC5884j.C1.o1.fg
atggaaagacctaagagccctctgaatccttttcattgcatatgttctttgcaattggattttgttccgggaaaatggggatctgttcttatggttcaagggaaaaatcttggtcgctcgtttaaaatggccggtcacccacccaaccaccgcggagaaggcatgattgatttcgtggcagagttggcacgcatgaccctggtggtgggctaccccgacgcgccggagtacacgacgattccgccgctcagtggcgagcttcctcaccgtgtccgcttggaggtccatggttacgtggggacttgcctcgctaacatggcggtcgaggcatctggaggcacagcagatcacgcctgtcaggaggcagcctacttgatgatggccagactacgggagcgccacgactacatcttccacgacacggcgtaccgctaccacccccgtcgagcccatggtgatggcgtcagctccttccgtccgacagctggcgagaacgacaccaccttcggtcacatgtgtgctgtgatgaggggattggaccggatgcactcggacctgcacaaggcgaccaaggccttgaatgatgggaagctcatgaggatcgtcgctctgaaggacgagatagcgcgcctgaagaaggagaatgctcagttgaagggtcttccagcaccaggaggagtccggatccgcactacgccccgtaagaggacgactgcacccgtgcgcatccagcttgcgcccaggaacccacctccaccagcagctcccgcagcacctccagttccgcccgcagctccggcagttcccgcagttcctccagctccagctccagctcccgcgttcactctctccttcgctccagcatcagccgccagaggtccagccagtggtaccggaggttgcttgtttgggatggtctacaccaggactggcaaccgcacgacaggcgagggcagcaacggcgaagaacgcgtggatggtgtgcaccccaacagtgattctggcaatggtccgccaccacttcccgagaatccgacgcttgcccaagttatggcacaccagactcagatgatggcagccatgatgcagcagatgcaacagcagcaccagcagatgcaccagaggatgatgcagcacgccgaacagcagcaccagcagtttggtccccctccccctcagtccaagttgccggagtttctacgtgtcaggccacccaccttctccagcaccaccaaccccatggaggcaaatgactggatccatgcgatagagaagaagctgaatctcctgcagtgcaatgaacaggagaaggtcgctttcgccacacaccagcttcagggtcctgcgtcagcttggtgggacaaccacatggccacccgcccaccgggtactgaagttacatgggcagagttctgccgtagcttcaggaaggcacaggtgccagacggggtcgtggcacaaaagaagagggaattccgggcgctccatcagggcaacaggactgtgacagagtacctccatgagttcaatcgcctcgcgcgatatgcaccagaggatgtccgcaccgacgccgagaagcaggagaagttcatggcgggtctggatgacgagctgaccaaccaactgatatctggggactacgccgactttgagaggctggttgacaaggcaatccgtcaggaggatcagcgcaacaaaatggacaggaaaagaaaggcggcgcagttccggtccaaccaaggtagtcagcaccgaccgcgcctcactcccggacagcagggtggacctaccaccatgattgttcgtcaacaccgcccattcaaccccagcaacttccaccagggcactagtggcagtcagaaccaccatggaagtcagcccaaccgcggtacagctccacgcccaccgatggcaccggcacagtcaggccagcccgcacaagccaagaaggagacgggagcaaaaccagggtcctgcttcaactgtggcgagcttggccacttcgctgacaaatgcccgaagcccaggcgtgccggaccaaggtttatccaggctcgtgtcaaccacgcatctgcggaggaggcacaagcagcaccagaggtcgtactgggtacgtttcctgttaactcaatccctgcaacagtactttttgattctggtgcaacgcattctttcatctccaagaaatttgtcgggatgcatgggttaataagagaggaacttagcacaccgatgcgggttcataccccagggaatagctccacttcggttcaattcagcccttctataacaatagaaattcaaaggtcaccgtttctagccaacctcattcttctcgaatccaaagacctagatgtcattcttgggatggattggctgaccaagtttaagggggtcattgattgtgcgaatcgcacagtcaccctgaccaatgagaaaggagaaaccgtggtgtacaaatctctagtctcgccaaagaaaggagcctcgttgaatcagattgagacggaaatcccaatggacgccgaagagaagaacttgagaaaattggaggacatacccatagtctgcgagtatccagaggtgttccccgaagacctcaccaccatgccacccaagagggagattgaattccggattgatttggcaccaggaaccgctccaatctataagagaccgtacagaatggcggccaacgaattagcggaggtcaagaagcaagttgatgaacagctgcagaaagggtacatacgaccaagcacttcaccttggggcgctccggtcatttttgtggagaaaaaggataagacaaagaggatgtgcgtcgattatcgcgcacttaacgaggtcacaatcaagaataaatatcctttgccgcgaatcgacgatttatttgatcaactgaaaggagctaaagtgttctctaagatagacctgcgatcaggctaccaccagttgagaatccgggaagaggatattccgaagacggccttcaccactcggtacgggctatatgagtgcacggttatgtccttcggacttactaacgcacccgcattctttatgaatctgatgaacaaagtgttcatggaatttctggacaagtttgttgtggtattcatcgacgacattcttatctattcaaagtccgaggaagaacatgaacaacatctccgtctagtactcgagaagttgaaggagcaccagctatacgccaagttcagcaagtgtgacttctggttgacggaagttaaatttctgggccatgtcattacagctcagggtgtagcagttgatccatcgaacgtggagtcagttaccaagtggaccccaccgaagacagtgtcgcagattcgaagttttctaggactggctggttattaccgtcgtttcatcgaaaacttctcaagaatcgcccgacccatgactcagttgcttaagaaagacgagaagtttaaatggacagctgagtgcgacaagagctttgaggagctcaaaaggaaattagtatccgcaccggttttgatcctgcccgaccagacgaaagacttccaagtctattgcgatgcatcccgtcacggacttggatgtgtcctaatgcaagagggcagagtggttgcatatgcctcgcggcagttgcgtccacacgaaggaaattatccaactcatgacttggaattggcagcagtggtccatgctttgaagatctggaggcactatctgatcggcaaccgctgcgaagtatatacggaccataaaagtctgaaatacatcttcacccaaccagacctaaaccttcgacaacgaagatggttggaactaatcaaagactatgacatgagtattcactaccacccgggtaaagccaatgtggtggcagacgcattaagccggaaaagttactgcactgctctatgcatcgagggcatgtgtgaggaattgcgacaggagcttgaacatctcaacatgggaattgttgaacacgggttcgtagccgctctggaggcacggcctacgctcgtggatcaagttagagccgctcaagtaaatgatccggaaatagcagaactgaaaaagaacatgagagtcggaaaggctcgggatttccttgaggatgagcatggcacaatctggatgggagaaagattgtgtgtaccggacgacaaggaattgaaggatctgatactcaccgaagctcatcagacccagtactccattcatccaggcagcactaaaatgtatcaagacctcaaagagaaattttggtgggtcagcatgaggagagaaatagctgaattcgtcgcactctgcgatgtttgccaacgagtgaaagcagagcaccaaagaccagcaggtttactccaacctctccaaatcccggaatggaaatgggaggagattggaatggactttataacaggactgccccggacatcatcgggacatgattcaatctgggtagtcgtggatcgactcaccaaggtggctcactttataccagtacataccacctatacgggaaagagattggcagaattgtacctcgcaaggatcatgtgtttgcatggggtacccaagaagatagtatccgaccgaggtagtcagttcacctcaaagttctggcagaagctgcaggaagaattggggacccgtttaaacttcagcacggcctatcacccgcaaactgatggtcagaccgagcgtgtcaatcaaatcttggaggatatgttgagagcttgcgctcttgattttggtggagcctgggacaaaagcttaccatatgcggaattctcgtacaacaacagctaccaggccagtctacagatggcaccgtttgaagctctatacggccggaagtgccgcacacctcttttctgggatcagacaggcgaacgtcaactgttcggaacagaagtattagcggaagcagaagagaaagtcagaatcatcagggagagattgagggttgctcagtctcgacagaagagctacgcggataaccgtcgaagggagctaacttttgaggtcggagactacgtgtatcttcgtgtcactccgctccggggagtacaccgtttccagacgaaaggcaagttggcaccacgcttcgtgggaccatacaaaattttggaacgaaggggagaagttgcttatcagctagaacttccatccaatatgatcggcatccatgacgtgttccacgtttcccagttaaagaagtgcttaagggtacctgaagagcaggctgattcggaacacatcgatatccaggaggacctgacatatgtggagaagccggttcgcatacttgataccagtgaaaggagaaccagaaacaaggtcacccggttttgccgagttcagtggagtcatcattcggaagaggaagcgacctgggaaagggaagaggagttgaaagccgcccatccgtacctcttcaccagctcctccgaatctcggggccgagattccgtttaa

SEQ ID NO: 13874 - DNA, 5352 bp, Oryza sativa
  Clone ID: TFbOSC6690j.C1.o2.np
atggccggtcacccacccaaccaccgcggagaaggcatgatcgactttgtggcagagctggcacgcatgacactggtggtgggctaccccaacgcgccagagtacacgacgattccgccgctcagtggcgagcttcctcaccgtgtccgcttggaggtccatggctacgtggggacttgcctcgctaacatggcggtcgaggcatgtggaggcacagcagatcatgcctgtcaggaggcagcctacttgatgatggccagactacgggagcgccacaactacatcttccacgacacggcgtaccgctaccacccccgtcgagccaacggtgatggcgtcagctccttccgtccgacagccggcgagaacgacaccacatttggtcacatgtgtgctgtgatgaggggattggacaggatgcactcggacctgcacaaggcgaccaaggccttgaacgatgggaagctcatgaggatcgtcgctctgaaggacgagatagcgcgcctgaagaaggagaacgctcagctaaagggtcttccagcgccaggaggagtccggatccgcactacgccccgcaagacgacgacggcacccgtgcgcatccagcttgcgcccaggaacccacctccaccagcagctcccgcagcacctccagttccgcccgcagctccggcagttcctgcagctccagctccagctccagctccagctcccgcgttcgctctctccttcgctccagcatcagccgccagaggtccagccagtggcaccggaggttgttccctccagatggtctacaccaggactggtagccgcgcaacaggcgaggacagcaacggcgaagaacgcgctgatggtgtgcaccctagcagtgattccggcaatggtccgcccccgcttcccgagaatccgacgctagcccaagttatggcacatcagactcagatgatggcggccatgatgcagcagatgcagcagcagcaccagcagatgcaccagaggatgctgcagcacgccgaacagcagcaccagcagcttggtccccctccccctcagtccaagttgccagagtttctacgcgtcaggccacccaccttctccagcaccaccaaccctatggaggcaaatgactggctccatgcgatagagaagaagctgaatctcctgcagtgcaatgatcaggagaaggtcgctttcgccacgcaccagcttcagggtcctgcgtcagcttggtgggacaaccacatggccacccgcccaccgggtactgaagtcacatgggcagagttctgccgtagcttcaggaaggcacaggtgccagatggggtcgtggcgcaaaagaagagggaatttcgtgcactccatcagggcaaccggactgtgacagagtacctccacgagttcaatcgcctcgcgcgatatgcaccagaggatgtccgcaccgacgccgagaagcaggagaagttcatggcgggtctggatgatgagctgaccaaccaactgatatctggggactacgccgactttgagaggctagttgacaaggcaattcgtcaggaggaccaacgcaacaagatggacaggaagaggaaggccgctcagttcagggcacatcagggaagtcaccagaggccgcgcttcacttccggacagcagggtggacctaccaccatgatcgtccgccagcaccgcccgttcaaccctagcaacttcccccagggcgccagtggcagtcagaaccaccatggaggtcagcccaaccgcggtgcagctccacgcccaccaatggcaccggcacagtcaggccagcccgcgcaagccaagaaggagacgggagcaaaaccagggtcctgcttcaactgtggcgagcttggccatttcgctgacaaatgcccgaagcccaggcgtgccgggccaaggtttatccaggctcgtgtcaaccacgcatctgcggaggaggcacaagcagcaccagaggtcgtactgggtacgttccctgttaactcaatccctgcaacagtactttttgattctggtgcgacgcattctttcatttcaaagaaatttgtcgggatgcatgggttaattagagaggaacttagcacaccaatgcgggttcataccccaggaaatagctctacttcggttcaattcagcccttctataacaatagaaattcaaaggtcactatttctagccaacctcattcttctcgaatccaaagacctagatgtcattcttgggatggattggctgaccaagtttaagggggtcatcgattgtgcgaatcgcaccgtcaccttgaccaacgagaagagagaaaccgtggtgtacaaatctctagtctcgccaaagaaaggggtctcgttgaatcagattgagacggaaatcccagtggacaccgtagagaagaacttgagaaaattggaagatatacccataatctgcgagtatccagaagtgttccccgaagacctcactaccatgccacccaagagagagattgaattccggattgacttggcaccgggaactgctccaatctataagagaccgtacagaatggcggccaacgaattagcagaggttaagaagcaagttgatgagcagctgcagaaagggtacatacgaccaagcacttcaccttggggcgctccggtcatttttgtggagaaaaaggataagacgaagaggatgtgcgtcgattattgcgcacttaacgaggtcacaatcaagaataaatatcctttaccgcggatcgatgatttgtttgatcaactgaaaggagctagagtgttttctaagatagacctgcgatcaggctaccaccagttgagaattcgggaagaggatatcccgaagacggccttcaccactcggtacgggctatatgagtgcacggttatgtctttcggacttaccaacgcacccgcattcttcatgaatctgatgaacaaagtgttcatggaatttctggacaagtttgttgtggtgttcatcgacgacattcttatctattcaaagtccgaagaagaacatgaacaacatctccgtctagtactcgagaagttgaaggaacaccagctatatgccaagttcagcaagtgtgacttctggttgacggaagtcaaatttctgggccatgtcattacagctcagggtgtggcagttgatccatcgaacgtggagtcagttaccaaatggaccccacctaagaccgtgtcgcagattcggagttttcttggacttgcgggttattaccgccgattcattgaaaatttctccaggatcgcccgacccatgactcagttgcttaagaaggatgagaagtttaaatggacagctgagtgcgataagagcttcgaggagctcaagcagaaattagtatccgcaccagttttgattctgcccgacccgatgaaagacttccaagtctattgtgatgcatcccatcacggacttggatgtgtcctaatgcaagagggcagagtggttgcgtatgcctcgcggcagttgcgtccacacgaaggaaattatcccactcatgacttggaattggcagcagtggttcatgctttgaagatctggaggcactatctgattggaaaccgctgcgaagtatatacggaccataagagtctgaaatacatcttcacccaaccggacctaaaccttcgacaacgaagatggttggagctaatcaaagactatgacatgagtattcactaccacccgggtaaagccaatgtggtggcagacgctttaagccggaaaagttactgcactgccctatgcgtcgagggcatgtgtgaggaattgcggcaggagtttgaacatctcaacgtgggaattgttgaacacgggttcgtagccgctctggaggcacggcctacgctcgtggatcaagttagagccgctcaagtaaatgatccggaaatagcagagctgaaaaagaacatgagagtcggaaaggctcgggatttccttgaggatgagcatggcacaatctggattggagaaagattgtgtgtacctgacgacaaggaattgaaggatctgatactcaccgaggctcattagacccagtactccattcacccaggcagcactaaaatgtatcaagacctcaaagaaaagttttggtgggtcagcatgaggagagaaatagcggaattcgtcgcactctgtgacgtttgccaacgagtgaaggcagagcaccaaagacccgcaggtttactccaacctcttcaaatcccggaatggaaatgggaggagattggaatggactttataacgggactgccccggacatcatcgggacatgattcaatctgggtagtcgtggatcgactcaccaaggtggctcactttataccagtacataccacctatacgggaaagagattggcagaattgtacctcgcaaggatcatgtgtttgcatggggtacccaagaagatagtatccgaccgaggtagtcagttcacctcaaagttttggcagaaactgcaggaagaaatggggacccgtttaaatttcagcacggcctatcacccgcaaactgatggtcagaccgagcgagtcaatcaaatcttggaagatatgttgagagcttgcgctcttgattttgttggagcttgggacaaaagcttgccatatgcagaattctcgtacaacaacagctaccaggccagtctacagatggcaccgtttgaagctttatacggccggaagtgccgcacacctctcttctgggatcagacaggcgaacgtcaactgttcggaacagaagtattagcggaagcagaagagaaagtcagaatcatcagggaaaggttgaggattgctcagtctcgacagaagagctacgcggataaccgtcgaagggagctcacttttgaggcaggagattacgtgtatcttcgtgtcactccgctccggggagtacaccattttcagacgaaaggcaagttggcaccacgcttcgtaggaccatacaaaattttggaacgaaggggagaagttgcttatcagctagaacttccatccaacatgatcggcatccatgacgtgttccatgtgtcccaattaaagaagtgcttaagggtacctgaagaacaggctgattcggagcacattgatatccaagaggacctaacatatgtggagaagccggttcgtatacttgataccagcgaaaggagaaccagaaacaaggtcacccggttttgccgagttcagtggagtcatcattcagaagaggaagcaacctgggaaagggaagatgagttgaaagccgcccatccgcacctcttcaccagctcctccgaatctcggggccgagattccgtt

SEQ ID NO: 13875 - DNA, 2334 bp, Oryza sativa
  Clone ID: TFbOSC734j.C1.o3.gm
atggtctacactaggaatggtagccgcgcaacaggcgagggcagcaacggcgaagagcgcactgatggggtgcatcccaacagtgattccggcaatggtccgccaccacttcccgagaatccgacactagcccaagtgatggcacatcagactcagatgatggcagccatgatgcagcagatgcagcaccagcaccagcagatgcaccagaggatgctgcagcacgctgaacagcagcatcagcagtttggtccccctccccctcagtctaagttgccagagtttctacgtgtcaggccacccaccttctccagcaccaccaaccctatggaggcgaatgactggctccatgccatagagaagaagctgaatctcctgcagtgcaatgatcaggagaaggttgctttcgccacacaccagcttcaaggtcctgcgtcagcttggtgggacaatcacatggccacccgcccaccaggtactgaagtcacttgggcagagttctgccgtagcttcaggaaggcgcaggtgccagacggggtcgtggcacaaaagaagagggaattccgggcactccatcagggcaacaggactgcgacagtgtatctccatgagttcaatcgcctcgcgcgatatgcaccagaggatgtccgcaccgacgccgagaagcaggaaaagttcatggcaggtctggatgacgagctgaccaaccaactgatatctggggactacgctgactttgagaggctggttgacaaggcaatccgtcaggaggatcaacgcaacaagatggacaggaagaggaaggctgctcagttcagggcagatcagggaagtcaccagaggccgcgcttcactcccgggcagcagggtggacctaccaccatgatcgttcgtcagcaccgcccgttcaaccctagcaactttccccagggcgccagtggcagtcagaaccaccatggaggtcagtccaaccgcggtgcagctccacgcccaccaatggcaccggcacagtcaggcccgcccgcgcaagccaagaaggagactggagcaaaaccagggtcctgcttcaactgtggcgagcttggccacttcgctgacaaatgcccgaagcctaggcgtgccgggccaaggtttatccaggctcgtgtcaaccacgcatctgcggaggaggcacaagcagcaccagaggttgtactggtcaccttgaccaacgagaagggagaaacggtagtgtacaaatcaccagactcaccaaagcgaggggtctctttgaatcagattgagacggaaatcccagtggacaccgtggagaagaacttgagaaaattggaagatatacccatagtctgcgagtatccagaagtgttccccgaagacctcaccaccatgccacccaagagagagattgaattccggattgacttggcaccgggaaccgctccaatttacaagagaccgtacagaatggcggccaacgaattagccgaggtcaagaagcaggttgatgagcagctgcagaaagggtacattcgaccaagtacttcaccttggggtgctccggtcatttttgtggagaaaaaggataagacgaagaggatgtgcgttgattatcgcgcactcaacgaggtcacaattaagaacaaatatcctttgccgcgaatcgatgatttgtttgatcaactgaaaggagctaaagtgttttctaaggtagacctgcgatcaggctaccatcagttgagaattcaggaagaggatattccaaagacagccttcaccactcggtacaggctatatgagtgcacggttatgtccttcggacttaccaacgcacccgcgttcttcatgaatctgatgaacaaagtgttcatggaatttctggacaagtttgttgtggtattcatcgacgacatacttatctattcaaagtccgaagaagaacatgagcaacatctccgtctggtactcgagaagttgaaggagcaccagctatatgccaagttcagcaagtgtgacttctggttgacggaagtcaaatttctgggccatgtcattacagctcagggtgtggcagttgatccattgaacgtggagtcagttaccaaatggaccccaccgaagaccgtgtcgcagattcgaagttttcttggacttgcgggatattaccgccgattcatcgaaaacttctccaggatcgcccgacccatgactcagttgcttaagaaagatgagaagtttaaatggacagctgagtgcgataagagttttgaggagctcaaaaagaaattagtatccgcaccagttttgattctgcccgaccagatgaaagacttccaa

SEQ ID NO: 13876 - DNA, 4908 bp, Oryza sativa
  Clone ID: TFbOSC900034j.C1.o16.fg
atgggttgcaagatggccggacacccacccaaccactgtggagaaggcatgatcgactttgtggcagagttggcacgtatgacgctggtggtgggctaccccaatgcgccagagtacacgacggttccaccgctcagtggcgagcttcctcaccgtgttcgcctggaggtccacggctacgtgggtacctgcctagctaacatggtggttgaggcatctggaggcacagcagatcacgcctgtcaggaggcagcatacctgatgatggccagactacgggagcgccacaactacatcttccatgacacggcgtaccgatttcaccctcgtcgagccagtggtgatgatgtcagtaccttccgtccgacagctggcgagaacgacaccacctttggtcacatgtgtgctgtgatgaggggattggataggatgcactcggatctgcacaaggcgaccaaggccttgaatgatgggaagctcatgaggatcgtcgctttgaaggatgagatagcgcgcctgaagagggagaatgctcagttaaagggtcttcccgcgccaggaggagtccggatccgcactacaccccgcaagacgacgacgaaacccgtgcgcatccagcttgcgcccaggaacccacctccgcccgcagctccggcagttcctgcagctccagctccagctcccgttcacgtgttagctcccgcgtccgctctctccttcgctccagcatcagccgccaggggtccagccagtggcaacggaggttgcttgtttgggatggtttacaccaggaatggtagccgcgcaacgggtgagggcagcaacggcgaagagcgcactgagggtgtgcatcccaacagcaattccggcaatggtccgccaccacttcccgagaatccgacgctagcccaagtgatggcacatcagacacagatgatagcagccatgatgcagcagatgcagcagcagcaccagcagatgcaccagaggatgctgcagcacgccgaacagcagcatcagcagtttggtccccctccccctcagtccaagttgccagagtttctacgtgtcaggccacccaccttctccagcaccaccaaccctatggaggcgaatgactggctccatgccatagagaagaagctgaatctcctgcagtgcaatgatcaggagaaggttgctttcgccacacaccagcttcaaggtcctgcgtcggcttggtgggacaatcacatggccacccgcccaccaggtactgaagtcacttgggaagagttctgccgtagcttcaggaaggcgcaggtgccagatggggtcgtggcacaaaagaagagggaattccgagcactccatcagggcaacaggacggtgacggagtatctccatgagttcaatggcctagcgcgatatgcaccagaggatgtccgtaccgacgccgagaagcaggaaaagttcatggcaggtctggatgacgagctaaccaaccagttgatatctggagattacgccgatttcgaaaggctgatggacaggaagaggaaggccgctctgttcagggcacctcagggaagtcaccagaggccgcgcttcacccccgggcagcagggtggacctaccaccatgatcgtccgccagtaccgcccgttcaaccctagcaactttccccagggcgccagtggcagtcagaaccatcatggaggtcagcccagccgcggtgcagctccacgcccaccagtggcaccagcacagtcaggcccgcccgcgcaagccaagaaggagactggagcaaaaccagggtcctgcttcaactgtggcgagcttggccacttcgccgacaaatgcccaaagcctaggcgtgccgggccaaggtttatccaggctcgtgtcaaccacgcatctgcggaggaggcacaagcaacaccagaggttgtactgggtacgtttcctgttaactcaatccctgcaacaatactttttgattctggtgcaacgcattcgttcatttcaaagaagtttgtcgggatgcatgggttaaggaaagaagagcttagcacaccaatgagggttcataccccgggaaatagttcaacctcagtcagttttagcccttcagtgctaatagaaattcaaagatcaccatttctagctaacctcattcttctcgaatctaaagacctagatgtcattcttgggatggattggctgaccaagtttaagggagtcatcgattgtgcgaatcgtaccgtcaccttgaccaacgagaagggagaaacggtagtgtacaaatcaccagactcaccaaagcgaggggtctctttgaatcagattgagacgaaaatcccagaggacaccgtggagaagaacttgcggaaattggaagatatccccatagtctgcgagtatccagaagtgttccccgaagaccttactaccatgccacccaagagagagattgaattccggattgacttggcaccgggaaccgctccaatttacaagagaccgtacagaatggcggccaatgaattagccgaggtcaagaagcaggtggatgagcagctgcagaaagggtacattcgaccaagtacttcaccttggggtgctccgatcatttttgtggagaaaaaggataagacgaagaggatgtgcgttgattatcgcgcactcaacgaggtcacaatcaagaacaaatatcctttgccgcgaatcgatgatttgttcgaatttgatcaactgaaaggagctaaagtgttttctaagatagacctgcgatcaggctaccaccagttgagaattcgggaagaggatattccaaagacggccttcaccactcggtacgggctatatgagtgcacggttatgtctttcggacttaccaacgcacccgcattcttcatgaatctgatgaacaaagtgttcatggaatttctggacaaatttgttgtggtgttcatcgacgacattcttatctattcaaagtccgaagaagaacatgagcaacatctccgtctagtactcaagaagttgaaggagcaccagctaacgccatgttcagcaactcagggtgtggtagttgatctgtcgaacgtagagtcagttaccaaatggaccccaccgaagaccgtgtcgcagattcgaagttttcttggacttgcgggatattaccgccgattcatcgaaaacttctccaggatcgcccgacccatgactcagttgcttaagaaagatgagaagtttaaatggacagctgagtgcgataagagttttgaggagctcaaaaagaaattagtatccgcaccagttttgattctgcccgaccagatgaaagacttccaagtctattgcgatgcatcccgccatggacttggatgtgtcctaatgcaagagggcagggtggttgcgtatgcctcgcggcagttgcgtccacacgaaggaaattatccaactcatgacctggaattggcagcagtggttcatgttttgaagatctggaggcactatctgattggcaaccgctgcgaagtatatacggaccataagagtctgaaatacatcttcacccaaccggacctaaatctccgacaacgaagatggttggaactaatcaaagactatgacatgagcattcactaccacccgggtaaagccaatgtggtggcagacgcattaagcaggaaaagttactgcactgccctatgcatcgagggcatgtgtgaggaattgcggcaggagtttgagcatctcaacgtgggaattgttgaacacggtcagagcagagtaaatgattctgaaatagcagagctgaaaaagaacatgagagtcggaaaagcccgggatttccatgaagatgagcatggcacaatctggttgggagaaagattgtgtgtacctgacgacaaggaactgaaggatctgatactcaccgaggctcatcagacccagtactccattcatccaggcagcaccaaaatgtatcaagacctcaaagaaaagttttggtgggtcagcatgaggagagaaatagctgaattcgtcgcactctgcgatgtttgccaacgagtgaaggcagagcaccaaagaccagcaggtttactccaacctcttcaaatcccggaatggaaatgggaggagattggaatggactttataacaggactgccccggacatcatcgggtcatgattccatctgggtagtcgtggatcgactcactaaggttgctcacttcataccagtacataccacgtatacgggcaaaagcacggcctatcacccgcaaactgatggtcagaccgagcgagtcaatcaaatcttggaagatatgttgagagcttgcgctctcgattttggtggagcttgggacaaaagcttgccatatgcggaattctcgtacaacaacagctaccaggctagtctacagatggcaccgtttgaagctttatacggccggaagtgccgcacacctctcttctgggatcagacaggcgagcgtcaactgttcgggacagaggtattagcggaagcagaagagaaagtcagaatcatcagggaaaggttgaggattgcacagtctcgacagaagagctacgcggataaccgccgaagggagctcacttttgaggcgggagattacgtgtatcttcgtgtcactccgctccgaggagtgcaccgttttcaaaacaaaggcaagttggcaccacgcttcgtgggaccatacaaaatcttggaacgaaggggagaagttgcttatcagttagaacttccatccaatatgatcggcatccatgacgtgttccacgtgtcccaattaaagaagtgcttaagggtacccgaagaacaggctgattcggaacacattgatatccaggaaggacctaacctacgtggagaagccggttcgtatacttga

SEQ ID NO: 13877 - DNA, 4056 bp, Oryza sativa
  Clone ID: TFbOSC900034j.C1.o26.fg
atggtctacaccagaactggcacccgcacgactggcgagggcagcaacggcgaagaacgcgctgatggtgtgcaccccaacagtgattccggcaatggtccgccaccacttcccgagaatccgacactggcccaagttatggcacatcagactcagatgatggcagccatgatgcagcaaatgcagcagcagcaccagcagatgcatcagaggatgctgcagcatgccgaacaacagcaccagcagtttggtccccctccccctcagtccaagttgccagagtttctacgcgtcaggccacctaccttctccagcatcaccaaccccatggaggcgaatgactggctccatgccatagagaagaagttgaatctcctgcagtgcaatgatcaggagaaggtcgctttcgccacacaccagcttcaaggtcccgcgtcagcttggtgggacaatcacatggccacccgcccgctaggcactgaagtcacttgggcggagttctgtcgtagcttcaggaaggcgcaggtgccagacggggtcgtggcacaaaagaagagggaattccgggcactccatcagggcaacaggacagtgaccgagtatcttcacgagttcaatcgtctcgcgcgatatgcactggaggatgtccgcactgacgccgagaaacaggaaaagttcatggcaggtctggatgacgagctgaccaaccaactgatatctggggactacgctgattttgaaaggctggttgacaaggcaatccgtcaggaggatcagcgcaacaaaatggacgggaagagaaaggcggcgcagctccggtccaaccaagggtggacctaccaccatgatcgtccgcagcaccgcccgttcaactcaagcaacttccaccagggcgccagtggcagtcagcaccatggaggtcagcccaaccgcggtgcagctccacgcccaccaatggcaccaacacagtcagccccgtccgcgcaagccaagaaggagactggcacaaaaccagggtcctgcttcaactgtggcgagcttggccacttcgctgacaaatgcccgaagcccaggcataccgggccaaggtttgtccaggctcgcgtcaaccatgcgtccgcagaggaggcacaagcagcaccagaggtcgtactgggtacgtttcctgttaactcaatccctgcaacagtactttttgattctggtgcaacgcattcgttcatttcaaagaagtttgtcggggtgcatgggttaataagagaggaacttagcacacccatgcgggttcataccccagggaatagctccacttcggtacaattcagcccttctataacaatagaaattcaaaaatcaccattcctagccaacctcattcttcttgattccaaagacctagatgtcattctggggatggattggctgaccaagttcaagggagtcattgattgtgcgaatcgcacagtcactttgaccaacgagaagggagaaaccgtagtgtacaaatcattagtctcaccaaagcaaggggtctccttgaatcagattgaggcggaaatcccagtggtcactaaggagaagagttcgaggaaattggaagagattcccatacgagagattgaattccggattgatttggcaccgggaaccgcaccaatttacaagagaccgtacaggatggcggccaacgaactagcaaaggtcaagaagcaggttgatgagcagctgcagaaagggtacatacgaccaagtacttcaccttggggtgctccggtcatttttgtggagaaaaaggataagacgaagaggatgtgcgttgattatcgcgcactcaatgaggtcacaatcaagaataaatatcctttaccgcggatcgatgatttgtttgatcaactgaagggagctaaggtgttctctaagatagacctgcgatcaggctaccaccagttaagaatccgggaagaggatattccaaagacggctttcaccactcggtacgggctgtatgagtgcacggttatgtcttttggacttaccaacgcacccgcattcttcatgaatctaatgaacaaagtgttcatggagtttctggacaagtttgttgtggtattcatcgacgacatacttatctactcaaagtccgaagaagaacatgagcatcatctccgtctggtactcgagaagttgaaggagcaccagttatacgccaagttcagcaagtgtgacttctggttgacggaagtcaaatttctgggccatgttattacagctcagggtgtggccgtcgacccatccaacatggagtcggttaccaaatggaccccaccgaagaccgtgtcgcagattcgaagttttcttggacttgcgggttattaccgccgtttcatcgagaacttctctaggatcgcccgacccatgactcagttgcttaagaaagatgagaagttcaaatggacagctgagtgcgataagagctttgaggagctcaagaagaaattagtatccgcaccagttttgattctgcccaaccagatgaaagacttccaagtctattgcgacacatcccgccacgggcttgggtgtgttctaatgcaggaaggcagagtggtggcgtatgcctcacgacagctgcgtccacacgaagggaattatccaacccatgatctggaactggcagcagtggttcatgccttgaagatctggaggcactatttgattggcaaccgttgtgaagtatatacggatcacaagagtctgaaatacatcttcacccaaccggacctaaatctcctacaacgaagatggttggaattaatcaaagactatgatatgagcattcactaccacccggggaaagccaatgtggtggcagacgcattaagcaggaaaagttactgcactgctctatgcatcgagggcatgtgtgaggaattgcggcaggagttggagcatctcaacgtgggaattgttgaacacgggttcgtagccgctctggaagcacggcctacgctcgtcgatcaagttagagccactcaagtaaatgatccggaaatagcagagctgaaaaagaacatgagagtcggaaaggctcgggatttccttgaggatgagcatggcacaatctggatgggggaaagattgtgtgtacctgacaacaaggagctgaaggatctggtactcaccgaggcccatcagacacagtattacattcacccaggcagcaccaagatgtaccaagaccttaaagaaaaattttggtggacagatggtcagaccgagcgagtcaatcaaattttggaagacatgttgagagcttgcgctcttgactttggtggagcttgggacagatgtttgccatatgcggaattctcgtacaacaacagctaccaagccagtctacagatggcaccgttcgaagctttatacggccggaagtgccacacacctctcttctgggatcagacaggcgagcgtcaattgttcgggacagaggtattaacggaagcagaagagaaagtcagaaccatcagggaaaggttgagaattgcccagtctcgacagaagagctacgcggataaccgccgaagagagctcacttttgaagcaggggattatgtgtatctttgggttactccgctccggggagtgcaccgttttcaaaccaaaggcaagttggcaccatgtttcgtgggaccctacaaaatcttggaacgaaggggagaagttgcttatcagttagaacttccatccaatatgatcggcatccatgatgtattccacgtgtcccaattaaagaagtgcttaagagtacttgaagaacaggctgattcggaacacattgatatccaggaggacctgacatatgtggagaagctgattcgtatacttgataccagcgaaagaagaaccagaaacaaggtcaccaggttttgccgagttcagtggagtcaccattcagaagaggaagcaacctgggaaagggaagatgagttgaaagccgcccatccgcacctcttcgccagctcctccgaatctcggggccgagattccgtttaa

SEQ ID NO: 13878 - DNA, 2670 bp, Oryza sativa
  Clone ID: TFbOSC900063j.C1.o16.fg
atggaggcgaatgactggctccatgccatagagaagaagctgaatctcctgcagtgcaatgatcaggagaaggttgctttcgccacacaccagcttcaaggtcctgcgtcaccttggtgggacaatcacatggccacccgcccgccaggcactgaagtcacttgggcagagttctgtcgtagcttcaggaaggcgcaggtgccagatggggtcgtggcacaaaagaagagagaattccgagcactcaaccagggcaacaggacggtgacggagtatctccatgagttcaatcgccttgcgcgatatgcaccggaggatgtccgtactgacgccgagaagcaggaaaaattcctagcaggtctggatgatgagctaaccaaccagttgatatctggagattacgccgatttcgaaaggctggtggacaaggcaatccgtcaggaggatcaacgcaacaagatggacaggaagaggaaggccgctcagttcagggcacatcagggaagtcaccagaggccgcgcttcgctcccgggcagcagggtggacctaccaccatgatcgtcctccagtaccgcccgtttaaccctagcaacttcccccagggcgccagtggcagtcagatccaccatggaggtcagcccaaccgtagtgcagctccacgcccaccagtggcaccggcacagtcaggcccgtccgcgcaagccaagaaggagactggaacaaaaccagggtcctgcttcaactgtggcgagcttggccacttcgctgacaaatgcccgaagcctaggcgtgccgggccaaggtttgtccaggctcgtgtcaaccacgcatctgcggaggaggcacaagcagcaccggaggtcgtactgggtacgtttcctgttaactcaatccctacaacagtactttttgattctggtgcaacgcattcgttcatttcaaagaagtttgtcgggatgtatgggttaataagagaggaacttagcacaccaatgcgggttcataccccagggaatagctccactttggttcaattcagcccttctataacaatagaaattcaaagatcaccatttctagccaacctcattcttctcgaattcaaagacctagatgtcattcttgggatggattggctaaccaagttcaagggagtcattgattgtgcgaatcgcacagtcaccttgaccaacgagaagggagaaacaagaccgtacagaatggcggccaacgaactagcagaggtcaagaagcaggttgatgagcagctgcagaaagggtacattcgaccaagtacttcaccttggggtgctccggtcatttttgtggagaaaaaggataagacgaagaggatgtgcgttgattatcgcgcactcaacgaggtcacaatcaagaacaaatatcctttgccgcgaatcgatgatttgtttgatcaactgaaaggagctaaagtgttttctaagatagacctgagatcaggctaccaccagttgagaattcgggaagaggatattccaaagacgaccttcaccactcggtacgggctatatgagtgcacggttatgtctttcggacttactaacgcacccgcattcttcatgaatctgatgaacaaagtgttcatggaatttctggacaattttgttgtggtattcatcgacgacatacttatctattcaaagtccgaagaagaacatgagcaacatctccgtctggtactcgagaagttgaaggagcaccagctatacgccaagttcagcaagtgtgacttctggttgacggaagtcaaatttctgggccatgtcattacagctcagggtgtggcagttgatccatcgaacgtggagtcagttaccaaatggaccccacctaagaccgtgtcgcagattcggagttttcttggacttgcgggttattaccgccgattcattgaaaacttctccagaatcgcccgacccatgactcagttgcttaagaaagatgagaagtttaaatggacagctgagtgcgataagagttttgaggagctcaagaagaaattagtatccgcaccagttttgattctgcccgaccagatgaaagacttccaagtctattgcgatgcatcccgtcacggacttggatgtgtcctaatgcaagagggcagagtggtcgcgtatgcctcgcggcagttgcgtccacacgaagggaattatccaactcatgacctggaattggcagcagtggttcatgctttgaagatctggaggcactatctgattggcaaccgctgcgaagtatatacggaccataagagtctgaaatacatcttcacccaaccggacctaaatctccgacaacggagatggttggaactaatcaaagactatgacatgagcgttcactaccacccgggtaaagccaatgtggtggcagacgcattaagcaggaaaagttactgcactgccctatgcatcgagggcatgtgtgagaaattgcagcaggagtttaagcgtctcaacgtgggaattgttgagcacgggttcgtagccgctctggaagcacggcctacgctcgtcgatcaagttagagccgctcaagtgaatgatcccgaaatagcagagctgaaaaagaacatgagagtcggaaaggctcgggatttccttgaggatgaatacggcacaatctga

SEQ ID NO: 13879 - DNA, 5352 bp, Oryza sativa; identical to SEQ ID NO: 13874
  Clone ID: TFbOSC900133j.C1.o2.np

SEQ ID NO: 13880 - DNA, 4713 bp, Oryza sativa
  Clone ID: TFbOSC900157j.C1.o2.fg
atggccggccacccacccaaccaccgcggagaaggcatgatcgactttgtggcagagttggcatgtatgacgctggtggtaggctaccccaacgcgccagagtacacgacgattccaccgctcagtggcgagcttcctcaccgtgttcgtctggaggtccacggctacgtgggtacctgcctagctaacatggtggtggaggcatctggaggcacagcagatcacgcctgtcaggaggcagcatacctgatgatggccagactacgggagcgccacaactacatcttccacgacacggcgtactggtttcaccctcgtcgagccagcagtgatgatgtcagtactttccgtccgacagccggcgagaacgacaccacctttggtcacatgtgtgctgtgatgaggggattggataggatgcactcggacctgcacaaggcgaccaaggccttgaatgatgggaagctcatgaggatcgtcgctctgaagagggagaacgctcagttaaagggtcttcccgcgccaggaggagtccggatccgcaccacgccccgcaagacgacgactgcacccgtgcgcatccagcttgcgcccaggaacccacctccatcagcagctcccgcagcacctccagttccgcccgcagttcctgcaactccagctccagctcccgcgtccgctctctccttcgctccagcatcagccgccaggggcccagccagaggcaacggaggttgcttgtttgggatggtctacaccaggaatggtagccgcgcaacaggcgagggcagcaacagcgaagagcgcactgagggtgtgcatcccaacagcaactccggcaatggtccgccaccacttcccgagaatccgacgctagcccaagtgatggcacatcagacacagatgatggcagccatgatgcagcagatgcagcagcagcaccagcagatgcaccagaggatgctgcagcacgccgaacagcagcaccagcagtttggtccccctccccctcagtccaagttgccagagtttctacgtgtcaggccacccaccttctccagcaccaccaaccctatggaggcgaatgactggctccatgccatagagaagaagctgaatctcctgcagtgcaatgatcaggagaaggttgctttcgccacacaccagcttcaaggtcctgcgtcagcttggtgggacaatcacatggccacccgcccaccaggtactgaagtcacttgggcagagttctgccgtagcttcaggaaggcgcaggtgctagacggggtcgtggcacaaaagaagagggaatttcgggcacttcatcagggcaacaggactgtgacggagtacctccatgagttcaatcgcctcgcgcgatatgcaccagaggatgtccgtaccgacgccgagaagcaggaaaagttcatggcaggtctggatgacgagctaaccaaccagttgatatctggagattacgccgatttcgagaggctggttgacaaggcaatccgtcaggaggatcaacgcaacaagatggacaggaagaggaaggccgctcagttcagggtacctcagggaagtcaccagaggccgcgcttcgctcctgggcagcagggtggacctaccaccatgatcgtccgtcagtaccgcccgttcaaccctagcaactttccccagggcgccggtggcagtcagacccaccatagaggtcagtcaaaccgcggtgcagctccacgcccaccaatggcaccggcacagtcaggcccgcccgcgcaagccaagaaggagactggagcaaaaccagggtcctgcttcaactgtggcgagcttggccacttcgctgacaaatgcccgaagcctaggcgtgccgagccaaggtttatccaggctcgtgtcaaccacgcatctgcggaggaggcacaagcagcaccagaggtcgtactgggtatgttccctgttaactcaatccctgcaacagtactttttgattctggtgcaacgcattctttcatttcaaagaaatttgtcgggatgcatgggttaataagagaggaacttagcacaccaatgcgggttcataccccagggaatagctccacttcggttcaattcagcccttctataacaatagaaattcaaagatcaccatttctagccaacctcattcttctcgaatccaaagacctagatgtcattcttgggatggattggctgaccaagtttaagggggtcatcgattgtgcgaatcgcacagtcaccttgaccaacgagaagggagaaaccgtggtgtacaaatcactagtctcaccaaagcaagaggtctctttgaatcagattgaagcggaaatcccagtggacaccgtggagaagagtttgaggaaattggaagatatacccatagtctgcgagtatccggaagtgttccccgaagacctcactaccatgccacccaagcgagagattgaattccggattgacttggcaccgggaaccgctccaatttacaagagaccgtacagaatggcggccaacgaattagccgaggtcaagaagcaggttgatgagcagctgcagaaagggtacattcgaccaagtacttcaccttggggtgctccggtcatttttgtggagaaaaaggataagacgaagaggatgtgcgttgattatcgcgcactcaacgaggtcacaaccaagaacaaatatcctttgccgcgaatcgatgatttgtttgatcaactgaaaggagctaaagtgttttctaagatagacctgcgatcaggctaccaccagttgagaattcgggaagaggatattccgaagacggccttcaccactcggtacgggctatatgagtgcacggttatgtcgttcggacttaccaacgcacccgcattcttcatgaatctgatgaacaaagtgttcatggaatttttggacaagtttgttgtggtgttcatcgacgacattcttatctattcaaagtccgaagaagaacatgaacaacatctccgtctagtactcgagaagttgaaggagcaccagctatacgccaagttcagcaagtgtgacttctggtcgacggaagtcaaatttctgggccatgtcattacagctcagggtgtggcagttgatccatcgaacgtggagtcggttaccaaatggaccccgccgaagaccgtgtcgcagattcgaagttttcttggacttgcaggttattaccgccgattcatcgaaaacttctccagaatcgcccgacccatgactcagttgcttaagaaagatgagaagtttaaatggacagctgagtgcgataagagttttgaggagctcaaaaagaaattagtatccgcaccagttttgattctacccgaccagatgaaagacttccaagtctattgtgatgcatcccgtcacggacttggatgtgtcctaatgcaagagggcagagtggttgcgtatgcctcgcggcagttgcgtccacacgaagggaattatccaactcatgacctggaattggcagcagtggttcatgctttgaagatctggaggcactatctgattggcaaccgctgcgaagtatatacggaccataagagtctgaaatacatcttcacccaaccggacctaaacctccgacaacgaagatggttggaactaatcaaagactatgacatgggtattcactaccacccgggtaaagccaatgtggtggcagacgctttaagccggaaaagttactgcactgccctgtgcatcgagggtatgtgtgaggaattgcggcaggagtttgagcatctcaacgtgggaattgttgaacacgggtttgtggccgctctgaaggcatggcctacgcttgtggatcaagtcaaagcagctcaagtaaacgattctgaaatagcagagttgaaaaagaacatgagagtcggaaaagcccgggatttccacgaagatgagcatggcacaatctggttgggagaaagattgtgtgtacctgacgacaaggaactgaaggatctgatactcaccgaggctcatcagacccagtactccattcatccaggcagcactaaaatgtatcaagacctcaaagaaaagttttggtgggtcagcatgaggagagaaatagctgaattcgtcgcactctgcgatgtttgccagcgagtgaaggcagagcaccaaagaccagcaggtttactccaacctcttcaaatcccggaatggaaatgggaggagattggaatggactttataacaggactgccccggacatcatcgggtcacgattcaatctgggtagtcgtggatcgactcactaaggttgctcacttcataccagtacataccacatatacgggcaaaaggttggcggagctttacctttcgagaatcatgtgcctacatggagtacccaaaaagattgtatctgaccgagggagtcagttcacctcaaaattctggcagaagctgcaggaagaattggggacccgtttaaatttcagcacggcctatcacccgcaaactgatggtcagaccgagcgagtcaatcaaatcttggaagatatgttgagagcttgcgctcttgattttggtggagcttgggacaaaagcttaccatatgcggaattctcgtacaacaacagctaccaggccagtctacagatggcaccgtttgaagctttatacggccggaagtgccgcacacctctcttctag

SEQ ID NO: 13881 - DNA, 7581 bp, Oryza sativa
  unsure (1)..(7581): unsure at all n locations
  Clone ID: TFbOSC900164j.C1.o3.fg
atggcagatactcgatcatctgccgaggatgaaaccaagcgccctacggaggaggagactgggcgtgatggagagatgggatccgaaccaaatctggaagagagattgaagaggttgaatatgcatggggaggaggaaactgacctagatttctcggaggaattggaagggctgatcaaggacgtacgctggctcgctctttttagggtttatactacaaaaccctttagccactcagcgctgttgaatgctatgagaaacgcctggtcttcggcacaggatatctcgtttaaggtaatggattcaaatctctttatggtacaatttcaatgccttggtgattggaacagagtsatggaaggaggtccatggatctttagaggagctcctgtagtccttaaagaatatgatggcttcactaatgtgtttgattataagttggataaaattccagtttggacgcgcattcatggggtgcctgatgggttgatgaagaagagagaactagcagagagggttgctaagaaggttggtgaacaaccattcacagttatagtagatgaggggagaatcaatcctgttaaatacctcagagctagggttttcttagatttgagtwaacccctcgttcggtttgtcccaatcacgatcaaggaaagaatattgtatccaagagcgagagcaaattggttgraacatggtgaccgtaacaccagtttctttcaacaatttgctgcmcmgagaagaagaagaaagaawattaagggacttattgatgagaatggatgttttcaaaccgatgaagacagaatgagtamcatagtttatgggtacttccaaantctcttctcggctgaggttacacaaatagatggatcttctttgctggatgtacagagaaaagtaacgggagatatgaattttggattactagcaccgtatacagctgaagaggtgaaaaatgctctgttcagtataggtgatctgaaagctccgggaccagatgggctgcacgctgttttctataaaagattctgggatatgttggagagtgatctggttaaagaagttcttgatgcaataaatacaatgaaaattccagatggatggaatgacacaactgttgtcatgattccaaaggttgataaaccagacagagtaactcaatttagacccattagcttatgtaatgtggtctataaaataatttctaagatgttagcaaaccggctaaagtgtcttctccctgaaataataagtgatcagcagagtgcttttgtcccgggcaggttgatcacggataatgttttggtagcttatgagtgcttacacacaatgaaaaagaagaaaggaagaaaagttcagtacagggtgaatttcaatggtgtattgacagaggttattaagccttctcgaggcttaaggcagggggatcccttatccccatacctttttttgcttgttgctgagggtctatcgagtatgctgcaaggagctgaaaatagaggagacttagtgggaatcagaatggtctacaccaggaatggtagccgcgcaacaggcgagggcagcaacggcgaagaacgcgctgatggtgtgcaccccagcagtgattccggcaatggtccgccaccacttcccgagaatccgacccttgcccaagttatggcacatcagactcagatgatggcagccatgatgcagcagatgcagcagcagcaccagcagatgcaccagaggatgatgcagcacgtcgaacagcagcaccagcagtttggtccccctccccctcagtccaagttgccagagtttctacgcgtcaggccacccaccttctcaagcaccaccaaccccatggaggcgaatgactggctccatgccatagagaagaagctgaatcgcctgcagtgcaatgatcaggagaaggtcgctttcgccacacaccagcttcagggtcccgcgtcagcttggtgggacaatcacatggccacccgcccaccaggtactgaagtcacatgggcagagttctgccgtagcttctggaaggcgcaggtgccagacggggtcgtggcacaaaagaagagggaattccgggcactccatcagggcaacaggactgtgacagagtacctccacgagttcaatcgcctcgcgcgatatgcaccagaggatgtccgcaccgacgccgagaagcaggagaagttcatggcgggtctggatgatgagctgaccaaccaactgatatccggggactacgctgactttgagaggttggttgacaaggcaatccgccaggaggatcaacgcaacaagatggacaggaagaggaaggccgcacagttcagggcacctcagggaagtcaccagaggccgcgcttcgctcctgggcagcagggtggacctaccaccatgatcgttcgtcagcaccgcccgttcaaccctagcaactttccccagggcgccagtggcagtcagaaccaccatggaggtcagtccaaccgcggtgcagcttcacgcccaccaatggcaccggcacagtcaggcccgcccgcgcaagccaagaaggagactggagcaaaaccagggtcctgcttcaactgtggcgagcttggccacttcgctgacaaatgcccgaagcctaggcgtgccgggccaaggtttatccaggctcgtgtcaaccacgcatctgcggaggaggcacaagcagcaccagaggtcgtactgggtacgttccctgttaactcaatccctgcaacagtactttttgattctgacctagatgtcattcttgggatggattggctgaccaagtttaagggggtcatcgattgtgcgaatcgcacagtcaccttgatcaacgagaagggagaaancgtggtgtacaaatctctagtctcgccaaagaaaggggtctctttgaatcagattgaagcggaaatcccagtggacaccgtagagaagaactcgagaaaattggaagatatacccatagtctgcgagtatccagaagtgttccccgaagacctcactaccatgccacccaagagagagattgaattccggattgacttggcaccgggaactgctccaatctataagagaccatacaggatggcggccaacgaactagcagaggtcaagaaacaggttgatgagcagctgcagaaagggtacattcgaccaagtacttcacctttgggtgctccggtcatttttgtggagaaaaaggataagacgaagaggatgtgcgttgattaccacgcactcaacgaggtcacaatcaagaacaaatatcctttgccgcgaatcgatgatttgtttgatcaactgaaaggagctaaagtgttttctaagatagacctgcgatcaggctaccaccagttgagaattcgggaagaggatattccgaagacggccttcaccactcggtacgggctatatgagtgcacggttatgtctttcggactcaccaacgcacccgcattcttcatgaatctgatgaacaaagtgttcatggaatttctggacaagtttgttgtggtgttcatcgacgacattcttatctattcaaagtccgaagaaaaacatgaacaacatttccgtctggtactcgagaagttgagggagcaccagctatatgccaagttcagcaagtgtgacttctggttgacggaagtcaaatttttgggccatgtcattacagctcagggttattaccgtcgattcatcgaaaatttctccagaatcgcccgacccatgactcagttgcttaagaaggatgagaagtttaaatggacagccgagtgcgataagagcttcgaggagctcaagaagaaattagtatccgcacccgttttgattctgcccgacccgatgaaagacttccaagtctattgtgatgcatcccgtcacggacttggatgtgtcctaatgcaagagggcagagtggttgcgtatgcctcacggcagttgcgtccacacgaagggaattatccaactcatgacttggaattggcagcagtggttcatgctttgaagatctggaggcactatctgattggcaaccgctgcgaagtatatacggaccataagagtctgaaatacatcttcacccaaccggacctaaatctccgacaacgaagatggttggaactaatcaaagactatgacatgagtattcactaccacccgggtaaagccaatgtggtggcagacgctttaagccggaaaagttactgcactgccctatgcatcgagggcatccgctctggaggcacggcctacgctcaagcaaatgattctgaaatagcagagctgaaaaagaacatgagtgtcggaaaagcccgggatttccacgaagatgagcatggcacaatctggttgggagaaagattgtgtgtacctgacgacaaggaactgaaggatctgatactcaccgaggctcatcagacccagtactccattcacccaggcagcactaaaatgtatcaagacctcaaagaaaagttttggtgggtcagcatgaggagagaaatagctgaattcgtcgcactctgcgatgtttgccaacgagtgaaggcagagcaccaaagaccagcaggtttacttcaacctcttcaaatcccggaatggaaatgggaggagattggaatggactttataacaggactgccccggacatcatcgggtcacgaatcgatctgggtagttgtggatcgactcactaaggttaatttggagcgtcacgggctagttccggtcgggactagttcggggcgtgacagtagaccacggattcacaagtatcgtgtggtgccttcgacgctacaccaatgcttaaagttcctagatggtagtgggacgcaacagaggatcgtcggcaacctctctccatacactacccaagaatcgcatcatgccgatgcaaagtactattttccagttgacgattctgatcaaactcttggtcgaacaactccggcagcggatctcctaatcgcgcctggacgcacacctaccccagagataagacggctcatcacagcaggaccacttgctggtgcgacagggtcctcaacccgtaatcgcagaaataacgctcgccaccactcattcatgagtgcacagtatgagaataagccgtatacgggagccggaatgtccggtgtcgtggttccagtggagaargatactgctcttacgtcaccgactttcacacctctgttgttgaaagcagggacatcatcacggactccaactacacaaacgtctgtggcgagagttccggttgatttacaggctccctcatcaaaagaaatcttgctaaccagaaatgttgcaatggtccaaggccgcaagttgctagatatcagcaacgatgcgccgacagtaatcacaatcagggctcgcaacaattcaagaagaagtggctaccactatgaaggtagatgccaaattaattcctttattggaaaaggctgggatcaacgttcaacaaaacaggcgaatgccgccgccaccggctatatttacgctagcatgatcacagagcaagagggagaattagaagatcccttcatgcttgatgaactcaaagaggagaagcaacccaccattgacgatcttgtggaaattaatttaggcaccatggatgatccccgccctacatttgttagtgccgcgctttcagccgaagaacaagagagttatcgaagcttcctgatggagtaccgagattgctttgcttggacatataaggagatgccgggtcttgatccccgtgttgcaacacacaaacttgccatcgacccacaatttcggcctgtaaagcagccgccacgtcgcctacgaccagaattccaagatcaagtcattgcggaggtagataggcttatcacagcaggatttatcaaagagtctattgttgccgagcttttcaaaaagtttgcaaaaagggcccaaaatgaatttagttgcactcttgtgaaaattagaagtgacaatggttccgagtataaaaataccaatatcaaggactattgtgatgatcttggtatcaaacatgagctttccgctacctactcacctcaacaaaatggtgtagtggagaggaaaaatcatacattggttgagatggcaagttatgcctcaaatagcaaggcataccgggtctacaataagaacaaaggtattgtggaagaaactgttgatgttcaatttgatgaaactaatggttcccaagaggggcacgagaatttggatgatgtaggtgatgaaggcttgatgagagctatgaagaatatgtctattggagatgtcaagcctattgaagtggaagacaagccatccacctccactcaaggtgagccatctacttccgctgcgccaagtcaagctcaagtggaagtggaagaggagaaggcacaagatccacctatgcccccaaggatacacaccgctctttccaagaatcacccaattgaccaagttttgggtgacattagtaagggtgtccaaacacgatctcatgttgtttcgatttgtgagcattactcgtttgttttttgttttgagccaaaacatatagatgaagctctttatgatccagattggattaatgctatgcatgaagagctcagcaactttgtaagaaacaaggtgtggactttggttgaaagacctagagatcacaatgccatagggacaaagtgggtctttaggagcaaacaagatgagaacgggttggtggtgagaaacaagataagcttggtggcacaaggtttcacacaagttgaggctattcgcatcattcttgcatttgcatcatgctttgatatagaactatttcaaatagatgtgaaaagtgcttttctaaatggtgaaattgccgaacttgtctttgttgaacaacctcccggttttgaagatcctaaaaatcctaaccatgatttcaaaactggaaaagttgacaccacacttttcacaaatatcattggtgatgacttctttgtttgtcaaatttatgttgatgatatcatattcggttctactaatgaggtattttgtaaggaatttggtggtgatatgatgtctagggaatttgagatgtccatgattggaaagttgagcttcttccttgaacttcatatcaagcaactcaaggatgggacgttcatgagccaaaccaagtacatcaagaatcaactcaagaggtttggcttggaggatgcgaagcccatcaagacaccaatggcaaccaacgagcatcgcgaccttgatgagggaggtaaaccgatagatttaaagctttatcgttctatgattggtagcttgctttaccttaccgcatctaggtcggatatcatgtttaatgtttgcaagtgtgcacggtttcaagccgctcccaaggagtgtcacttagtggccgtgaaaagaattctaagatatttaaagtattcctcaattattggcttgcggtacccaaaagagttacttgcttgggcgaaagaaaagagaccgagcataagaaatgcatggatgattgaagaagttgattggggaccaaacaaggacattctctaa

SEQ ID NO: 13882 - DNA, 5449 bp, Oryza sativa
  Clone ID: TFbOSC900176j.C1.o9.np
atggccggtcacccacccaaccaccgcggagaaggcatgatcgatttcgtggcagagttggcacgcatgacactggtggtgggctaccccgacgcgccggagtacacgaccattccaccgctcagtggcgagcttcctcaccgtgtccgcttggaggtccatggttacgtggggacttgcctcgccaacatggcggtcgaggcatctggaggcacagcagatcacgcctgtcaggaggcagcctacttgatgatggccagactacgggagcgccacaactacatcttccacgacacggcgtaccgctaccaccccagtcgagccaacggtgatggcgtcagctccttccgtccgacagctggcgagaacgacaccaccttcggtcacatgtgtgctgtgatgaggggattggacaggatgcactcggacctgcacaaggcgaccaaggccttgaacgatgggaagctcatgaggatcgtcgctttgaaggacgagatagcgcgcctgaagaaggagaacgctcagctaaagggtcttccagcgccaggaggagtccggatccgcaccacgccccgcaagacgacgacggcacccgtgcgcatccagcttgcgcccagaaacccacctccagcagcagctcccgcagcacctccagttctgcccgcagttcctgcagctccagctccagctccagctccagctcccgcgtccgctctctccttcgctccagcgtcagccgccagaggtccagccagtggcaccgggggttggttgtctgctactcccagtggcagcagcgatctcagcagcagcagctccagtggctcgcagtcaggcagcggcgagacgtatctgccaggctccaggagtcgctcagagggacctgatggtctacaccaggactggcaaccgcacgacaggcgagggcagcaacggcgaagaacgcgttgatggcgtgcaccccaacagtgattccggcaatggtccgccaccacttcccgagaatccgacccttgcccaagttatggcgcatcagactcagatgatggcagccatgatgcagcagatgcagcaacaacaccagcaaatgcaccagaggatgatgcagcacgtcgaacagcagcaccagcactttggtccccctccccctcaatccaaattgcctgagttcctaggagtcaggccacccaccttctccagcaccaccaaccctatggaggcaaatgactggctccatgcaatagagaagaagctgaatctcctgcagtgcaatgatcaggagaaggtcgctttcgccacacaccagcttcagggtcctgcgtcagcttggtgggacaaccacatggccacccgcccaccgggtactgaagtcacatgggcagagttctgccgtagcttcaggaaggcacaagtgccagatggggtcgtggcacaaaagaagagggaatttcgtgcactccatcagggtaacaggacggtgacagagtacctccacgagttcaatcgcctcacgcgatatgcaccagaggatgtccgcaccgacgccgagaagcaggagaagttcatggcgggcctggatgatgagctgaccaaccagctgatatccgggtactacgctgactttgagaggctggttgacaaggcaatccgtcaggaggaccaacgcaacaagatggacaggaagaggaaggccgctcagttcagggcacatcagggaagtcaccagaggccgcgcttcactcccggacagcagggtggacctaccaccatgatcgtccgtcagcaccgcccgttcaaccctagcaacttctaccagggcaccagtgacagtcagaaccaccatggaggtcagcccaaccgcggtgcagctccacgcccaccagtggcatcggcacagtcaggccagcccgcgcaagccaagaaggagacggaagcaaaaccagggtcctgcttcaactgtggcgagcttggccacttcgctgacaaatgcccgaagcctaggcgtgccgggccaaggtttatccaggctcgtgtcaaccacgcatctgcggaggaggcacaagcagcaccagaggttgtactgggtacgtttcctgttaactcaatccctgcaacagtactttttgattctggtgcaacgcattctttcatctcaaagaaatttgtcgggatgcatgggttaataagagaggaacttagcacaccgatgcgggttcataccccagggaatagctccacttcggttcaattcagcccttctataacaatagaaattcaaaggtcaccggttctagccaacctcatccttctcgaatccaaagacctagatgtcattcttgggatggattggctgaccaagtttaagggagtcatcgattgtgcgaatcgcacagtcaccctgaccaacgagaagggagaaaccgtggtgtacaaatctctagtctcgccaaagaaaggagtctcgttgaatcagattgagacggaaatcccagtggacaccgtagagaagaacttgagaaaattggatgatatacccatagtctgcgagtatccagaggtgttccccgaagacctcactaccatgccacccaagagagagattgaattccggattgatttggcaccgggaaccgctccaatctataagagaccgtacagaatggcggccaacgaattaacggaggtcaagaagcaagttgatgaacagctgcagaaagggtacatacgaccaagcacttcaccttggggcgctccggtcatttttgtggagaaaaaggataagacgaagaggatgtgcgtcgattatcgcgcacttaacgaggtcacaatcaagaataaatatcctttgccgcgaatcgacgatttatttgatcaactgaaaggggctaaagtgttttctaagatagacctgcgctcaggctaccaccagttgagaatccgggaagaggatatcccgaagacggccttcaccactcggtacgggttatatgagtgcacggttatgtccttcggacttactaacgcgcctgcattcttcatgaatctgatgaacaaagtgttcatagaatttctggacaagtttgttgtggtattcatcgacgacatacttatctactcaaaatccgaagaagaacatgaacaacatctccgtctggtactcgagaagttgaaggagcaccagctatacgccaagttcagcaagtgtgatttctggttgacggaagtcaaatttctgggtcatgtcattacagctcagggtgtggcagtcgacccatcgaacgtggagtcagttaccaagtggaccccaccgaagactgtgtcgcagattcgaagttttctaggactggcaggttattaccgtcgattcatcggaaacttctccagaatcgcccgacccatgactcagttgcttaagaaagatgagaaatttaaatggacagcggagtgcgataagagctttgaggagctcaagaagaaattagtatccgcaccagttttgattctgcccgaccagatgaaagacttccaagtttattgcgatgcatcccgtcacggacttggatgtgtcctaatgcaagagggcagagtggttgcatatgcctcgcggcagttgcgtccacacgaaggaaattatccaactcatgacttggagttggcagcggtggttcatgctttgaagatctggaggcactatctgatcggcaaccgctgcgaagtatatacggaccataaaagtctgaaatacatcttcacccaaccggacctaaactttcgacaacgaagatggttggagctaatcaaagactatgacatgagtattcactaccacccgggtaaggccaatgtggtggcagacgctttaagccggaaaagttactgcactgctctatgcatcgagagcatgtgtgaggaattgcggcaggagtttgaacatctcaacataggaattgttgaacacgggttcgtagccgctctggaggcacggcctacgctcgtggatcaagtcagagccgctcaagtaaatgatccggaaatagcagaactgaaaaagaacatgagagtcggaaaggctcgggatttccttaaggatgagcatggcacaatctggatgggagaaagattgtgtgtacctgacgacaaggaattgaaggatctgatactcaccgaggctcatcagacccagtactccattcacccaggcagcaccaaaatgtatcaagacctcaaagaaaagttttggtgggtcagcatgaggagagaaatagctgaattcgtcgcactctgcgatgtttgccaacgagtgaaggcagagcaccaaagacccacaggtttactccaacctcttcaaatcccggaatggaaatgggaagaaattggaatggactttataacgggactgccccggacatcgtcgggtcacgattcgatctgagtagtcgtggatcgactcactaaggttgctcacttcataccagtacataccacatatacgggcaaaaggttggcggagctttacctttcgagaatcatgtgcctacatggagtactcaaaaagattgtatctgaccgagggagtcagttcacctcaaaattctggcagaagctgcaggaagaattggggacccgtttaaatttcagcacggcctatcacccgcaaactgatggccagaccgagcgggtcaatcaaatcttggaagatatgttgagagcttgcgctcttgattttggtggagcttgggacaaaagcttgccatatgcggaattctcgtacaacaacagctaccaggccagtctacagatggcaccgtttgaagctttatacggccggaagtgccgcacacctctcttctgggatcagacaggcgaacgtcaactattcggaacagaagtattagcggaagcagaagagaaagtcagaatcatcagggaaaggttgaggattgctcagtctcgacagaagagctacgcggataaccgtcgaagggagctcacttttgaggcaggagatcacgtgtaccttcgcgtcactccgctccggggagtacaccgttttcagacgaaaggcaagttggcaccacgcttcgtgggaccatacaaaatcttggaacgaaggggagaagtggcttatcagctagaacttccatccaacatgatcggcatccatgacgtgttccacgtgtcccaactaaagaagtgcttaagggtacctgaagaacaggctgattcggaacacattgatatccaggaagacctaacttatgttgagaagccggttcgtatactggataccagcgaaaggagaaccagaaacaaggtcacccggttttgccgagttcagtggagtcatcattcggaagaggaagcaacctgggaaagggaagatgagttgaaagccgcccatccgcacctcttcaccagctcctccgaatctcggggccgagattccgtt

SEQ ID NO: 13883 - DNA, 5340 bp, Oryza sativa
  Clone ID: TFbOSC900200j.C1.o17.fg
atggccggtcacccacccaaccaccgcggagaaggcatgatcgacttcgtggcagagctggcacgcatgacactggtggtgggctaccccaatgcgccggagtacacgaccatcccaccgctcagtggcgagcttcctcaccgtgtccgcttggaggtccatggctacgtggggacttgcctcgctaacatggcggttgaggcgtcaggaggcacagcagatcatgcctgtcaggaggcagcctacttgatgatggccaggttacgggagcgccacgactacatcttccacgacacggcgtaccgctaccacccccgtcgagcccatggtgatggcgtcagctccttccgtccgacagctggcgagaacgacaccaccttcggtcacatgtgtgctgtgatgaggggattggaccggatgcactcggacctgcacaaggcgaccaaggccttgaatgatgggaagctcatgaggatcgtcgctctgaaggacgagatagcgcgcctgaagaaagagaatgctcagttgaagggtcttccagcaccaggaggagtccggatccgcactacgccccgtaagaggacgactgcacccgtgcgcatccagcttgcgcccaggaacccacctccagcagcagcagctccggcagttcctccagctccagctccagctccagctccagctccagctcccgctcccgcgttcactctctccttcgctccagcatcagccgccagaggaccagccagtggtaccggaggttgcttgtttgggatggtctacaccaggactggtagccgcgcaacaggcgagggcagcaacggtgaagaacgcgctgatggtgtgcaccccaacagtgagtccggcaatggtccgccaccacttcccgagaatccgacgcttgcccaagttatggcacatcaaactcagatgatggcagccatgatgcagcagatgcagcagcagcaccagcagatgcaccagaggatgatgcagcacgccgaacagcagcatcaacagtttggtccccctccccctcagtccaagttgccggagtttctacgtgtcaggctacccaccttctccagcaccaccaaccctatggaggcaaatgactggctccatgcgatagagaagaagctgaatctcctgcagtgcaatgatcaggagaaggtcgctttcgccacacaccagcttcagggtcctgcgtcagcttggtgggacaaccacatggccacccgcccaccgggtactgaagtcacatgggcagagttctgccgtagcttcaggaaggcacaggtgccagatggggtcgtggcacaaaagaagagggaattccgggcgctccatcagggtaacaggactgtgacagagtacctccatgagttcaatcgcctcgcgcgatatgcaccagaggatgtccgcaccgacgccgagaagcaggagaagttcatggcgggtttggatgatgagctgaccaaccaactgatatctggggactacgttgactttgagaggctggtcgacaaggcaatccgccaggaggatcaacgcaacaagatggacaggaagaggaaggccgctcagttcagggcaccccagggaagtcaccagaggccgcgcttcactcccgggcaacagggtggacctaccaccatgatcgtccgtcagcaccgcccgttcaaccctagcaacttccaccagggcactagtggcagtcagaaccaccatggaagtcagcccaaccgcggtacagctccacgcccaccaatggcaccggcacagtcaggccagcccgcacaagccaagaaggagacgggagcaaaaccagggtcctgcttcaactgtggcgagcttggccacttcgctgacaaatgcccgaagcccaggcgtgccgggccaaggtttatccaggctcgtgtcaaccacgcgtctgcggaggaggcacaagcagcaccagaggtcgtactgggtacgtttcctgttaactcaatccctgcaacagtactttttgattctggtgcaacgcattctttcatctcaaagaaatttgtcgggatgcatgggttaataagagaggaacttagcacaccgatgcgggttcataccccagggaatagctccacttcggttcaattcagcccttctataacaatagaaattcaaaggtcaccatttctagccaacctcattcttctcgaatccaaagacctagatgtcattcttgggatggattggctgaccaagttcaagggagtcatcgattgtgcgagtcgcacagtcaccttgaccaacgagaagggagaaaccgtggtgtacaaatctctagtctcgccaaagaaaggggtctcgttgaatcagattgagacggaaatcccagtggacaccgtagagaagaacttgagaaaattggaagatatacccatagtctgcgagtatccggaagtgtttcctgaagacctcactaccatgccacccaagagagagattgaattccggattgacttggcaccgggaaccgctccaatttacaagagaccatacaggatggcggccaacgaattagcagaggtcaagaagcaagttgatgagcagctgcagaaagggtacatacgaccaagcacttcaccttggggcgctccggtcatttttgtggagaaaaaggataagacgaagaggatgtgcgtcgattatcgcgcacttaacgaggtcacaatcaagaataaatatcctttaccgcgaatcgacgatttatttgatcaactaaaaggagctaaagtgttttctaagatagacctgcgatcaggctaccaccagttgagaatccgggaagaggatattccgaagacggccttcaccactcggtacgggctatatgagtgcacggttatgtctttcggacttaccaacgcacccgcattcttcatgaatctgatgaacaaagtgttcatggaatttctggacaagtttgttgtggtgttcatcgacgacattcttatctattcaaagtccggagaagaacatgaacaacatctccgtctagtactcgagaagttgaaggagcaccagctatacgccaagttcagcaagtgtgacttctggttgacggaagtcaaatttctgggccatgtcattacaactcagggtgtggcagttgacccatcgaacgtggagtcagttaccaaatggaccccacctaagaccgtgtcgcagattcggagttttctaggactggcaggttattaccgccgattcatcgaaaatttctccaggatcgcccgacccatgactcagttgcttaagaaagatgagaagtttaaatggacagctgagtgcgataagagttttgaggagctcaagaagaagttagtatccgcaccagtattgattctgcccgacccgacgaaagacttccaagtctattgtgatgcatcccgtcacggacttggatgtgtcctaatgcaagagggcagagtggttgcgtatgcctcgcggcagttgcgtccacacgaaggaaattatccaactcatgacttggaattggcagcagtggttcatgctttgaagatctggaggcactatctgattggaaaccgctgcgaagtatatacggaccataagagtctgaaatacatcttcacccaaccggatctaaaccttcgacaacgaagatggttggaactaatcaaagactatgacatgagtattcactaccacccgggtaaagccaatgtggtggcagacgctttaagccggaaaagttactgcactgccctatgcatcgagggcatgtgtgaggaattgcggcaggagtttgagcatctcaacgtgggaattgttgaacacgggttcgtagccgctctggaggcacggcctacgctcgtggatcaagttagagccgctcaagtaaatgatccggaaatagcagaactgaaaaagaacatgagagtcggaaaggctcgggatttccacgaagatgagcatggcaccatctggatgggagaaagattgtgtgtacctgacgacaaggaactgaaggatctgatactcaccgaggctcatcatacccagtactccattcatccaggcagcactaaaatgtaccaagaccttaaagaaaaattttggtgggtcagcatgaggagagaaatagctgaattcgtcgcactctgcgatgtttgccaacgagtgaaagcagagcaccaaagaccagcaggtttactccaacctcttcaaatcccggaatggaaatgggaggagattggaatggactttataacaggactgccccggacatcatcgggacatgattcaatctgggtagtcgtggatcgactcaccaaggtggctcactttatacccgtacataccacctatacgggaaagagactggcagaattgtacctcgcaaggatcatgtgtttgcatggggtacccaggaaaatagtatccgaccgaggtagtcagttcacctcaaagttttggcagaaactgcaggaagaattggggacccgtttgaatttcagcacggcctatcacccgcaaactgatggtcagaccgagcgagtcaatcaaatcttggaggatatgttgagagcttgcgctcttgattttggtggagcttgggacaaaagcttgccatacgcggaattctcgtacaacaacagctaccaggccagtctacagatggcaccgtttgaagctttgtacggccggaagtgccgcacacctctcttctgggatcagacaggcgaacgtcaactgttcggaacagaagtattagcggaagcagaagagaaagtcagaatcatcagggaaaggttgagaattgctcagtctcgacagaagagctacgcggataaccgtcgaagggagctcatttttgaggcaggagattacgtgtatcttcgtgtcactccgctccggggagtacaccgttttcagacgaaaggcaagttggcaccacgcttcgtgggaccatacaaaatcttggaacgaaggggagaagttgcttatcagctagaacttccatccaatatgatcggcatccatgacgtgttccacgtgtcccaattaaagaagtgtttaagggtacctgaagaacaggctgattcggagcacattgatatccaagaggacctaacatatgtggagaagccggttcgtatacttgataccagcgaaaggagaaccagaaataaggtcaccaggttttgccgagttcagtggagtcatcattcagaagaggaagcaacctgggaaagggaagatgagttgaaagccgcccatccgcacctcttcaccagctcctccgaatctcggggccgagattccgtttaa

SEQ ID NO: 13884 - DNA, 5115 bp, Oryza sativa
  Clone ID: TFbOSC900232j.C1.o8.fg
atgacgctggtggtgggctaccccaacgcgccagagtacacgacggttccaccgctcagtggcgagcttcctcaccgtgttcgcctggaggtccacggctacgtgggtacctgcctagctaatatggtggttgaggcatccggaggcacagtagatcacgcctgtcaggaggcagcatacctgatgatggccagactacgggagcgccacaactacatcttccacgacacggcgtaccgatttcacccttgtcgagccagcggtgatgatgtcagtactttccgtccgacagctgacgagaactacactacctttggtcacatgtgtactgtgatgaggggattggataggatgcactcggacctgcacaaggcgtccaaggccttgaatgatgggaagctcatgaggatcgtcgctctgaaggacgagatagcgcgcctgaagagggagaatgctcagttaaagggacttcccgcgccaggaggagtccggatccgcactacaccccgcaagacgacgactgcacccgtgcgcatccaacttgcgcccaggaacccacctccgcccgcagctcccgcagcacctccagttccgcccgcagttcctgcagctccagcaccagctccagctcccgttcacatgtccgctcccgcgtccgctctctccttcgctccagcatcagccgccaggggtccagccagtggcaacggaggttgcttgtttgggatggtctacaccaggaatggtagccgcgcaacaggcgagggcagcaacggcgaagagcgcactgagggtgtgcatcccaacagcaattccggcaatgttccgccaccacttcccgagaatccgacgctagcccaagtgatggcacatcagactcagatgatggcagccatgatgcaacagatgcagcagcagcaccagcagatgtaccagaggatgttgcagcacgccgaacagcagcaccagcagtttggtccccctccccctcagtccaagttgccagagtttctacgtgtcaggccacccaccttctccagcaccaccaaccctatggaggcgaatgactggctccatgccatagagaagaagctgaatctcctgcagtgcaatgatcaggagaaggttgctttcaccacacaccagcttcaaggtcctgcgtcagcttggtgggataatcacatggccacccgcccaccaggtactgaagtcacttgggcagagttctgccgtagcttcaggaaggcgcaggtgccagacggggtcgtggcacaaaagaagagggaatttcgggcactccatcaaggcaacaggactgtgacggagtatctccatgagttcaatcgcctcgcgcgatatgcacccgaggatgtccgtaccgacgccgagaagcaggaaaggttcatggcaggtctggatgatgagctgaccaaccaactgatatctggggactacgccgactttgagaggctagttgacaaggcaatccgtcaggaggatcaacgcaacaagatggacaggaagaggaaggccgctcagttcagggcacctcagggaagtcaccagaggccgcgcttcgctcccgggcagcagggtggacctaccaccatgatcgttcgccagtaccgcccgttccaccctagcaactttccccagggcgccagtggcagtcagaaccaccatggaggtcagcccaaccgcggtgcagctccacgcccaccaatggcaccggcacagtccggcccgtccgcgcaagccaggaaggagactggagcaaaaccagggtcttgcttcaactgtggcgagcttggccacttcgccgacaaatgcccgaagcctaggcgtgccgggccaaggtttatccaggctcgtgtcaaccacgcatctgcggaggaggcacaagcagcaccagaggttgtactgggtacgtttcctgttaactcaatccctacaacagtactttttgattctggtgcaacgcattcgttcatttcaaagaagtttgtcgggatgcatgggttaataagagaggaacttagcacaccaatgcggctgaccaagtttaagggagtcatcgattgtgtgaatcgcacagtcaccctgaccaacgagaagggagaaacggtagtgtacaaatcaccaaactcaccaaagcaaggggtctccttgaatcagattgaagcggaaatcccagtggtcaccatggagaagaatttgaggaaattggaagatatccccatagtctacgagtatccagaagtgttccccgaagacctcactaccatgccacccaagagagagattgaattccggattaacttggcaccgggaaccgctccaatttacaagagaccgtacagaatggcggccaacgaactagcagaggtcaagaagcaggttgatgagcagctgcagaaagggtacattcgaccaagtacttcaccttggggtgctccagtcatttttgtggagaaaaaggataagacgaagaggatgtgcgttgattatcgcgcactcaacgaggtcacaatcaagaacaaatatcctttgccacgaatcgatgatttgtttgatcaactgaaaggagctaaagtgttttctaagatagacctgcgatcagcctaccaccagttgataatccgggaagaggatattccaaagacggccttcaccactcggtacgggctatatgagtgcacggttatgtctttcggacttactaacgcacctgcattcttcatgaatctgatgaacaaagtgttcatggaatttctggacaagcttgttgtggtattcatcgacgacatacttatctattcaaagtccgaagaagaacatgagcaacatctccgtctgttcagcaagtgtgacttctggttaacggaagtcaaatttctgggccatgtcattacagctcaaggtgtggcagttgatccatcgaacgtggagtcagttaccaaatggaccccaccgaagaccgtgtcgcagattcaaagttttcttggacttgcgggatattaccgccgattcatcgaaaacttctccaggatcgcccgacccatgactcagttgcttaagaaagatgagaagtttaaatggacagctgagtgcgataagagttttgaggagctcaaaaagaaattagtatccgcaccagttttgattctgcccgatcagatgaaagacttccaagtctattgcgatgcatcccgccacggacttggatgtgtcctaatgcaagagggcagggtggttgcgtatgcctcgcggcagttgcgtccacacgaagggaattatccaactcatgacctggaattggcagcagtggttcatgctttgaagatctggaggcactatctgattggcaaccgctgcgaagtatatacggaccataagaatctgaaatacatcttcacccaaccggacctaaatctccgacaacgaagatggttggaactaatcaaagattataacatgagcattcactaccacccgggtaaagccaatgtggtggcagacgcattaagcaggaaaagtcactgcactgccctgtgcatcgagggcatgtgtgaggaattgcggcaggactttgagcatctcaacatgggaattgttgaatacgggttcgtagccgctctggaggcacggcctacgctcgtggataaagtcagagtagctcaagtaaatgattctgaaatagcagagctgaaaaagaacatgagagtcggaaaagcccgggatttccacgaagatgagcatggcacaatctggttgggagaaagattgtgtgtacctgacgacaaggaactgaaggatctgatactcaccgaggctcatcagacccagtactccatccatccaggcagcaccaaaatgtatcaagacctcaaagaaaagttttggtgggtcagcatgaggagagaaatagctgaattcgtcgcactctgcgatgtttgccaacgagtgaaggcagagcaccaaagaccagcaggtttactccaacctcttcaaatcccggaatggaaatgggaggagattggaatggactttataataggactgccctggacatcatcgggtcacgattcaatctggatagtcatggatcgactcactaaggttgctcacttcataccagtacataccacgtatacgggcaaaaggttggcggagctctacctctcgagaatcatgtgtctacatagagtacccaaaaagattgtatctaaccgagggagtcagttcacctcaaaattctggcagaagctgcaggaagaattggggacccgtttaaatttcagcacggcctatcacccgcaaactgatggtcaaaccgagcgagtcaatcaaatcttggaagatatattgagagcttgcgctcttgattttggtggagcttgggacaaaagcttgccatatgcggaattctcgtacaacaacagctaccaggccagtctacagatggcaccgtttgaagctttatacggccggaagtgccgcacacccctcttctgggatcagacaggcgagcgtcaactgttcgggacagaggtattagcggaagcagaagagaaagtcagaatcatcaaggaaaggttgaggattgcccagtctcgacagaagagctacgcggataaccgtcgaagggagctcacttttgaggcaggggattacgtgtatcttcgtgtcactccgctccggggagtacaccgctttcagacgaaaggcaagttggtaccacgcttcgtgggaccatacaaaatcctggaacgaaggggggaagttgcttatcagttagaacttccatccaatatgatcggcatccatgacgtgttccacgtgtcccaattaaagaagtgcttaagggtacctgaagaacaggctgattcggaacacattgatttccaggaggacctaacatacgtggagaagccggttcatatacttgataccagcgaaagaagaaccagaaacaaggtcaccaggttttgccgagttcagtggagtcatcattcagaagaggaagcaacctgggaaagggaggatgagttgaaagccgcccatccgcacctcttcgccagctcctccgaatctcggggccaagattccgtttaa

SEQ ID NO: 13885 - DNA, 2844 bp, Oryza sativa
  Clone ID: TFbOSC900293j.C1.o13.gm
atggtctacaccaggactggcacccgcacgataggcgagggcagcaacggcgaagaacgcactgatggtgtgcaccccagcagtgattccggcaatggtccgccaccacttcccgagaatccgacccttgcccaagttatggcacatcagactcagatgatggcagccatgatgcagcagatgcagcagcagcaccagcagatgcaccagaggatgatgcagcacgccgaacagcagcaccagcagtttggtccccctccccctcagtccaagttgcctgagttcctacgtgtcaggccacccaccttctccagcaccaccaaccctatggaggcaaatgactggctccatgcaatagagaagaagctgaatctcctgcagtgcaatgatcaggagaaggtcgcttttgccacacaccagcttcaaggtcctgcgtcggcttggtgggacaatcacatggccacccgcccaccgggtactgaagtcacatgggcagagttttgtcgtagcttcaggaaggcacaggtgccagatggggtcgtggcacaaaagaagagggaatttcgtgcactccatcagggcaataggactgtgacagagtacctccacgagttcaatcgcctcgcgcgatatgcaccagaggatgttcgcaccgacgccgagaagcaggaaaagttcatggcaggtctggatgacgagctgaccaaccaactgatatctggggactacgccgactttgagaggctagttgacaaggcaattcatcaggaggaccaacgcaacaagatggacaggaagaggaaggccgcacagttcagggcacctcagggaagtcaccagaggccgcgcttcactcccgggcagcagggtggacctaccaccatgatcgtccgccagtaccgcccgttcaatcctagcaactttcctcagggcgccagtggcagtcagaaccaccatggaggtcagcccaaccgcggtgcagctccacgcccaccaatggcaccggcacagtcaggcccgtccgcgcaagccaggaaggagactggagcaaaaccagggtcctgcttcaactgtggcgagcttggccacttcgctgacaaatgcccgaagcccaggcgtgccgggccaaggtttatccaggctcgtgtcaaccacgcatctgcggaggaggcacaagcagcaccagaggttgtactggtcaccctgaccaacgagaagggagaaaccgtggcgtacaaatcactagtctcaccaaagcaaggggtctctttgaatcagattgaagcagaaatcccagtggacaccgtggagaagaacttggggaaaatggaagatatacccatagtctgcgagtatccggaagtgttccccgaagacctcactaccatgccacccaagagagagattgaattccggattgacttggcaccgggaaccgccccaatttacaagagaccgtacagaatggcggccaacgaactagcagaggtcaagaagcaggttgatgagcagctgcagaaagggtacattcgaccaagtacttcaccttggggtgctccggtcatttttgtggagaaaaaggataagacgaagaggatgtgcgttgattatcgcgcactcaacgaggtcacaatcaagaacaaatatcccttgccgcgaatcgacgatttatttgatcaactgaaaggagctaaagtgttttctaagatagacctgcgatcaggctaccaccagttgagaattcgggaagaggatattccgaagacggccttcaccactcggtacgggctatatgagtgcacggttatgtccttcggacttactaacgcacctgcattcttcatgaatctgatgaacaaagtgttcatggaatttctggacaagtttgttgtggtgttcatcgacgacattcttatctattcaaagtccgaagaagaacatgaacaacatctccgtctagtactcgagaagttgaaggagcaccagctatacgccaagttcagcaagtgcgacttctggttgacggaggtcaaatttctgggccatgtcattacagcccagggtgtggcagttgatccgtcgaacgtagagtcagtcaccaagtggaccccaccgaagaccgtgtcgcagattcgaagttttctaggactggcagttggacaaccggacaccccggccgacccaactccatcacgcccaccctcgccaccggcgggccccacacgtcagcgggtcaagggtatcggtccaccgtggaccgggaccacggggtggtccaccgccggtccacgggaaccgacggcccagatcagcccaaagccgatcgggcggctgaggagggcggtggccgggcacgggcacagccggggctggcccgaccgaccacagagggcggcggcgcgcagacggccggacaaccggcggcggcggcggcgcaacgcggcgctggcacgggaggcggccggcaaagaggaaaaggaggagggaggcggctcaccgagaggcgcggcgacggagggaacggccgcggagggaggcggcggcgctccttgggtcgacgacgcggagggacgcacggcggtggatggcgagggcgaggaggcagacgaggtgcaacacacgacgacgaagccgacaaaggtgacggcaagcggcgaccgcggctatggcggtgatgattgccggccggaaacggtgaatggatgtggtggctcggcggtggacgacgtgcggcgtggagtggggatgccgacggcatgggttgcgcggcgcggcggtggcgctagcagcgacgaggtgcggctggaggcgacgaatgggtcggcggcctcgggtgcacggtga

SEQ ID NO: 13886 - DNA, 6678 bp, Oryza sativa
  Clone ID: TFbOSC900327j.C1.o24.fg
atggtcgaggtcctggaggaggaggaggcggtggcgttcacccccactccatctgggagtggggattctagcgagagccgtggccctcgtcaccaccgccgcgactctccaactcctccccgccacgaaccctcgcggagggaggatcccacccgttcaggtggttcggccctctccccgcccctgggcgaagagaggccacgacgcgtcggggcacggcgccgcctcacttacggtgatggcggctcaccccgaggcacgcttcaggcggcgggcgcccttctgcggcatccccccgtgaactcggagccggagacccctgttcagcgctggctagacgacgtggccaacttggtcaccactgcccagcggcaattggccgcgggcggccgacccgccgccaccggtatgtcgcgtacccccgttaccctctcctcgtcagcaaggaggagggcccgtcagtcggccatggcctcaaggcggtccacggctccaacgtcgtcgggagcctcgggaagccggaggcgtcatgacggtctctacggggagcaggacgctcagatcaatatcgagcgacgccgggacgagcgtcgagctgcccgcatgggggaaggttcctcctcatctagagtgccaggttcctcctcacgaggcggccctccccccacgctcacccctggaggaacgggttgtagggccttcgtggcgagtctccagaatgtccggtggcccctaaagtttcgccccaacctcacggagaaagaagctcgcctccaaggagcccaagaccaccgccgagctcttcaagttggcggacaaggtggctcggaaggaggaggcgtggggaactctccagacaccggtgcggcggccgcggctacccccgagtctgccccccgctctaagcggcgagataggagaggcaaaaggaaaccgggccgctccgatgacgagggccatgtccttgcggctgatgggcccgcacgggcaccgcgcaagggaaaggccaccagcgacaagccgagctccactgctccatccggtgagggccggtcggcagacaagtggtgctcggtgcacaacacttatcgacacagtctcgccgactgccgctcggtcaagaatttggccgagcggttccgaaaggctgatcaggagaagcggcagggtcgacgggagggcaaagcccccgcaacctcagccggtgaccagcgggaggaggccaagaacaaggcccccgccgatgatggcggtgatagtgaggatctggatttccaggtacctcagggaaccgtcgccacactcgatgggggggcttacgctcacacctctcgccgaggcttcaaggccatgaggcgagagcttctggccgctgttccaacgcacgaggtggctcgaaaggcacgctggtcggagaaaatggataggaagaggaaggtggcgcagttccggtccaaccaagggagccaccagcgaccgcgcttcactcccggacagcagggtggacctaccaccctaatcgtccgccagcaacgccctttcaatgccaacaacttccatcagggcgccagtggcagccagaaccaccatggcggtcagcccaaccgcagtgcagctccacgcccaccaatggcaccagcacagacagctccgtccgcgcaagccaagaaggagactgggacaaagccagggtcctgcttcaactgtggcgagcttggccacttcgctgacaaatgcccgaagcctaggcgtgccgggccaaggttcgtccaggctcgtgtcaaccacgcgtctgcagaggaggcacaagcagcaccagaggtcgtactgggtacgtttcttgttaactcaatccctgcaacagtactttttgattctggtgcaacgcattcgttcatttcaaagaagtttgtcgggatgcatgggttaataagaggggaacttagcacaccaatgcgggttcataccccagggaatagctccacttcggtacaattcagcccttctataacaatagaaatccaaagatcaccatttctagccaacctcattcttctggaatccaaagacctagatgtcattcttgggatggattggctgaccaagttcaagggagtcattgactgtgcgaatcgcacagtcaccttgaccaacgagaagggagaaacagtagtgtacaaatcaccaatctcaccaaagcaaggggtctctttgaatcagattgaggtggaaatcccagtggtcaccgaggagaagaattcgaggaaattggaagagattcccatagtctgcgagtacccagaagtgtttcccgaagacctcactaccatgccacccaagagagagattgaattccggattgacttggcactgggaaccgctccaatttacaagagaccgtacagaatggcagccaacgagctagcagaggttaagaagcagggtgcaccggtcatttttgtggagaaaaaggataagacgaagaggatgtgcatcgactatcgcgcactcaacgaggtcacaatcaagaacaaatatcctttaccgcggatcgatgatttgtttgatcaactgaaaggagctaaagtgttttctaagatagacctactatcaggctaccaccagttgagaattcgggaagaggatattccaaagacagccttcaccactcggtacgggctatatgagtgcacggttatgtctttcggacttaccaacgcacctgcattcttcatgaatctgatgaacaatgtgttcatggaatttctcgacaagtttgttgtggtgttcatcgacgacatacttatctattcaaagttcgaagaagaacatgagctacatctccgtctgttactcgagaagttgaaggagcaccagttatacgccaagttcagcaagtgtgacttctggttgtctgaagtcaaatttctaggtcacgttattgcagctcaaggtgtggcagttgatccatcgaatgtggagtcagttaccaagtggaccccacctaagaccgtgtcgcaaattcgtagttttcttggacttgtgggttattaccgccgattcatcgaaaacttctccaggatcgcccgacccatgactcagttgcttaagaaagatgagaagattaaatggacagctgagtgtgacaagagttttgaggagctcaagaagaaattagtatccaccccagttctgattctgcccgaccagatgaaagacttccaagtctattgcgacgcatcccaccacgggcttagatgtgttctaatgcaagagggcagagtggtcgcatatgcctcgtggcagttgcgtccacatgaagggaattatccaactcatgacctggaattggcagtagtggcacgacctacgctcgtggatcaagtcagagccgctcaagcaaatgatcctgaaatagcaaagctgaaaaagaacatgagagtcggaaaagcccgggatttccacgaagatgaacacggcacaatctggttgggagaaagattgtgtgtacctgacgacaaggaactgaaggatctgatactcatcgaggctcatcagactcagtactccattcatccaggcagcaccaaaatgtatcaagacctcaaagaaaagttttggtgggttagcatgagaagggaaatagctgaattcgtcgcactctgcgacgtttgccaacgagtgaaggcagagcaccaaaggccagcaagtttactccaacctcttcaaatcccggaatggaaatgggaggagattggaatggactttataacaggactgccccgaacatcatcgggtcacgattcaatctgggtagtcgtggatcgactcactaaggttgctcacttcataccagtacataccacatatacgggcaaaaggttggcagagctctacttctcgagaatcatgtgtctacatggagtacccaaaaagatagtatctgatcgagggagccaattcacttcaaagttctggcagaaattgcaagaggaattgggaacccggttgaatttcagcacagcctaccatccgcagaccgatggtcagaccgaacgagtcaatcaaatattggaggacatgttaagggcctgcgcacttgattttggtggagcttgggacaaaagcttgccccgccttcgatgcgctcaaggccccggggatgaagctccagtcgtcgctgctgatcattggcgtgactccgagacacacgtcgagctcccggtaacattcggtgactccaccaacttccgcaccgagcgaatcgacttcgatgtggcggacctcaatctgccctacaacgcggtcctgggcagacctacgttagtgaagttcatggccaccaaccactacgcctacctccagatgaagatgccaggccctgctgttcccatcaccgtctttggcgatgtcaaagtcgccctcgcctgcgcggagcaacgcgccgacaacctggcagtggccacggagccgcaggccccggaggccaccgcgtcccgtgcctccaagaagcgcctcacctcggctaatgaggaaagcgcactcgtctccttcctgcgggcaaattctaacgtcttcacatggaagccatcggacatgcccggggtccccagggaggtgatcgagcactgcctcgccgtgcggccggatgcgcgacccatccggcaaaaagtgcgacatcaagccccagagcgacaggccttcatccgagaggaagtggtgcggctcttggaggctgacttcatctgcgaggttatccatccggagtggctggcgaacccggtggtcgtcccgaaggccaacggcaagctccggatgtgcatcgactacacggacctcaacaaggcatgccctaaagatcccttccctctaccatgcatagatcagatagtcgactccactgtggggtgcgaccttttgtgttttctagatgcctactctgggtatcaccagatccgcatggctagggaagatgaggaaaaacctaccttcattactcctgtgggcaccttttgttatacaactatgccttttgggttaaagaatgcaggtcctacttttcagcgcatgactcgtattactttgagtaatcagatagggcgcaatgtagaggcgtatgtcgatgacctggtggtgcagcggcccgtctactttgtcagcgaggcactccgagatgcgaagacccgatacccacaggcccagaaaatgctttatgcagttttaatggcctcaaggaaattacgccactatttccaagcgcatcgggtttccgtagtgacatcctaccctctcggccaaatcctgcacaaccaagagggcactggtcgggttgtaaagtgggccatcgagctggctgagttcgacctgcacttcaaaccacgacacgcgatcaaaagccaggtcctagctaacttcatcgcggagtggaccccagtggacgaacctgttccacccaacgtctccttcctccccagagatgtaaaggacccaaacgccgacattcatggcgggcactgggttatgcatttcgacggctccctcaaccttcaaggtgcaggcgccagagtcacgctgacatcgccaagcggggacgtcctcaagtatgtcatttggctcgacttccgagccacgaacaacatggcggaatacgaaggactcctcgcgggattgagggcggtggccagaatgggcatccaccgtctcctggtcctaggtgactcccagctggtcgtgaatcaagtatccaaagagtaccagtgcaccgacccacaaatggacgcatatgtccgcgaagtgcggcgcatggaacatcacatcgacagactcgagctccggcacgtgccccgacgcgacaacacagtcgctgatgagttgtcgcgtgttgcatcggcacgagccccactccccccggggaccttcgaggaaagactcgcgcagccatcggcgcgaccgaacccctcgagggaccccgacgacacgccctctgccccgacccttggcgactcgcggccctcggggcccgagggggtcgaccccgacccccctcatcaggtcgtttggatgactgacatccgggcgtatctcgacggcaatactcttcctgaggatcgcgcagaagctgagaagctcgcgcgcatctccaagcggtacgtcctcatagaagggaccctctaccggcgtgccgccaacgggatactcttgaagtgtgtttctcgagagcaaggcatcgagctcatagccgacacccatcaggacatccttggaccattcaagacggctcgaggcgggtatcagcacctatacgttgccatcgacaagttcaccaagtggcccgaagcttacccggtcgtcaagatcgacaagcattccgccctcaagttcatcaggggcatcacatcccgattcggagtgcccaaccgcatcattacagataacggcacccagttcaccagtgagctatttgacaactattgcgacgacatgggcatcaaattgtgctttgcctcgcccgcccaccccaggagcaacggccaagtcgagcgagccaacgccgaaatcctcaaaggcctcaagaccaagacgtacaatgtcctgaagaaacacggggattcgtggctcgaggaattgcccgccgtgttgtgggcaaatcgcaccactccaagccgcgcaacggggtaa

SEQ ID NO: 13887 - DNA, 3000 bp, Oryza sativa
  Clone ID: TFbOSC900370j.C1.o19.fg
atggtctacaccaggaatggcacccgcacgacaagcgagggcagcaacggcgaagaacgcgctgatggtgtgcaccccaacagtgattccggcaatggtccgccaccatttcccgagaatctgacgctggcccaagtaatggcacatcagactcagatgatggcagccatgatgcagcagatgcagcagcagcaccagcagatgcaccagaggatgctgcagcacgccgaacagcagcaccagcagtttggtccccctcctcctcagtccaagctgcccgagtttctacgcgtcaggccacccaccttctccagcaccaccaaccccatggaggcgaatgactggctccatgccatagagaagaagctgaatctcctgcagtgcaatgatcaggagaaggtcgctttcgccacacaccagcttcaaggtcctgcgtcagcttggtgggacaatcacgtggccacccgcccgccaggcactgaagtcacttgggcggagttctgtcgtagcttcaggaaggcgcaggtgccagacggggtcgtggcacaaaagaagaggggattccgggcactccatcagggcaacaggacagtgacagagtacctccatgagttcaatcgcctcgcgcgatatgcaccggaggatgtctgcaccgacgccgagaagcaggagaaattcctagcaggcctggatgatgagctaaccaaccagctgatatctggagactatgccgactttgaaaggttggttgacaaggcaatccgtcaggaggatcagcgcaacaaaatggacaggaagagaaaggcggcacagttccggtccaaccaaggaaaccatcagcgaccgcgcttcactctcggacagcagggtggacctaccaccatgatcgtccgccagcaccgcacgttcaagtctagcaacttccaccagggcgccagtggcagtcagaaccaccatggaggtcagcctaaccacggtgcagctccacacccaccagtggcaccagcacagtcaggcccgtccgcgcaagccaaggagactggagcaaagccagggtcctgcttcaactgtggtgagcttggccacttcgccgacaaatgcccgaagcctaggcgtgccgggtcaaagtttgtccaggctcgtgtcaaccacgcgtctgcaaaggaggcgcaagcagcaccagaggtcgtactgggtacgtttcctgttaactcaatccctgcaacagtactttttgattctggtgcaacgcattcgttcatttcaaagaagtttgtcaggatgcatgggttaataagagaggaacttagcacaccaatgcgggttcataccccagggaatagctccacttcggtacaattcagcccttctataacaatagaaattcaaagatcaccatttctagccaacatcattcttcttgattccaaagacctagatgtcattcttgggatggattggctgaccaagtttaagggagtcattgattgtgcgaatcgcacagtcaccttgactaacgagaagggagaaacaatagtgtataaatcactagtctcaccaaagcaaggggtctccttgaatcagattgaggcggaaaccccagtggtcaccgaggggatgaattcgaggaaattggaagaaattcccatagtctgcgagtacccagaagtgtttcccaaagacctcaccaccatgccacccaagagagagattgaattccggattgatttggccccgggaaccgccccaatctacaagagaccgtataggatggcagccaatgaactagccgaggtcaagaaacaggttgatgagcagctgcagaaagggtacatacgaccaagtacctcaccttggggtgctccggtcatttttgtggagaaaaaggataagacgaagaggatgtgcgtcgattatcgcgcactcaacgaggtcacaatcaagaataaataccctttaccacgaatcgatgacttgtttgaccaactgaagggagctaaggtgttctctaagatagacctgcgatcaggctatcaccagttaagaattcgggaagaagatattccaaagacggctttcaccacccggtacgggctgcatgagtgcacggttatgtctttcggacttaccaacgcacccgcattcttcatgaatctgatgaacaaagtgttcatggaatttctcgacaagtttgtggtggttttcatcgacgacatacttatctattcaaagtctgaagaagaacatgagcagcatctccgtctggtactcgagaagttgaaggagcaccaattatacgccaagttcagcaagtgtgacttctggttgacggaagtcaaatttctgggccatgttagacttctgggcatggcagttgatccatcgaacgtggagtcagttaccaaatggaccccaccgaagaccgtgtcgcagattcgaagttttcttagactggcgggttattaccgccaattcatcgaaaacttctccaggatcgctcgacccatgactcagttgcttaagaaagatgaaaagtttaaatggacagctgagtgcgataagagctttgaggagctcaaaaagaaattagtatccgccccagttctgattctgcccgaccagatgaaagatttccagatctggaggcactatctgattggcaaccgctgtgaagtatatacggatcataagagtctgaaatacatcttcacccaaccggatctaaatctccgacaacgaagatggttggaactaatcaaagactatgacatgagcattcactaccacccggggaaagccaatgtggtggcagacgcattaagcaggaaaagttactgcactgctctatgcatcgagggcatgtgtgaggaattgcagcaagagtttaagcggctcaacgtgggaattgttgaacacgggttcatagctgttggcggatggcatgagtcccttcgaccgaatctgccgaaacccatggcgaagaccacgagccaaggatga

SEQ ID NO: 13888 - DNA, 4818 bp, Oryza sativa
  Clone ID: TFbOSC900376j.C1.o14.fg
atggccggtcacccacccaaccaccgcggagaaggcatgatcgactttgtggcagagctggcacgcatgacactggtggtgggctaccccaacgcgccggagtacacgaccattccgccgctcagtggcgagcttcctcaccgtgtccgcttggaggtccatggctacgtggggacttgccttgctaacatggcggttgaggcgtcagggggcacagcagatcacgcttgtcaggaggcagcctacttgatgatggccagactacgggagcgccacgactacatcttccacgacacggcgtaccgctaccacccccgtcgagcccatggtgatggcgtcagctccttccgtccgacagctggcgagaacgacaccacctttggtcacatgtgtgctgtgatgaggggattggacaggatgcactcggacctgcacaaggcgaccaaggccttgaacgatgggaagctcatgaggatcgtcgctctgaaggacgagatagcgcgcctgaagaaggagaacgctcagctaaagggtcttccagcgccaggaggagtccggatccgcaccacgccccgcaagacgacgactgcacctgtgcgcatccagcttgcgcccaggaacccacctccaccagcagctcccgcagcaccttcagttccgcccgcagttcctgcagctccagttccagctcccgcgttcactctctccttcgctccagcatcagccgccagaggttcagccagtggtaccggaggctgcttgtttgggatggtctacaccaggactggcaaccgcacgacaggcgagggcagcaacggcgaagaacgcgtggatggtgtgcaccccaacagtgattctggcaatggtccgccaccacttcccgagaatccgacgcttgcccaagttatggcacatcagactcagatgatggcagccatgatgcagcagatgcagcagcagcaccagcagatgcaccaaaggatgatgcagcacgccgaacagcagcaccagcagtttggtccccctccccctcagtccaagttgccagagtttctacgcgtcaggccacccaccttctccagcaccaccaaccccatggaggcgaacgactggctccatgccatagagaagaagctgaatctcctgcagtgcaatgatcaggagaaggtcgctttcgccacacaccagcttcagggtcccgcgtcagcttggtgggacaaccacatggccacccgcccaccgggtactgaagtcacatgggcagagttctgccgtagcttcaggaaggcacaggtgccagatggggtcgtggcacaaaagaagagggaattccgggcgctccatcagggcaaccggactgtgacagagtacctccacgagttcaatcgcctcgcgcgatatgcaccagaggatgtccgcaccgacgccgagaagcaggagaagttcatggcgggtttggatgatgagctgaccaaccaactgatatctggggactacgctgactttgagaggctggtcgacaaggcaatccgccaggaggatcaacgcaacaagatggacaggaagaggaaggccgctcagttcagggcacctcagggaagtcaccagaggccgcgcttcactcccgggcagcagggtggacctaccaccatgatcgtccgtcagcaccgcccgttcaaccctagcaacttccaccagggcactagtggcagtcagaaccaccatggaagtcagcccaaccgcggtacagctccacgcccaccaatggcaccggcacagtcaggccagcccgcgcaagccaagaaggagactggagcaaaaccagggtcctgcttcaactgtggcgagcttggtcacttcgctgacaaatgcccgaagcccaggcgtgccgggccaaggtttatccaggctcgtgtcaaccacgcgtctgcagaggaggcacaaacagcaccggaggtcgtactgggtacgttccctgttaacttaatccctgcaacagtacttttcgattctggtgcaacgcattctttcatttcaaagaaatttgtggggaggtatgggttaaggaaagaagagcttagcacaccaatgagggttcataccccgggaaatagttcaacctcagtcagttttagcccctcagtgctaatagaaatccaaagatcaccatttctagccaacctcattcttcttgaatccaaagacctagatgtcattcttgggatggattggctgactaagttcaagggagtcattgattgtgcgaatcgcacagtcaccttgaccaacgagaagggagaaacagtggtgtacaaatctctagtctcaccaaagcaaggggtctccttgaaccaggtcgagatggaagttccagtggacaccgtagagaagaacttgaggaaattggaagatatacccatagtctgcgagtatccagaagtgttccccgaagacctcactaccatgccacccaagagagagattgaattccggattgacttggcaccgggaaccgctccaatctataagagaccatacagaatggcggccaacgaattagcagaggtcaagaagcaagttgatgagcagctgcagaaagggtacatacgaccaagcacttcaccttggggcgctccggtcatttttgtggagaaaaaggataagacgaagaggatgtgcgttgattatcgcgcactcaacgaggtcacaatcaagaataaatatcctttgccgcgaatcgacgatttatttgatcaactgaaaggagctaaagtattttctaagatagacctgcgatcaggctaccaccagctgagaatccgggaagaggatattccgaagacggccttcaccactcggtacgggctatatgagtgcacggttatgtctttcggacttaccaacgcacccgcattcttcatgaatctgatgaacaaagtgttcatggaatttctggacaagtttgttgtggtattcatcgacgacatacttatctactcaaaatccgaggaagaacatgagcaacatctccgtctggtactcgaaaagttgaaggagcaccagctatacgccaagttcagcaagtgtgacttctggttgacggaagtcaaatttctgggtcatgtcattacagctcagggtgtggcagtcgacccatcgaacgtggagtcagttaccaaatggaccccacctaagaccgtgtcgcagattcggagttttcttggacttgcgggttattaccgccgattcatcgaaaatttctccaggatcgcccgacccatgactcagttgcttaagaaggatgagaagtttaaatggacagctgagtgcgataagagctttgaggagctcaagaagaaattagtatccgcaccggttttgatcctgcccgaccagatgaaagacttccaagtctattgtgatgcatcccgtcacggacttggatgtgtcctaatgcaagagggcagagtggttgcatatgcctcgcggcagttgcgtccacacgaaggaaattatccaactcatgacttggaattggcagcagtggttcatgctttgaagatctggaggcactatctgattggcaaccgctgcgaagtatatacggaccataagagtctgaaatacatcttcacccaaccggacctaaatctccgacaacgaagatggttggaactaatcaaagactatgacatgagtattcactaccacccgggtaaagccaatgtggtggcagacgctttaagccggaaaagttactgcactgccctatgcatcgagggcatgtgtgaggaattgcggcaggagtttgaacatctcaacatgggaattgttgaacacgggtttgtagccgctctggaggcacggcccactctcgtggatcaagtcagagcagctcaagtaaatgattctgagatagcagagctgaaaaagaatatgagagtcggaaaagcccgggatttccacgaagatgagcatggcacaatctggatgggagaaagattgtgtgtacctgacgacaaggaactgaaggatctgatactcaccgaggctcatcagacccagtactccattcatccaggcagcactaaaatgtatcaagacctcaaagaaaaattttggtgggtcagcatgaggagagaaatagctgaattcgtcgcactctgcgatgtttgccaacgagtgaaggcagagcaccaaagaccagcaggtttactccaacctcttcaaatcccggaatggaaatgggaggagattggaatggactttataacaggactgccccggacatcatcgggtcacgattcaatctgggtagtcgtggatcgactcaccaaggtggctcactttataccagtacataccacctatacgggaaagagattggcagaattgtacctcgcaaagatcatgtgtttgcatggggtacccaggaagatagtatccgaccgaggtagtcagttcacctcaaagttttggcagaaactgcaggaagaattggggacccgtttaaacttcagcacggcttatcacccgcaaactgatggtcagaccgagcgagtcaatcaaatcttggaagatatgttgagagcttgcgctcttgattttggtggagcttgggacaaaagcttgccatatgcggaattctcgtacaacaacagctaccaggccagtctacagatggcaccgtttgaagctttatacggccggaagtgccgcacacctctcttctgggatcagacaggcgaacgtcaactgttcggaacagaagtattagcggaagcagaagagaaagtcaaatcatcagggaaaggttga

SEQ ID NO: 13889 - DNA, 5283 bp, Oryza sativa
  Clone ID: TFbOSC900391j.C1.o17.fg
atgggttgcaagatggccggccacccacccaaccaccgcggagaaggcatgattgactttgtggcagagttggcacgtatgacgctggtggtgggctaccccaacgcgccagagtacacgactgttccaccactcagtggcaagcttcctcaccgtgttcgcctggaggtccacggctacgtgggtacctgcctagctaatatggtggttgaggcatccggaggcacagcagatcacgcctgtcaggaggcagcatacctgatgatggccagactacgggagcgccacaactttatcttccacgacacggcgtaccgatttcacccttgtcgagccagcggtgatgatgtcagtactttccgttcgacagccggcgagaacgacaccacctttggtcacatgtgtgctatgatgaggggattggataggatgcactcggacctgcacaaggcgtccaaggccttgaatgatgggaagctcatgaggatcgtcgctctgaaggacgagatagcgcgcctgaagaaggagaatgctcagttaaagggtcttcccgcgccaggaggagtccggatccgcactacgccccgcaagacgacgactgcacccgtgcgcatccagcttgcgcccaggaacccacctccatcagcagctcccgcagcacctccagttccgcccgcagctccggtagttcctgcagctccagtaccagctccagctcccgttcacgtgtcagctcccgcgtccgctctctccttcgctccagcatcagccgccaggggtccagccagtggcaacggaggttgcttgcttgggatggtttacaccaagaatggtagccgcgcaacaggcgagggcagcaacggcgaagagcgcactaatggggtgcatccccacagcgattccggcaatggtccgccaccacttcccgagaatccgacgctaccccaagtgatggcacatcagactcagatgatggcatccatgatgcagcagatgcagcagcagcaccagcagatgcaccagcggatgctgcagcacgccgaacagcagcatcagcagtttggtccccctccccctcagtccaagttgccagagtttctacgtgtcaggccacccaccttctccaacaccaccaaccctatggaggcgaatgactggctccatgccatagagaaaaagctgaatctcctgcagtgcaatgatcaggagaaggttgctttcgccacacaccagcttcaaggtcctgcgtcagcttggtgggacaatcacatggccacccgcccaccaggtactgaagtcacttgggcagagttctgccgtagcttcaggaaggcgcaggtgccagacggggtcgtggcacaaaagaagagggaatttcgggcactccatcagggcaacaggactgtgacggagtatctccatgagttcaatcgcctcacgcgatatgcaccagaggatgtccgcaccgacgccgagaagcaggaaaagttcatggcaggtctggatgacgagctgaccaaccaactaatatctggggactacgtcgactttgagaggctggttgacaaggcaatccgtcaggaggatcaacgcaacaagatggacaggaagaggaaggccgctcagttcagggcacatcagggaagtcaccagaggccgcacttcactcctggacagcagggtggacctaccaccatgatcgtccgccagtaccgcccgttcaaccctagcaattttcccagggcgccagtggcagtcagaaccaccatggagtcaggcccgtccgcgcaagccaaggagactggagcaaaaccagggtcctgcttcaactgtggcgagcttggccatttcgctgacaaatgcccgaagcctaggcgtgccgggccaaggtttatccaagctcgtgtcaaccacgtatctgcggaggaggcacaaacagcaccagaggttgtactgggtacgtttcctgttaactcaatccctgcaacagtactttttgattctggtgcaacgcattcgttcatttcaaagaagtttgtcgggatgcatgggttaataagagaggaacttagcacactgatgcgggttcataccccagggaatagctccacttcggttcaattcagcccttctataacaatagaaattcaaagatcaccatttctagccaaccttattcttctcgaatccaaagacctagatgtcattcttgggatggattggctgaccaagtttaagggagtcatcgattgtgcgaatcgcacagtcaccttgaccaacgagaagggagaaacagtagtgtacaaatcaccagactcaccaaagcaaggggtctctttgaatcagattgaggcggaaatcccagtggacaccgtggagaagaagttgaggaaattggaagatatacccatagtctgcgagtatccagaagtgttccccgaagaccttactaccatgccacccaagagagagattgaattccggattgacttggcaccgggaatcgctccaatttacaagagaccatacagaatggcggccaacgaactagcagaggtcaagaagcaggttgatgagcagctgcagaaagggtacattcgaccaagtacttcaccttggggtgctccggtcatttttgtggagaaaaaggataagacgaagaggatgtgcgttgattaccgcgcactcaacgaggtcacaatcaagaacaaatatcctttgccgcgaatcgatgatttgtttgatcaactgaaaggagctaaagtgttttctaagatagacctgcgatcaggctaccaccagttgagaattcgggaagaggatattccaaagacggccttcaccactcggtacgggctatatgagtgcacggttatgtctttcagacttaccaacgcacccgcattcttcatgaatctgatgaataaagtgttcatggaatttctggacaagtttgttgtggtattcatcgacgacattcttatctattcaaagaccgaagaagaacatgagcaacatctccgtctggtactcgagaagttgaaggagcaccagctatacgccaagttcagcaagtgtgacttctggttgacggaagtcaaatttctaggacatgtcattacagctcagggtgtggcagttgacccatcgaacgtagagtcagttaccaaatggaccccaccgaagaccgtgtcacagattcgaagttttcttggacttgcgggatattaccgccgattcatcgaaaacttctccaggatcgcccgacccatgactcggttgcttaagaaagatgagaagtttaaatggacagctgagtgcgataagagttttgaggagctcaaaaagaagttagtatccgcaccagttttgattctgcccgaccagatgaaagacttccaagtctattgcgatgcatcccgccacggacttgggtgtgtcctaatgcaagagggcagagtggttgcgtatgcctcgcggcagttgcgtccacacgaagggaattatccgactcatgacctggaattggcagcagtggttcatgctttgaagatctggaggcactatctgattggcaaccgctgcgaagtatatacggaccataagagtctgaaatacatcttcacccaaccggacctaaatctccgacaacgaagatggttggaactaatcaaagactatgacatgagcattcactaccacccgggtaaagccaatgtggtggcagacgcattaagcaggaaaagttactgcactgccctatgcatcgagggcatgtgtgaggaattgcggttcgtagctgctctggaggcacggcctacgctcgtggatcaagtcagagcagctcaagtaaatgattctgaaatagcagagctgaaaaagaacatgagagtcggaaaagcccgggatttccatgaagatgaacacggcacaatctggttgggagaaagattgtgtgtacctgacgacaaggaactgaaggatctgatactcaccgaggctcatcagacccagtactccattcatccaggcagcaccaaaatgtatcaagacctcaaagaaaagttttggtgggtcagcatgaggagagaaatagctgaattcgtcgcactctgcgatgtttgccaacgagtgaaggcagagcaccaaagaccagcaggtctactccaacctcttcaaatcccggaatggaaatgggaggagattggaatggactttataacaggactgccccggacatcatcgggtcatgattccatctgggtagtcgtggatcgactcactaaggttgctcacttcataccagtacataccacgtatacgggcaaaaggttggcggagctttacctctcgagaatcatatgtctacatggagtacccaaaaagattgtatctgatcgagggagtcagttcacctcaaaattctggcagaagctgcaggaagaattggggacccgtttaaattttagcacggcctatcacccgcaaactgatggtcagaccgagcgagtcaatcaaatcctggaagatatgttgagagcttgcgctcttgattttggtggagcttgggacaaaaacttgccatatgcggaattctcgtacaacaacagctaccaggccagtctacagatggcaccgtttgaagctttatacggccggaagtgccgcacacctctcttctgggatcagacaggcgagcgtcaactgttcgggacagaggtattaacagaagcggaagagaaagtcagaatcatcagggaaaggttgaggattgcccagtctcgacagaagagctacgcggataaccgccgaagggagctcacttttgaggcaggagattacgtgtatcttcgtgtcactccgctctggggagtacaccgttttcagacgaaaggcaagttggcaccacgcttcgtgggaccctacaaaatcttggaacgaaggggagaagttgcttatcagttagaacttccatccaatatgatcggcatccatgacgtgttccacgtgtcccaattaaagaagtgcttaagggtacctgaagaacaagctgattcggaacacattgatatccaggaggacctaacctatgtggagaagccggttcgtatacttgataccagcgaaagaggaaccagaaacaaggtcaccaggttttgccgagttcagtggagtcatcattcagaagaggaagcaacctgggaaagggaggatgagttgaaagccgcccatccgcacctcttcgccagctcctccgaatctcggggccgagattccgtttaa

SEQ ID NO: 13890 - DNA, 2376 bp, Oryza sativa
  Clone ID: TFbOSC900406j.C1.o13.fg
atggaaagacctaagagccctctgaatccttttcattgcatatgttctttgcaattggattttgttccgggaaaatggggatctgttcttgtggttcaagggaaaaatcttggtcgctcgtttaaaatggccggtcacccacccaaccaccgcggagaaggcatgattgatttcgtggcagagttggcacgcatgaccctggtggtgggctaccccgacgcgccggagtacacgacgattccgccgctcagtggcgagcttcctcaccgtgtccgcttggaggtccatggttacgtggggacttgcctcgctaacatggcggtcgaggcatctggaggcacagcagatcacgcctgtcaggaggcagcctacttgatgatggccagactacgggagcgccacgactacatcttccacgacacggcgtaccgctaccacccccgtcgagcccatggtgatggcgtcagctccttccgtccgacagctggcgagaacgacaccaccttcggtcacatgtgtgctgtgatgaggggattggaccagatgcactcggacctgcacaaggcgaccaaggccttgaatgatgggaagctcatgaggatcgtcgctctgaaggacgagatagcgcgcctgaagaaggagaatgctcagttgaagggtcttccagcaccaggaggagtccggatccgcactacgccccgtaagaggacgactgcacccgtgcgcatccagcttgcgcccaggaacccacctccaccagcagctcccgcagcacctccagttccgcccgcagctccggcagttcccgcagttcctccagctccagctcccgcgttcactctctccttcgctccagcatcagccgccagaggtccagccagtggtaccggaggttgcttgtttgggatggtctacaccaggactggcaaccgcacgacaggcgagggcagcaacggtgaagaacgcgctgatggtgtgcaccccaacagtgattctggcaatggtccgccaccacttcccgagaatccgacccttgcccaagttatggcacatcagactcagatgatggcagccatgatgcagcagatgcagcagcagcaccagcagatgcaccagaggatgatgcagcacgccgaacagcagcaccagcagtttggtccccctccccctcagtccaagttgccggagtttctacgtgtcaggccacccaccttctccagcaccaccaacactatggaggcaaatgactggctccatgcgatagagaagaagctgaatctcctgcagtgcaatgatcaggagaaggtcgctttcgccacacaccagcttcagggtcctgcgtcagcttggtgggacaaccacatggccacccgcccaccgggtactgaagtcacatgggcagagttctgccgtagcttcaggaaggcacaggtgccagacggggtcgtggcacaaaagaagagggaattccgggcgctccatcagggcagcaggactgtgacagagtacctccatgagttcaatcgcctcgcgcgatatgcaccagaggatgtccgcaccgacgccgagaagcaggagaagttcatggcgggtctggatgacgagctgaccaaccaactgatatctggggactacgccgactttgagaggctggttgacaaggcaatccgccaggaggatcaacgcaacaagatggataggaagaggaaggccgcgcagttcagggcacatcagggaagtcaccagaggccgcgcttcactcccgggcagcagggtggacctaccaccatgattgttcgtcaacaccgcccattcaaccccagcaacttccaccagggctccagtggcagccagaatcaccatggaagtcagcccaaccgcggtacagctccacgcccaccgatggcaccggcacagtcaggccagcccgcacaagccaagaaggagacgggagcaaaaccagggtcctgcttcaactgtggcgagcttggccacttcgctgacaaatgcccgaagcccaggcgtgccggaccaaggtttatccaggctcgtgtcaaccacgcatctgcggaggaggcacaagcagcaccagaggtcgtactgggtacgtttcctgttaactcaatccctgcaacagtactttttgattctggtgcaacgcattctttcatctccaagaaatttgtcgggatgcatgggttaataagagaggaacttagcacaccgatgcgggttcataccccagggaatagctccacttcggttcaattcagcccttctataacaatagaaattcaaaggtcacccggttttgccgagttcagtggagtcatcattcggaagaggaagcgacctgggaaagggaagatgagttga

SEQ ID NO: 13891 - DNA, 4887 bp, Oryza sativa
  Clone ID: TFbOSC9142j.C1.o1.fg
atgggttgcaagatggccggacacccacccaaccactgtggagaaggcatgatcgactttgtggcagagttggcacgtatgacgctggtggtgggctaccccaatgcgccagagtacacgacggttccaccgctcagtggcgagcttcctcaccgtgttcgcctggaggtccacggctacgtgggtacctgcctagctaacatggtggttgaggcatctggaggcacagcagatcacgcctgtcaggaggcagcatacctgatgatggccagactacgggagcgccacaactacatcttccatgacacggcgtaccgatttcaccctcgtcgagccagtggtgatgatgtcagtaccttccgtccgacagctggcgagaacgacaccacctttggtcacatgtgtgctgtgatgaggggattggataggatgcactcggatctgcacaaggcgaccaaggccttgaatgatgggaagctcatgaggatcgtcgctttgaaggatgagatagcgcgcctgaagagggagaatgctcagttaaagggtcttcccgcgccaggaggagtccggatccgcactacaccccgcaagacgacgacgaaacccgtgcgcatccagcttgcgcccaggaacccacctccgcccgcagctccggcagttcctgcagctccagctccagctcccgttcacgtgttagctcccgcgtccgctctctccttcgctccagcatcagccgccaggggtccagccagtggcaacggaggttgcttgtttgggatggtttacaccaggaatggtagccgcgcaacgggtgagggcagcaacggcgaagagcgcactgagggtgtgcatcccaacagcaattccggcaatggtccgccaccacttcccgagaatccgacgctagcccaagtgatggcacatcagacacagatgatagcagccatgatgcagcagatgcagcagcagcaccagcagatgcaccagaggatgctgcagcacgccgaacagcagcatcagcagtttggtccccctccccctcagtccaagttgccagagtttctacgtgtcaggccacccaccttctccagcaccaccaaccctatggaggcgaatgactggctccatgccatagagaagaagctgaatctcctgcagtgcaatgatcaggagaaggttgctttcgccacacaccagcttcaaggccctgcgtcggcttggtgggacaatcacatggccacccgcccaccaggtactgaagtcacttgggaagagttctgccgtagcttcaggaaggcgcaggtgccagatggggtcgtggcacaaaagaagagggaattccgagcactccatcagggcaacaggacggtgacggagtatctccatgagttcaatggcctagcgcgatatgcaccagaggatgtccgtaccgacgccgagaagcaggaaaagttcatggcaggtctggatgacgagctaaccaaccagttgatatctggagattacgccgatttcgaaaggctgatggacaggaagaggaaggccgctctgttcagggcacctcagggaagtcaccagaggccgcgcttcacccccgggcagcagggtggacctaccaccatgatcgtccgccagtaccgcccgttcaaccctagcaactttccccagggcgccagtggcagtcagaaccatcatggaggtcagcccagccgcggtgcagctccacgcccaccagtggcaccagcacagtcaggcccgcccgcgcaagccaagaaggagactggagcaaaaccagggtcctgcttcaactgtggcgagcttggccacttcgccgacaaatgcccaaagcctaggcgtgccgggccaaggtttatccaggctcgtgtcaaccacgcatctgcggaggaggcacaagcaacaccagaggttgtactgggtacgtttcctgttaactcaatccctgcaacaatactttttgattctggtgcaacgcattcgttcatttcaaagaagtttgtcgggatgcatgggttaaggaaagaagagcttagcacaccaatgagggttcataccccgggaaatagttcaacctcagtcagttttagcccttcagtgctaatagaaattcaaagatcaccatttctagctaacctcattcttctcgaatctaaagacctagatgtcattcttgggatggattggctgaccaagtttaagggagtcatcgattgtgcgaatcgtaccgtcaccttgaccaacgagaagggagaaacggtagtgtacaaatcaccagactcaccaaagcgaggggtctctttgaatcagattgagacgaaaatcccagaggacaccgtggagaagaacttgcggaaattggaagatatccccatagtctgcgagtatccagaagtgttccccgaagaccttactaccatgccacccaagagagagattgaattccggattgacttggcaccgggaaccgctccaatttacaagagaccgtacagaatggcggccaatgaattagccgaggtcaagaagcaggtggatgagcagctgcagaaagggtacattcgaccaagtacttcaccttggggtgctccgatcatttttgtggagaaaaaggataagacgaagaggatgtgcgttgattatcgcgcactcaacgaggtcacaatcaagaacaaatatcctttgccgcgaatcgatgatttgttcgaatttgatcaactgaaaggagctaaagtgttttctaagatagacctgcgatcaggctaccaccagttgagaattcgggaagaggatattccaaagacggccttcaccactcggtacgggctatatgagtgcacggttatgtctttcggacttaccaacgcacccgcattcttcatgaatctgatgaacaaagtgttcatggaatttctggacaaatttgttgtggtgttcatcgacgacattcttatctattcaaagtccgaagaagaacatgagcaacatctccgtctagtactcaagaagttgaaggagcaccagctaacgccatgttcagcaactcagggtgtggtagttgatctgtcgaacgtagagtcagttaccaaatggaccccaccgaagaccgtgtcgcagattcgaagttttcttggacttgcgggatattaccgccgattcatcgaaaacttctccaggatcgcccgacccatgactcagttgcttaagaaagatgagaagtttaaatggacagctgagtgcgataagagttttgaggagctcaaaaagaaattagtatccgcaccagttttgattctgcccgaccagatgaaagacttccaagtctattgcgatgcatcccgccatggacttggatgtgtcctaatgcaagagggcagggtggttgcgtatgcctcgcggcagttgcgtccacacgaaggaaattatccaactcatgacctggaattggcagcagtggttcatgttttgaagatctggaggcactatctgattggcaaccgctgcgaagtatatacggaccataagagtctgaaatacatcttcacccaaccggacctaaatctccgacaacgaagatggttggaactaatcaaagactatgacatgagcattcactaccacccgggtaaagccaatgtggtggcagacgcattaagcaggaaaagttactgcactgccctatgcatcgagggcatccgctctggaggcacggcctacgctcgtggatcaagtcagagcagagtaaatgattctgaaatagcagagctgaaaaagaacatgagagtcggaaaagcccgggatttccatgaagatgagcatggcacaatctggttgggagaaagattgtgtgtacctgacgacaaggaactgaaggatctgatactcaccgaggctcatcagacccagtactccattcatccaggcagcaccaaaatgtatcaagacctcaaagaaaagttttggtgggtcagcatgaggagagaaatagctgaattcgtcgcactctgcgatgtttgccaacgagtgaaggcagagcaccaaagaccagcaggtttactccaacctcttcaaatcccggaatggaaatgggaggagattggaatggactttataacaggactgccccggacatcatcgggtcatgattccatctgggtagtcgtggatcgactcactaaggttgctcacttcataccagtacataccacgtatacgggcaaaagcacggcctatcacccgcaaactgatggtcagaccgagcgagtcaatcaaatcttggaagatatgttgagagcttgcgctctcgattttggtggagcttgggacaaaagcttgccatatgcggaattctcgtacaacaacagctaccaggctagtctacagatggcaccgtttgaagctttatacggccggaagtgccgcacacctctcttctgggatcagacaggcgagcgtcaactgttcgggacagaggtattagcggaagcagaagagaaagtcagaatcatcagggaaaggttgaggattgcacagtctcgacagaagagctacgcggataaccgccgaagggagctcacttttgaggcgggagattacgtgtatcttcgtgtcactccgctccgaggagtgcaccgttttcaaaacaaaggcaagttggcaccacgcttcgtgggaccatacaaaatcttggaacgaaggggagaagttgcttatcagttagaacttccatccaatatgatcggcatccatgacgtgttccacgtgtcccaattaaagaagtgcttaagggtacccgaagaacaggctgattcggaacacattgatatccaggaaggacctaacctacgtggagaagccggttcgtatacttga

SEQ ID NO: 13892 - DNA, 5823 bp, Oryza sativa
  Clone ID: TFbOSC400653j.C1.o7.fg
atggcggcggagctagtgggtgaaggagacggtggacgacgccggcggtcaggggtagaggccgccggatccaacggttggcggtgcggtggaggaggctgccgctggatcgggcaagcggcggtggggtggcggaggaggaggcgactggtggtcgggggagaggcgccagatctgcgtcccccaaacgtgttgaggctggcggtcgttaggcaggagaggcggcggcggctggcgatcgggacacggaggaggaagtggccgacggtgaggggagaggccgcggtggccggatccgtgccctgtaagaatgaaaggcagcagctgcaggcgggagcagcagcagcagcagctgcaggcgggatcagcatcgagtacccgttctgcgtggagcctggctgctaccacccaggcttcaacctcacctgcaaccactcctacagcccgcccaggctattcctcggcgacggcacggtgcaggtgctcgagatcgccatcccccaagccaccgtgcgcatcaacagcggccgcatggtgttcaattctactggcaatcatgccgtcaacagatcattattggatcaggtgggaaggccgtacttcgtggcagcttcaaacaggatagctttgctaagctgcaacgcccgggttgacgtccgcgcggctgggagaaacaacaacaaaactagtactaagttgctcagttcctgcactgccatctgcccaacagacgatggaggtggtgctaccactatcctcgatattggtccagagggtccatgctcagggattggctgctgtgaaacaagcatgctactagcaggaagctcgactgctgcctacagcatccaggtccagaacttgcaggagcaggccgtcgtgctaaatcgaacggatgatctggtgtacttggtagatgagagatttaactataccttggacatgtctttcggctacagcagtcctgaagagctcccagcacggctagactggtacataaatagttcatcagcgtgtccgttgcccgcgtccgcccccgaatgtcgcagcgcgcacagctattgcgacagtacttacgacaacaaggcgtacatctgccgctgctccgaaggttacgaaggaaatccctacgttcctgatggatgccatgatacggatgaatgcagttctggatactgcagttacggcgagtgcaggaacacaccaggatcgttcatttgcaactgccctcgtggctacgagggcaatccatcgccaaaagatggatgcaaagcacgagatttaggtctacgcatcgggcttggggttggtggtggcacaattcttttgctcctcgcactaagtgctccctttatatcaagcaaaatgaagctgcgcaagatgaaaagaatgaaagagacttttttcaggcaaaaccatggcttgctattaggacgattggtatcacaaaacgcagatattggtcaaaggatgatcatgactttacaagagctagagaaggccacagacaattttgataaatctcgtgaaattggtggtggaggacatggcgtcgtgtataagggaattttagacctgcaagttgttgccattaagaaatcaaggattgtcgtaaaaagagaaatcgatgactttataaatgaagttgcaattctttctcaagtcaatcatagaaacgtggtgaagcttctaggatgttgtcttgagacagaagttccattgttggtttatgagttcatttcaaatggatctctagatcaccatcttcatgttgatggaccaatttcgctaccatgggatgatcgaataaggattgctcttgaagttgctagagccttgacttatctacattcagctactacaataccaatattccatagggatattaaggcatgcaacatacttctcgatgaaaatttaatatcaaagaattgctcactcgaaaaaggcccatgtataggactgatcacggtgaaagtcttgtgttatattttgcctcgcttcatagacaagatgagctacaaagctactagaaatcgaatgccaaagcctgaaggtgagatcaaagcaaccaacctcagagcattcaacagctcatcagtagaaatcccctctggagtagacttcgaattagggaacacaaccaccggcacggtgtcatcatcattaccttgggatgatcgattaaggatagcttttgaagttgttagagctctttcatatctacattcagctgcatcaatgccaatatttcacagagatattaaatattcgaatatacttcttgatgacagcctaacagcaaagttacttactcggaagaaaccaattggtggtacatttgataatggcgatggtcttgtttcacatttcgtctcacttgtctcaaaaggtaacctttatgacataatagattctcaagttagggaagaggaagatggagaagtccaggaagtagcaacactagccgcaacatgtactaaatttaaaggagaagagcggcctacgatgagggaagtagagatggagaacgacttgcaagaaaaccggtcggccatgaagaaatgccccgaccttaagattgagagaaggtttttggggagcgcaaggcgcgactactcactgttcgtcaacatctacttcacattcaccaatatgtcgaacactggagacaacggcaacactggatacaaggagacggaggctcccgtcaataccaacggaggcaatactgcctcaaactccagcggaggaccattcttggggtataaccttcttacattatttcaattagaagttttactgttaatgttcatcgcaatgtcaacattgtgttattatgtgattgttgatgcttattctatattaagcatgctcatgttgattacattcaccactatcactggatcaaatcccattgtaaatatcatgtttattatcttgttattttggattaaaatatgccgaattatgaccaaatttccaacaatccaaaaacctgataggtcattttcagtagttggctttgctgcaacactgaaaccacatgcttttgatggttctaattataagagatggaaagcacgtgcactactatggttgacagcgatgcaatgcttctatgtttcacggggcaaacgaagtgaaccgcctctctctcctgaggaggaggctaagttcgaggcttcggattgcctgttccgtggagcattgatcagtgtactcgctgacaatatagtggacgtgtacattcacatgcctttagggaaggacatgtgggatgcacttgaggccaagttcagagtttccgacgccggcagcgagctgtatgtcatggagcagttctatgactacaagatggtcgatgaccgttctgtagtggaacaggctcatgagattcagatgctggcaaaggaacttgagaacaacaactgtgagttgccggacaagtttgtggcgggtggcattattgccaaattgccaccttcttggtcggactttactatttctctaaaacacaagaggcaagagtttaatgttactgatctcattggctctttgggtgttgaggagaaggcgagagcaaaggacaactggggcaaaaatatcgagggaaattctagcgccaatttggctacaaccaattttaagaagaaagacaagggaaagggcaagggcgactgctttgtgtgcgataagcctgggcattgggcgaagaattgtcctgatcgcaaggacaagaagtctgccaacatggttattagcgagggcggaggaacatcggggtacggtaattttttacctacagttctctctgtttttcattcacctgattggtgggttgatactggtgctaatattcatgtcgggagaggttcctccttgttgatgggaaacgagtcgcttgcggctgttcatggtgttggtacggtcgatctgaagtttacttcgggaaagactgtgcagctgaagaatgtgcagcatgtcccttcaataaagaagaatctagttagcggctctctactatgtagagatggttttagacttgtgtttgaatccaataaatgtgtcgtatctaaatatggaacttttattggaaaaggttatgacagcgaaggttccaagtgccatacttgtgttcaatcgaaacaacctcgcaagcctcacaaggcatctgaggcgagaaatttggcaccactagaactagttcattccgatctgtgcgaaatgaacggcgtgttgactaaagggggaaagaaatatttcatgacactgatagatgattgcactagatattgctatgtgtacctattgaaaacaaaggatgaggcattgcattactttaagatctataaagctgaggaatggtggggtgaggcaatttttactgcttgtcatgtcctaaataaaattccagtgaagcataaggaagtaacactattcaaagaatgggaaaggaagaaattaaatctctcatacctacgcacatggggctgcttggccaagaatgaatttcccatgaaaaatacacctagcacatctagtcaagaacctgttttaccccatgagcaccttgcaccgataaaacacaatgatcaaacgcctgaggaaaatcctgaggaggttaacattgtagcaactcgaaagagtaagagacaaaggactgcaaagtcttttggagatgactacattgtatacctcgtggatgacactccaagaaccatagaagaggcatattcatctcctgacgctgactattggaaggaagcggtacgcagtgagatggactcaattatgtctaatggtacttgggaagtcgttgagcgtccatatgggtgcaaacctgtaggatgcaaatgggttttcaagaaaaaacttaggcctgatggtacaattgaaaacctcaatgtgattgaggaggttaaggactttttgtccaaaagctttgaaataaaggatttggaagtggctgatgttattcttaacattaagctactgagaggagatgagggtgggattacactcgtgcaatctcactatgtggacaaggttttgagtcgctttggttatagtgactgcaagccagctccaactccttatgactccaatgtgctattaaggaaaaatggaagaatagcaagggatcaattgagatactcccaaatcattggttcattgatgtacttggctagtgcaacgaggcctgacatctcatttgctgtgagcaagctgagccggtttgtttcaaatccgggagatgatcattgtcaagctctggaaagggtcatgcgctatctaaagggtacaataagctatggaattcactatactggttacccaaaaatattggaagggtatagtgactcaaactggatatctgatgctgatgagataaaggccacaagtggatatgtgttcacacttggaggtggcgctgtttcctggaagtcttgcaagcagaccatcttaacgaggtcaacaatggaagcagaactgacagcactagatactgccacagtaaaggccgagtggcttcgtgaactcctaatggatttgccggtggttgaaaaaccagtgccagctatactaatgaactgtgataatcaaacagtgattattaaggtgaacagttcgaaggacaacatgaagtcatctaggcatgtaaagagaagactgaaatctgtcagaaagcagaaaaactccggagtgatagcactggactatgtccagacagctaaaaatctggcagatcagtttaccaaggggctaccacgtaatgtgatagacagtgcatcgagggaaatgggcttgagacccacttag

SEQ ID NO: 13893 - DNA, 5430 bp, Oryza sativa
  Clone ID: TFbOSC900283j.C1.o5.fg
atggcagtgaacgccagcttcagttcccacggtcttggtgagggtcaccacgtcgctcagcttcgtgacctcacccgtttccttggcttctcgtgtcccgagtacacggggtactccgtggaccgcgtcccccctcactgtgagctctctgtgtacctttacccccgtggaggtatacacggagctggccttcgcccccaccacttcactgtggccaggcccaccctccagatcgcgtaccaggacctctcctggactgcgcttcgtcgcctggcccacgactacagccaccgtctcggaggctccgccttccggcagcttccacgccttccttctggccactcagacgccaggtacccttgtccgtacagcgagtctcagccagtgctgactcgcatggttgagctttcggaggctcaggccactcagcacgacctactccttgaggcttaccgctcccttgcccgtcgctacgccgccttggaggcccgtctggccgaggagggtgtcacctcagttgacactatctcctgggactcaggacgcctctgccacgccagccacctgtcctcccacagctcccgcggctctgcccgcactcccagtggcccgcgctcccccagctcgcgtgcgccgtactctccagtgtactccccctacccacacccagttagcccttcctacactccaggacacaccccagttgcttcctcccgccgtggcccacgctttatccgcactgcgtggaagcgtgttgttggttcttccaccgtgttccgtttccaccacccagctcccccaccgccagcagcccgtgctgctgccggccctcgacagatggctagccgcccccgccgtgcagctcgtgcaccagcccgctttggttttgaagatggtagagtcgaagcagaagcaaatcatgaacccgctaatgagcagtctcaccacagcaaccgttcgcaccgtacctctccccgcaacgcagaagttgagcaaccccgccgcagcaaccgctcgcatcgcacagtttcccgtgatgcagaaatggagcagtctctccgctctcaccgcactgccagtcacaattctggagaagaacgcatcccttccccacctcatgtggaaaacaacatacaacacataatggcagtacagacacaaatcttgcaaggactaaccacagccatagccagttttcagcataatgcgtatggaaatggccaccctcacgtgggcaataatagatccaagctgacagactttctgaggtcacgtccgccagagttctctcagaccgtcgagcccgtcgaggctgacgattggttgaaagatgttgatagaaaactcaacttagtgcagtgtactcctgttgagaagacgctctacgcctctcaccagctaagaggacctgccgcagattggtgggagaattactgcaatgcacaccctgaacccactaacattgcttgggatgagttcgctacggctttccgtgcagctcatgtgcccgaaagcactattgacatgaagaaagaagaatttaacagacttaggcaaggcaacagcaatgtcaatgagtacctaagtcagttcaacaagttggctcggtacgcccctgaggaagtaaacaccgataagaaaaagatcaggagattcttgaaaggagtcgcagttggaatgagactccagttgcttgctcatgacttccccacttttcaacatatgatcaacaaagcacttctacttgaagatgccagaaaagaggccaccgaagaatacaagaaacgcaagtctaaccaccaaggaaattcttcccgaggcgcacctcgccctcgctacggtcaacccatgcaataccaccagtcggtcactcaggctaaccgccagccaggttacgcccctcgccctcagatgaaccgtccggcaccccagccacagcagcgtgcccctagtggcaatacggcgccaaacagtgttacctccttcaagtcaccgcagggaccgtcagcagttcagtgtttccggtgcaaccagatgagtcactatgccagacagtgccctcagaatcctaccaacaccaactccgggcatgctaatggcagcaccgccagaactcctactccagcggcagctcagtctcgtcctagctctcaggcaagtggacaaggatctcgtgcgtccaacaacttcggtcgaggacgtgtgaatcacattcaagctgaaaccgctcaggatgctccagacgttgtgatgggtatgttctctgtcaactccgtacccgcaatagttctatttgattcaggagcttcccattccttcatatcacaagcttttgtgaaaagaaatggttggaaaacccaaaatttgcgtgtaccaatgatagtacattcccctgggaggaatataagggcaactcaaatatgcccagaagttaaccttagaattgaggaagttgacttcctagccaaaccgatagtcctagactcgcaaagcttggacatcatcctaggaatggattggttggctaagcacaaaggacagatagattgtgccgaaaagtccatcactttgcaaggacctggaggaaagcaagtccgctttacccctaacacccctaccgcaagtcggtctgtcctaacctgtttacaagtcacctccttggagtcggtgcccatagtctgtgaatatcccgacgtatttccggaagaattaacaagaatgccaccagaccgagagatcgagttcgccatagaactggcaccaggcacagctccaattgcaaaaagaccctaccgaatggcagctaatgagttagcagaagtcaaaagacaaatcgaagagttggagagtaaaggttatgtgcgacctagctcatccccttggggagccccagtgcttctggttaagaaaaaggatggctctgagagaatggtaatcgactatagagccctgaatgaagtaactataaagaacaagtacccgttgccacggattgacgatttattcaatcaacttaaaggagcaagagttttctcaaaaattgacttgaggtcaggttaccaccaattgaaaatcaggtctgaagatatcccgaagaccgctttctcaacgcgttatggtctatatgagttcacagtaatgtccttcggactcaccaatgctccagcattcttcataaacttaatgaacaaaatctttatggaatacctggaccggtttgtcgtggtattcatcgatgacatactgatatactctaagaacgaggaggaacatgctgaacacctgaggctgataatggaaaagctcagagatcatcaactattcgctaaattctcgaaatgcgaattctggttagaccgagtagcatttcttggacacgtaatctcctccaacggtgtcgaagtagatcccagcaaggttgaagctgtacttgcttggaacccgcccaagaatgtgtcagagattcgcagcttccttggcttagctggatattatcgaagattcattgaagggttctctaagctagccagacctatgaccgagctgttaaagaaggaaaagaaatttcaatggtctgcagcctgtgaagacagctttcaagaaatgaagaaaaggttgaccactgccccagtacttaccttgccagatatccgaaaagatttcgagatcttctgtgacgcatcaagacaaggcttaggatgtgtcctaatgcaagaacgaaaggttgtggcctatgcatccaggcagctcaggcctcatgaagtcaattatcccacccatgatctcgagttggcagccgtgattcatgctcttaagatctggaggcattacttgatagggaacagatgtgaagtgtacaccgatcacaaaagtcttaaatatatcttcacacagaccgagttaaatatgaggcagagaaggtggttggaactaatcaaggattacgatcttggaatccactaccatcctggagtcccagccagcttgacagtacagcctaccctagagtcgcaaatccgggaggctcagaaagatgacgaagggataaaagagttaataaaaagaatacaggagaaggaagacaccaatttctccatagacgatcaaggcacagtttggtgcggtccacgcatctgtgtaccggccaagaaggagttaagagatctcatcctaaaagaagctcatgagtccgcttactccattcatccaggaagtacgaagatgtaccaagatatcaaggcatacttctggtgggctggaatgaagcgagatgtcgcagaatacgtagccttgtgtgacatttgccaaagagtcaaggcagagcatcagaggccagcaggtctgctgcaacccctaccgattcccgagtggaaatgggaagagatcggaatggatttcatcaccggtttaccaagaacccccagcgggtacgactccatttgggtaatcgtggaccgactcacgaaatcagctcatttcgtgccagtaaaaaccacctatgatggaaagaaactagcagaactctacatgacccatgtcgtatgtagatttggttgccccaagaaaattgtgtcagaccgaggcacccagttcacctcaaggttctggaagcagttgcatgaagccctcgggactgatctaaattttagtacagcctaccatccgcagaccgatggtcagacagaaagggtaaaccaaatcctagaggacatgctgcgtgcgtgtgccttggatttcgaaggcacttgggatcgttgtttgccgtatgccgagttctcttacaacaacagttatcaggccagcattcagatgtcgccgaatgaggcactattcggaagaaagtgccgcacccccttatgctggaatgaggtgggcgaagcactggtattcggtcctgacatactccagtcagtagaagaacaagttaagctgatacgagaacgtttgaagacagcacagaaccgtcagaagaattacgctgacaatcggaggcgtgaccttgagttcgaaaaaggagatcatgtatacctgcgggtatcacccctccgtggtatgaagaggtttgggatgtccggcaagttagcaccccgctacatcggcccctacctcataaccgccagacgtggcgaagtggcttatcagcttgagctacctgaaggtctcgcagatgtgcacaacgtgttccacgtgtcccagttaaagaaatgtcttcgagtcccagaagagcaagttcccctgggtaatatcgagctggaaaagaatctgacctacaaggaaagaccgatcaaggttcttgaagaagcagaacgtcagactcgaaggaagaccatcaagttctacaaagtccaatggagcaatcattctgaagatgaggcaacatgggaacgagaagatcttctccgcgccgagtttccggagctgctcccttag

SEQ ID NO: 13894 - DNA, 1522 bp, Oryza sativa
  Clone ID: TFbOSC28236j.C1.o1.np
atgtcggatttagggggaaagaacggggaaaatggaaatgaagatggaacgagcagcaaggaaactccatcacccaagggagctactataccttttgattacagcaaacttaccattccccctcacaactttgtctccgtgccttctaggcgtgctcctcaatttgatgggacacattacgccgcttggaagcacaagatgaagttgcatctaatctttttgcatccaagtatttggaaagttgtttgtataggtattgatgtaccccatgatgacatggagctcacttcggagcaagagcaactcatccaccgcaatgcttaagcttccaatccaattctctccgccttgagtccggaggagttcaacaaggttgatgggcttgaggaggccaaggagatatgggatactttgcaattggctcatgagggatcacccgccgttcgtgaggccaagattgaattattggaagaaaggcttggaagatttgtgatggatgacaaggagacaccacaagagatgtatgataggatgatgatccttgtcaacaagattaaaggacttgggagtgaggacatgacaaatcactttgtggtcaaaagacttctccatgcttttggtccaagaaatcccactcttgtatcaatgatatgggaaaggaaagctttcaagaggctcaccccaagtgacattcttggaagaattgtgtcttatgagatgcaagaagagacagctcgtgaagtgaggcaaatggtgaagaatcccaccatgatcaaaaatcaagaagtagctttgaaggcaaaacatgaagaaatgacttttattgtcaagagattcaagcactttcttcgcaagagtggctatggcaaagggaggaaggatgatgacaagggaaagaggcaatcaaagagagcttgcttcaattgtggcgaatatggccacttcattgccgattgtctcaagtcaaatgaagcgaaggctaagggaggcaagaagaagccggagcgtgctcatgtggcggaggcacacatggcagaggtgtggtactccggagatgaagaagatctcgaggtcaagcccaagcccaagccaaaagacaaggttgaaggagaaggtggtgttgctactgtcgccttcaagtcatcctcttcaagcaaggagcgtctcttcaacaacttgagtgatgacgacgacgactcctaccactactcttgtttcatggcccaaggccacaaggtgatgactcaaaagccctctcatacctctcttgatgttgattctagtgatgaggaaagtgataatgaattagatgatgtgcttaagagttttagcaaacccgctatgcaacatttggctaagttaatgagagctttggatagtaaagaacaatctctcgaaaggcaagaagaattacttattcttgagaaggaaagaaaccttgccttagtggagagcctagctaaagaatgtgctaaaaatgaacaactagctaatgagcttaatttggctaatggttctctag

SEQ ID NO: 13895 - DNA, 2250 bp, Oryza sativa
  Clone ID: TFbOSC402966j.C1.o1.fg
atggccgagaagaccattcgcgagttcgctgccccctcagctgaaaacgtgctcattgggccacaaatcaacttgggagacacagatttcgatctgaagtcgagcctcatcacgatggcgcaggctagctcgttctgcggcaagcctaatgaaaatgccagtgtgcacctgcaacagttcctggagatatgtagcacgtacaccgtgaaaggtgtcagtccggatgccgtcaggatccggctatttcccttctcccttctagggaaggtgaagcagtggtcctatgccaaccgtgctactatcaatacttgggacatgtgctctacgacatttttgtccaaattcttcccgatgggcaaaaccaacgcccttcgcgggaaaatttcggtattccagcagacaagggacgagttaatccccaaagcatgggaacgactccaggagtacgtggctgcctgcccgcatcatgggatggacgaatggctgatactccagagcttttacaacgggctcactcccacgtcccgcgaccacctagacgtggcagctggaagagccttcttctctaagacgtgtgaggtctgcggcagcacgggtcattttgggaacgactgcccagaaacccgtgaggaaacgatgtacatgggcaacgacaacaacgggttccgtccacaaggaggtcaagggtggaacagccccgctcatatttccaaggaagcaacaataatggtttcaactgttaataagtctagcaatttcaagcgccctacaactggttcttcaaagggtccgatttccaatgctgagtccttgaatgttgttcctgttaaatcagtctttgatcgtcttcgatttccggagatcgccgccggcaaagctccggcccgtgatcagggggtcagatgtgcttcctgtcacaaattggatcaccgggctttagcctgttggaacaaaaagaaggcccaagtctggaggcccaaaaaggattctatgcctgcggctaagaagtctattgtggaaagggcagttttagggaaagaaataatttgcttcaaaaatcaaggaagcccttcctcttcctctcaacagttgcagtctgtccctcttttgctctcgacctcttcgccgagtgctccaatggcggtgctccttgagccctgggatcatcagcttgagcgtgctgatctttgcctccaggaagatccccctaagcgcaatgaaggtatggctgtcgcttgcattgaacctccaccaactcctgagcaatatgagggtttcagacatctggtgattaactatgttcagaatgtgctgggctatcatgtgttagaagctagccgtcaccctattgagttcatgtatgttcgtgtagcttctgctctgcttagagacactctaatagctgggggtccttatgaagtggataatcagtttatgcttcgctttgttcctcatgaccttacttccagttgtcgcaactcccctttcacttcagagggatggataatgtttttggatttcccattggatttcaaaactcctgctattattgacaaagctgtctctctgtttgggaaagtgatcaaagttcagttagatgataatgtaaggggaagattaatggtaaaagctttgtactcttccactctggaggtccctagaagaattgttgttaaaagggccattgctttcggaggtgttggaagatcttggacggtctcagtctttctatgccatgaagaactacctgatgttatgcctggggatgaggatttacctccagtgaatcatattcccatccctgatccggtgcagctgctggcaccacaagtggatgcttttggtgataatatggaagaggatgctccagctgttgagcaaaattctcagcctcttagtgctgtctctgtggtggctggaaatcaaaattttgccctcttagcagctgttctgctggtggttgggaatgaaactgaggttgaacaggctgagggagatttgggacatgagtatatgaatgaggcccatattgaagatgctgaaatggttgagcccatttcctgtgtgctccctgaacaacaagttttacctcaggatccattccagcaaagtgcctcttcctgcctgccatctttgaagaaatccagaaagactaaagctaaaattgtggcaattgtggacactgatcgtaggagaaactccagaatcaataagctcacagggggttacatgtctcctgatcccaagtag

SEQ ID NO: 13896 - DNA, 2529 bp, Oryza sativa
  Clone ID: TFbOSC408676j.C1.o4.fg
atgtcgacaaccggcgacaacaacaacactggagacaaggagaaggagcctctcgtcaacaccaacagaggcgatactgtctcaaactccagcggagggccattctcaggtgtgctcgccgacaatattgtggacgtgtatatgcacatgccttcagggaaggacatgtgggatgctcttgaggccaagttcgaggtttccgatgccggcagcaagctgtatgtcatggagcagttttatgactacaagatggtcgatgatcgttctgtagtggaacaggctcatgagattcagatgttggcaaaggaacttgagaacaacaactgtgagttgccggacaagtttgtggcaggtggcattattgccaaattgccaccttcttggacagactttgctacttctctaaaacacaagaggcaagagttcagtgttactgatcttattggctctttgggtgttgaggagaagtcgggggcaaaggacaaccgggccaaaaagatcaagggaggttctagcgccaatttggtgcagaagaagaaccttcacgcatcccactacaacaagaaagtcaaacctaacgtcaaacccaaggctacaaccaattttaaaaagaaaggcaagggaaagacaaaaggaggttgctttgtgtgtggcaagtctgggcattgggccaagcattgtcctgagcgcaaggacaagaagtatgcaaacacggttattagtgagggcggaggaacatcgaggtatggtaaatatttacctacagttctctctgtctgtcactcacctgattggtcggttgatactggtgctaatattcatgtgtgtgccgacatttccctgttttcttcttatcaggtcgggagaggttcctccttgttgatgggaaacggatcgcttgcggctgttcatggtgttggtatggtcgatctgaagtttacttcgggaaagatcgtgcagctgaagaacgtgcagcatgtcccttcaataaagaagaatctagttagcggctttctattgtgtagagatggttttagacttgtgtttgaatccaataaatgtgtcgtacctaaatatggaacctttattggaaaagagtatggaattattcatgagaggacgcctccctattcaccccagtcaaacggggtagccgaaagaaagaaccgcactctaactgagatggtaaataccatgttagatactgcaggacattccaaggaatggtggggtgaggcaatattgactgtgtgtcatgtcctgaatagaattcctactaagtataagaaagtaacaccattcgaggaatgggaaaggaagaaattaaatctctctcacctgcgcacatggggctgtttggccaaggtaaatgtacctatagccaaaaagcataaacttggaccaaagaccgtagattgtgtgttccttggttatgctatccacagtgtgggatataggttcttaatagtaaattctggagtacccgacatgcgtgttggtacaattactgagtccagagatgccacattttttgggaatgaatttcttatgaaaaatgcacctagcacttctagtcaagaacctattttatcccctgagcactttgtgccgatagaacatattgatcaaacgcttgaggaaaatcttgaggaggataacattgtagcaactcgaaaaagcaagagacaaaggactgcaaagtattttggagatgactacattgtatatcttgtggatgatactccaagaaccattgaagaggcacattcatctcctgacgctgactattggaaggaagcggtacgtagtgagatggactcacttatgtctaatggtacttgggaagtcgtcgagcatccatatgggtgcaagcctgtaggatgcacatgggttttcaagaaaaagcttaggcctgatggtacaattgaaaagtacaaggcaaggcttgtggccaagggttatacccaaaaagaaggcgaggactttttcgacacttattcactggttgctcgcttgaccacgattcgagtactactcgctctggcgacctctcatggtctactcatccatcagatggatgttaagacagctttccttaatggagagttggaggaggagatctatatggatcaaccagatgggtatgtactagaaggtcaggaggaaatggtgtacaagctattgaagtccttgtatggtcccaaacaagcgcctaagcaatggcatgagaagtttgacaatacacttacatctgttggctttgttgtgaacgaagctgacaaatgtgtgtactatcgctatggtgggggagagggagtgatcttatgtttatatgtcgatgacatattgatctttgggaccagcctcaatgtgattgaggaggtcaaggactttctgtccaaaagctttgaaatgaaggatttgggagtggctgatattattcttaacattaaactactgagaggagggtgggattacacttgtgcaatctcactatgtcgacaaggtcttgagtcgctttggttatag

SEQ ID NO: 13897 - DNA, 4049 bp, Oryza sativa
  Clone ID: TFbOSC417436j.C1.o8.np
atggtcgccggcggcggccataggcacggcggagcggcggccgagagaggggaagggaagggggaaaagaggtggcggtccacggctcaccccgggtcgacgctcgggtggagcggaggaaggcggcggcgcggctcgggtggacgggggacgacggcgctccggcggtcggcgagctcggcgaggtggtggacggggtcggcggcggtgcggcgaagccggaggaggcgacccccgaggcgggagacggtcccgcgagcggagagggccggccggaggtcgttggcgacggatgatagagaggcgacggcgcgagctcgatttctggtggggagaaggtgcggcaaggggtggaaacgggcgagggaggtgcggggagggtttaaatagggttggaagggagagagggcggccggcagggaaggaaaccggcgcgggaggttttttttgccagcaatggcgccggcgagagttgcgggatcaaatccggccgtttgaaggcgagagagaggggaaaatagggggaaagggggaggagatcacggggagtaattgtttgaccatttggcttatcctacagtcgagatggctctgataccaacttgtcacacccacgccgatccgcaagcccagtacttgctcggagttgaaggttttatccgggagctatgtacgatggcctttgccataggattcaagactgcccctctttatgaccagatcccccatgatcgtgatgaggagaaatgccgtgtcaaggtcaccataacaagtgatcatgaagatatcccatcggtgatgtttgaagctggtggaagaaggtatcacatgcttgtcaggaggtggcaagggtcgccattggagaactccgcaacctctacaacgatcagctggtcaacacggagtatcgctaccatccttgccaaacccatgatcgtacccaagccagctacgtggatcctgagggacttgaagacgatgctaccttgtgccatgtggtcgagctactttgggcccatggatggacatcgcacggaggaggccctagctgctcaagagcgtgaagacaagaacaatggcatgatcaacaagcttcttgacaaggttgatcgtctggagaaggaactagctgaactcaagggagaagcaccgccgcatagggccagagcttgtctgaccacctggaagagagccctcgttgctccccgcttccagctggctcctaaggttcgcgtggtggaggaagctgccccacctgtggattcccctgtcatccaactgtgtgatgatgaggaagaagactcggaggaagaccctgaacgcacccattcagtggttgagtggggtgccactcaagaaaatgatgatgagggagagcctttagtccgctccgatgccaggaagccctagataacactcgcaacactggaagtgggtctgccaacaatgggaaaacccatctcttgcccaagtcctagcccagcagactcaactcatgaatctgatgatgcaacagctccagaaccaacagaaccaggggaacaatcatgctcctccccagaacaagttagcagaatttctgcgtgtgaggccacccactttctccagcactaccaatccggtcgaggctgacgattggctgcatgccatagagaagaaaccggacatgcttcagtgcactgaccaggaaaaagtctcttttgcttcgcatcagctgcatggctctgcctctgagtggtgggatcacttccgtctcaacagggctactgctgagctaatcatttggctcgagttcactgctgctttcaagaagactcataaaccatcgggagtagtagctctcaagaagaaggagttcagggcactcactcaaggttctcgttctgtcaccgagtaccttcatgagttcaatcgactggctcgttacgctctagaggatgttcacactgacaaggaacgtcaggagaagttgacggaagggttgaatgatgaactgtcttacccactgatgactggggattatgctgatttccagaagttggtggacaagatcatttgtcaggaggacaagtataaccgcatggaatagaagaagcgcaggattactcacttcaaggcacagcaagggaacagtcagaggccgcgccttactttaggacctcaggcagcacttcagggaggatcttcttctgctgttcacccgcaacgccagttctacaacaacaacactggcagtggcaatggcaaccgcaacctagctccgcgtcctgctgcagctccagcccagcaccagcctgtcaagaaggagtaaggaaacaagccaggggtatgtttcaagtgcggtgatccgggccattatgctgacaagtgcccgaagcttcgtggtgtgaggactgctcatgtctagaacaactccaatgcacccacatcgaaggcccgtgtcaatcatgttgctgccgcagaagctcaaagtgcaccagatgtgattttgggtacgtaccccgttaactcagttcctgcaacagtgctttttgattctggtgctactcattcctttttgtctaagagttttgcgggaagtcatgggatggaaatagaagagcttaggtgtcctttgatgtttagcacccccagtaaccaagcactctcatcataccgtagcccttctgtcagaatagagattcaaggtgttccatttctggccaaccttattttgctagaatccaaagactttgatgtcatccttgggatggactgattaaccaagaatagaggtatgatagattgtgccaatagaaaggtaaaactcaccaacagctatggacaagttgtaaccgttcatgcattgcctcctgcatcctctcaagtgtctcttaatcaagtcaccgtggaagagatcctcattgtgtgtgaatatccggatctattccctgatgacctacccggcatgccgcctaagagagatatagaattcaggatagacctagtaccaggaacagctccaattcacaagagaccttacagaatggcagctaatgaattagtagaagtgaagaagcaggtagatgatttgctgcagaaaggatacatcagaccaagttcatcgccctggggagctccagttatttttgtggagaagaaggatcatactcagagaatgtgtgtggattatcgtgcattgaatgatgtgaccatcaagaataagtaccctctgcctagaattgatgatttgtttgaccagcttaaaggtgccactgttttctctaagatcgatcttcgatcgggatatcaccagttgagctttagggagtatgggttgtttgaatgtactgtcatgtcttttggacttaccaacgcccccgctttcttcatgaacttgatgaataaagtgtttatggaatatctggacaagttcgtagtggtctttattgatgacattcttaactactcctgaaccaaagaagagcatgaagtacatcttcgcctcgcactggagaagttacgagaacatcagatgtatgcaaagtttagcaaatgtgacttttggttgtctgaagttaagtttcttggacatgtcatctcagccggaggagttgctgtcaaccccagtaatgtggaatccgtaactaattggaagcaaccaaagacaatttctgagattcgtattttctaggtcttgcaggttactatcggtggtttatagagaatttctccaagattgctaaaccaatgacttgtctgcttcagaaagatgtgaagtacaagtggtcagcagaatgtgagcagagttttcaagaattgaagaagcgcctagtatcggcacctattttgatcttgcctaatccaaagaagggactccaagtgtactgcgatgcatctcagcttgggttaggttgtgtgttgatgcaagatgggaaggtggtagcctatgcatctcgtcagttgcgccctcacgagaagaattaccttacccaagatcttgagttagcggctgtggtccatgccttgaagatttggcgtcactatctctttggcactcgtccggaagt

SEQ ID NO: 13898 - DNA, 4476 bp, Oryza sativa
  Clone ID: TFbOSC900336j.C1.o19.gm
atggatgacaaggagacaccacaagagatgtatgataggatgatgatccttgtcaacaagattaaaggacttgggagtgaggacatgacaaatcactttgtggtcaaaagacttctccatgcttttggtccaagaaatcccactcttgtatcaatgatatgggaaaggaaagatttcaagaggctcaccccaagtgacattcttggaagaattgtgtctcatgagatgcaagaagaggaagctcgtgaagtgaggcaaatggtgaagaatgccaccatgatcaaaaatcaagaagtagctttgaaggcaaaacaagaagaagagtcaagttgtgaagaaagtgaagatgaagaaatgacttttattgtcaagagattcaagcactttcttcgcaagagtggctatggcaaagggaggaaggatgatgacaagggaaagaggcaatcaaagagagcttgcttcaattgtggcgaatatggccacttcattgccgattgtctcaagtcaaatgaagcgaaggctaagggaggcaagaagaagccggagcgtgctcatgtggcggaggcacacatggcagaggtgtggtactccggagatgaagaagatctcgaggtcaagcccaagcccaagccaaaagacaaggttgaaggagaaggtggtgttgctactgtcgccttcaagtcatcctcttcaagcaaggagcgtctcttcaacaacttgagtgatgacgacgacgactcctaccactactcttgtttcatggcccaaggccacaaggtgatgactcaaaagccctctcatacctctcttgatgttgattctagtgatgaggaaagtgataatgaattagatgatgtgcttaagagttttagcaaacccgctatgcaacatttggctaagttaatgagagctttggatagtaaagaacaatctctcgaaaggcaagaagaattacttattcttgagaaggaaagaaaccttgccttagtggagagcctagctaaagaatgtgctaaaaatgaacaactagctaatgagcttaatttggctaatggttctctagctagccttagggatgtcaatgaaactcttcaagagaagtttgctagtttagacaaaagtcataaagatcttgaagttcaatttgacactctttggaatagcacttctcaaccaaatgtggtttctaattcttccaacccatctactagcaatggttgtgctaggtattacaatattgatttgaactctcatgctactaatgttgatgctatgcaagctcttaagaaagaaaatgaaaggttgggcacattggtgaaatatggatgtatgaagacataccattcaaaagatgccctttacaagaccatcaccgctcatcctaacaaggatggacacgggctcaggaagtttcgggcttctgataggccgaaggggctggccggaagttccggttataatgccaggaagttctggccagagggtctttactatgattcatatgcatactcctccgatggctcaagttgggttgtggacagtggctgcaccaatcatatgacgggagagaggagtatgtttacaagtcttgatgaggagggtggaagtcgtgaaaatattgtctttggagatgatggtaaaggaaagagggtgcgaagcaacaatggaggagaattcaagaacactcaagtggaggaatttcttgatgaagaaggaatcaagcacgagttctccgccccctatgatcctccccaaaacggcattgttgagaggaagaaccgaaccctcattgaagtcgcaagggcaatgcttgatgagtacaagacttcggatgtattttgggcggaggccgtgagtaccgcatgtcttgccatcaatcgcttgtacctccacaagatcctaaagaaaacctcatatgagctcttgagtggtaagaagcctaatgtttcatattttcatgtctttgggagcaaatgttttattttaagtaagaggtctcgctcatctaagttctcacctaaggtggatgagggattcttacttggctatgaatcaaatgcacatgcctatcgtgtcttctacaaaacctccggtattgttgaagtcactagggatgtgacatttgatgaatctaatggctcccaaggagagcaagttgttgtacatgttgtaggggatgtggatccaaatcaagctataggtactaacgctattggagacatacgaccagtcgagacgcaggatgaccaagaagatagggatcaacctccgtcatcgacatccaatagccctacaagtgctgtgtctgctgagccggaagttccgggtcccattgaccggaacctccggacatctccagacccggaagttccgggttctacagttcggaacctccggatcagtggcagtgaagacgtgccaacggcacaagtggatgggatcgatgctgagggcactttagagcattctgatcaggctcaggtccccccagtgcaccatccaaggatacatcacactgtccaaagagatcatcccgttgacaacatacttgggttcgaggatccaaagttgccaaaccatgtgtacaagctccacaaggcgctctacgggctcaaacaagcccctagagcttggttcgagatgtctatgatgggcgagttgaccttcttcctcgggctacaagtgaagcaagcactagagggcaccttcatctctcaaaccaagtacgtaaaagacatactcaagaagtttgggatggaggatgccaaacctatcaagacgcccatgcctactaatggatacctagacctcgacgataatggccggaagttccggtgttcttggcctggaacttccgtggtcattatgcctcgtgagaagagacagaagctttctcaagatgttcctgctgactcgagccccccggttcgtggtcctagggggagattgggcaaagaaaaagttggagttttttacagtgggagtcagattccgatccattccaggagggctggtagcattgtcattcgtgatgcaccccgctctccctctccagctgcatctgagtcagatgatggtggcaatgaggatgagcctggttctaaaagcaatcctttgaggctgtacaagacaagggctgttgatccagatcctaaacgcacaagagtgaactatctgaagaatctactccagtgtggaaaggacagaatggttagtcctgatactctgccagctgactctcaggatgacagattcaggaccttggtgcaggttgattggtataactctatgatcatgggaagatctcatctagtggtagagatgaagtggctagactggcagtacatgtcctcaaagaacaatatagtcttcaatgaggtacgcaaggtgtgtgagcgcaagcacgtggtagatttgttggccttgcagtattcctggaatgaggaagtgattggacagttctactttactgctttctttggcatcaccaagaaggggcttgattttgtgaagtggaccattcaggggcagcagtatagggtttctatggcacagtttgctgcagctttggggttagatgatgatgacctgagtcgtccacatatctttgtagaggatgctctgtcaccaaccagcactacctttatgtatgagaaggatgctcctaaggattgtttggggactattcgagggttgcgtccatattatagagtgctgtactctatcttcaggtggtctttgctccccaaagtgggagatgctacagctcttccaggtaggcatgcgctcctcctcagtcgcatgcgctacaacaagccagatttcagcatcatgaagcttatttggagtgagatctataagacaatgtgtgagccaaagaggggctgcatctatgctccttatatcatgaagatgattgaggccaagactgggatttgttatttcaaggacaatcaacacaagcttttccgtcctcatgctcccactacttcagctactcctaccaccagagtgactcgtgcttccacctcagctgctccttcttcctctgctgcacctcagcgttctgagtcttcttctcccataaagaaggctcttagggctatcttttgcatgtgtgccaagacagctaagaaggtaaagaagatagagaggcgtcaaaaggaagattggattgcagcaggcaaggatgtctctgacatttctgatgatgaggagtttgttgatccttttgctgcttatgagactgctcgagacattgctagtggtgagggtccctctggcacttctcgtttcttcaatgaggagtcctctcactccgaggagagcagtgatgatgaggagtcaaatgcccctaccgagaatgttcttacagatcccgatgaggcagtggacgccgccgggcaagacatcgactctcctcactccggcgacaccgagatcattccttctgatggcgatgatgatgaggcttga

SEQ ID NO: 13899 - DNA, 771 bp, Oryza sativa
  Clone ID: TFbOSC29212j.C1.o2.fg
atggcatccaaacgaggggaaaagaaaccgcaggccagaatgtctcgccggcggcagcagccgggctccgactccgacggcgaggacgacagcttcctctaccgctacccgctcccctccgccgccgctcccggcgcctcggggccctcctcgcacggcggcaagcccggcggcggcggcggctcgggcggcctcgcgccgtccaagtcgacggtgtacgtgtccaacctcgacttcgcgctcaccaactccgacctccacaccctcttctcccgcttcggccgcgtcgcccgcgtcaccgtcctcaaggaccgggactccccgcggagccggggcgtggcttccgtcctcttcgtccgccgcgaggacgccgccgcagccgccgcccgagatgcacggcaagccgagttcatccgccgccgcgtctaccgcgacaagtcccgctgctacgagtgcggcgaggagggccacctctcctacgagtgccctcgcaaccagctcggcccccgcgagaggccgccgccgtctaagaaatcgcggcgcggcggcggcagcggcggtggtggaggaggcggcggaggcggtcgcggggcttcctggcagtcggatgatgaggatagcgccgcggcgttcgaggacgacaggtgggcgtcagtggtggatacgagaggggaggaggagaaggcagctgggaagggcgaggggaaggcgatgaagaaggagaagaggaaaggctacttcagcgacgagagcgatgaggatgaggactga

SEQ ID NO: 13900 - DNA, 4152 bp, Oryza sativa
  Clone ID: TFbOSC401338j.C1.o7.np
actattgctcaaaaagctgattttgaaaataattgcaaagcacgcaacattattcttaatgccatttctcgctccgattttgatcgtgtttcacatcttgcaactgctaatgagatttggaaagctttcaacgattttcacactggatcttcaaacattaaggagttgcaaaaagatgttttcaaaaaggaatacatcaagtttgagatgaattctggtgaatcattggatgattatttggggcgtttcaataaaatcttgagtgatcttggatctgttgatgcttcttacaatgtcaactattctcaatctaaggttgcttgttactttatgaatggtcttgacatgaaaatctgggatgttaaagtgacttctattcaggaatctgttggcatgaacaccctgactttggatattctctacaccaaattgaaaacatatgagatgaatattctttctaaaagaactgattctaaatctactgctttggtgtcttcatctagttcttctattgattccactcccatgtctattttttccgcttttaatgccttgtccgaggatcaactagagggagttagtgaggaggacttggttttgattgctaatagagcttctaaagctttgagtaatactagatccaggagaagaggaggaccacaacgttgctttgaatgtggacaacttggccatattcgttctcaatgtcccaagctcagaagaggaacaaaggcggtagatcaagatgaagtcaagaatgccaagaacaccaaggacgacaaacaaagcaagaagcaattcaagaacatgaagatgaagaagttctatcaaaaggcgatagatgaagcatatgcggcaattcaagaatcaagtgatgttgattttgatagtgatggagatgatgacaaggggaagaacatcgttggagtttgtctcatggctagaagcattgatgaggattcaggagatgacaatgaggtaattcctccttctagtgttgaatattatcaagatattattgctagacttggttttaaaatttctaagtttgagaaaagattagtccatatgaagctaccattgaatctcttaaggctgaaaatagtagtataaaatctcttgttcctgataatgatgaatgtcaatcttgtgaggttttatgtgctgaaattaagtctaatagagatgtttgtatcaaaaagcttgatgttgaatctaggaaaactaagaaatttgaatcttgtgttgctcttagctttgccatgaacactagattggttgatgaattgtttttaactaagagagctttgaataaatgtcaagttgctttgtttgctagctcgatatttaacttgattagctctaagaggattaagcaatctagtaccaaacttttttcgacaacatgtgttgctaatgagatgaaactaaaatatgctttgggtcgtgttaagcacatggaggaaattgttaaacaagatgaagtgatgtcttgctcaacgtgtagaaaataaaagagtgttttggatgcttgcaaaaattgtgctactctttctcaagaggttttttacttgaaaagttctttgcaaagattttctaaaggaaaaaagaacctcaacatgattcttgatcaatctaaggttaacacaaacaatcgtgatttagtggtgaggatggagaacgtgtggattgtggactccggttgtatgcagcacatgaccagtgattctccttcctcaagaaggcgtcaaggagggactcgatcatcttcggtgatgcttctactagttcgataacaactactggttctgtcaaggtaagtgacaagtttacattgaatgatgtcactttggttgagaatttgaaatataatttgctctccgtctctcaaatcgtggatgaggattttgatgtgttgttcaagaaaactagaagcaaggtctttaattcttctggagatgttgtgcttaatgtttcgcgttatggaagagtttttaaggctgattttgagaatagtgtttcttctgaggttacatgtcttgttgcaaaattctcgaaagatgtgatgttttagcatcgtaggctaggacatgttggttttgatcatctcactagaattagtggttcggatcttgttcgtggtttgcctaaacttaagaaaaatcttgatttggtttgttcaccatatcgttatgctaagatggttgcttcttcacatgctcctattatctctgtgatgacggatgcaccgggacatctcttacatatggacactgttggtccaactagagtgcaatttgttggaggaaagtggtatgtgttggttgttgttgacgatttttctcgatattcttgggttttctttatggctactaaggatgagccttttgaacactttaaaagtttatatcttcgtttgtctcttgaatttgctggatctttgaggactattcgaagtgataatggtatttcacatttgcgtgtttttggatgtaaatgctttgtcttaaaatctagaaatttagacaaatttgagtcacattcaactaatggacttatgcttggatattctacacattctcgtggttatcgtgtacttgttttggaaactaacaaaattgttgagacttgcgaagtcacttttgatgaggctagtcctggtactagacccgatgtttccggtacactatcataggttcagggggaggatatttttgtggacgaaagcaatgacgaggaagaggacgaaatggcggccgttcagaccggggccacggccggtcagaccgctggcagaggatcggtcagaccggcctgggggatcttcctcgggtgcgtcgggtgatgatggtagaggacctccagagacttctacttcaataggacagggtgcagaacacgaaatttcatcatatgctactactccgcttcatattcaatgacgacatcctccacaacaaatgataggtaatattggtgaacatactacaaggtccaaggtaacaactcgtgatcatcatgtgaattctgcttttgttgctaattttgaacccaaagatgttactcatgcactaactgatgaatcatggatcaacgccatgcatgaagaacttgagaattttgaaagaaataaagtttggtctttagttgaacctcctgttggtcataatatcattggaactaaatggattttaaaatgaggatggtttaattgtgagaaacaaggctaggcttgttgctcagggttttacacaaatgtaggggttggattatgatgaaacttttgctcctgttgctagaattgaggcaattagacttttgttgacttttacagcttcaaaaggttttaaattgtatctaatggatgtgaaaagtgcttttcttaatggttatatacaggaggaagtttatgtaaaacaaccacccggttttgaaaactctgaatttcccaatcatgtttttcgcttgtctaaagctttgtatggtttaaaacaatctccaagggcatggcatgatagattggaaaactttttgcttgccaaaggttttataatgggaaaagtggataaaacactctttgttcttaagcatggtgatgatcaactttttgttcagatttatgtggatgatatcatctttggttgttcatctcaccctttggttgtggagtttgctgagactatgcgcatggaatttgagaagagcatgatgggcgaattgacttactttttggggcttcaaatcaagcaaacaaagcaaggcacatttgtgcatcaaacgaagtacaccaaggatcttctacggcgtttcaagatggaggattgcaagcctatgtctacacccattggatctactcctgtgttggatccggatgaagatggtgaagttgtggatcaaaaggagtataggagtatgattggatcattactctatctcactgcttcaagaccggacatacaatttgttgtatgtttgtgtgcttgttttcaagcttctccacgtgcttcacatcgtcaagctgtcaaacgcatcatgaggtatttgcaatagactcttgaatttggaatatggtattctacatattcttctatatgcttgagtggttatttggataacaagcaccgaggtacacaaactgacaatttaatatac

SEQ ID NO: 13901 - DNA, 804 bp, Oryza sativa
  unsure (1)..(804): unsure at all n locations
  Clone ID: TFbOSC900093j.C1.o1.fg
atggcatccaaacgaggggaaaagaaaccgcaggccagaatgtctcgccggcggcagcagccgggctccgactccgacggcgaggacgacagcttcctctaccgctacccgctcccctccgccgccgctcccggcgcctcggggccctcctcgcacggcggcaagcccggcggcggcggcggctcgggcggcctcgcgccgtccaagtcgacggtgtacgtgtccaacctcgacttcgcgctcaccaactccgaccttcacaccctcttcttccgcttcggccggggaccggacctcccccgcaggccggggggtggccttcgtcctcttcgtccgccgggaggagggccncccgccccccccgccgagatgcacggcaaggtcctcaacggccgcaccctctccgcctccatcgcggaggacaacggccgcgcagccgagttcatccgccgccgcgtctaccgcgacaagtcccgctgctacgagtgcggcgaggagggccacctctcctacgagtgccctcgcaaccagctcggcccccgcgagaggccgccgccgtctaagaaatcgcggcgcggcggcggcagcggcggtggtggaggaggcggcggaggcggtcgcggggcttcctggcagtcggatgatgaggatagcgccgcggcgttcgaggacgacaggtgggcgtcagtggtggatacgagaggggaggaggagaaggcagctgggaagggcgaggggaaggcgatgaagaaggagaagaggaaaggctacttcagcgacgagagcgatgaggatgaggactga

SEQ ID NO: 13902 - DNA, 768 bp, Oryza sativa
  Clone ID: TFbOSC900155j.C1.o15.fg
atggcatccaaacgaggggaaaagaaaccgcaggccagaatgtctcgccggcggcagcagccgggctccgactccgacggcgaggacgacagcttcctctaccgctacccgctcccctccgccgccgaccccggcctcgcgccgtccaagtcgacggtgtacgtgtccaacctcgacttcgcgctcaccaactccgacctccacaccctcttctcccgcttcggccgcgtcgcccgcgtcaccgtcctcaaggaccgggactcccgccgcagccggggcgtggccttcgtcctcttcgtccgccgcgaggacgccgccgccgccgccgccgagatgcacggcaaggtcctcaacggccgcaccctctccgcctccatcgcggaggacaacggccgcgcagccgagttcatccgccgccgcgtctaccgcgacaagtcccgctgctacgagtgcggcgaggagggccacctctcctacgagtgccctcgcaaccagctcggcccccgcgagaggccgccgccgtctaagaaatcgcggcgcggcggcggcagcggcggtggtggaggaggcggcggaggcggtcgcggggcttcctggcagtcggatgatgaggatagcgccgcggcgttcgaggacgacaggtgggcgtcagtggtggatacgagaggggaggaggagaaggcagctgggaagggcgaggggaaggcgatgaagaaggagaagaggaaaggctacttcagcgacgagagcgatgaggatgaggactga

SEQ ID NO: 13903 - DNA, 3219 bp, Oryza sativa
  Clone ID: TFbOSC11309j.C1.o1.fg
atgcagtgcttctatgtttcacggggcaaacgaagtgaaccacctctttctcctgaggaagaggctaagttcgaggcttcggattgcctgttccgtggagcattgatcagtgtactcgctgacaacatagtggacgtgtacatgcacatgccttctgggaaggacatgtgggatgcacttgaggccaagttcggagtttctgatgccggcagtgagctgtatgttatggagcagttctatgactacaagatggtcgatgaccgttctgtagttgaacaagctcatgagattcagatgctggctaaggaacttgagaacaacaactgtgagttgccggacaagtttgtggcaggtggcattattgccaaactaccaccttcttggtcggactttgccacttctctaaagcacaagagacaagagttcagtgttcctgatctcattggctctttgggtgttgaggagaaggcgagggcaaaggacgtccggggcaaaaaggttgagggaggttctagtgccaatatggtacagaagaagaaccctcatgcatcccacaacaacaagaaagtcaagcctgatgtcaaacccaaggctgcaaccaattttaagaagaaaagcaagggaaaggcaaagggagactgctttgtgtgtggcaagtctaggcattgggccaaggactgtcctgagcgcaaagacaggaagtctgccaacatgatcattagcgagggcggaggaacatcggggtacggtaaaatattacctacagttctctctgtttttcattcacttgattggtgggtggacactggtgctaatattcatgtcgggagaggttcctccttgttgatgggaaacgggtcgcttgcggctgttcatggtgttggtacggtcgatctgaagtttacttcgggaaagaccgtgcagctgaagaacgtgcagcatgtcccttcaataaagaagaatctagttagcggctctctattgtgtagagaaggttttagacttgtgtttgagtccaataaatgtgtcgtatctaaatatgggacttttgttggaaaagattatgacagcggaggcttgttccgcttttctttgaatgacatgtgtaataatcataatgctgtgaaccatattagcgagaatgatgagtctaatgtgtggcattcgcgactctgtcatgtgaatttcggttgtatgacgcgcttagctaacatgagtttaattccaaaattcactttggtaaaaggttccaagtgccatacttgtgttcaatcgaaacaacctcgcaagcctcacaaggcatctgaggcgaggaatttggcacctctagaacttgttcattccgatttgtgcgaaatgaacggcgtgttgactaaagggggaaagaaatatttcatgacactgatagatgattgcactagattttgctatgtgtatctattgaaaacaaaggatgaggcattgcatttctttaaaatctataaagctgaggtagaaaaccaacttgaaaggaaaatcaaacggttgaggtctgatagaggtggggagtatttttccaatgagtttgcatccttttgcgaagagtttggaattattcatgagatgacgcctccctattcaccccaatcaaatggggtggccgaaagaaagaaccgtactctaactgagatggtgaatgccatgttagacactgcggggctttccaaggaatggtggggtgaggcagttttgactgcgtgtcatgtcctgaataaaattccaatgaagcataaggaaataacaccattcgaggaatgggaaaggaagaaattaaatctctcatacctacgaacatggggctgtttggccaaggtaaatgtacctatagccaaaaagcggaaacttggaccaaaaactgttgattgtgtgtttcttggttatgctatccacagtgtgggttatagattcttaatagtaaactctggagtacccgacatgcatgttggtacaattcttgagtccagagatgctacattctttgagaatgaatttcctatgaaatatacacctagcacttctagtaaagaaactgtcatgccccatgagcactttgcaccgatagaacacaatgatcaaacgcctgaggaaaatcctgaggaggacaacattgtagatactcgcaagagtaagagacaaagggttgcaaaatcctttggagatgactacattgtatacctcgtggatgacaccccaagaaccatagaagaggcatattcatctcctaacgctgactactggaaggaagcagtacgcagtgaaatggactcgattatgtctaatggtacttgggaagtcgttgagcgtccatatgggtgcaagcccgtaggatgcaaatgggttttcaagaaaaagcttaggcttgatggtacaatcgaaaagtacaaggcaaggcttgtggccaagggttatacccaaaaggaaggcgaggacttcttcgacacatactcactagttgctcgcttgaccacgattcgagtactactcgctctggcagcctctcatggtcttctcgtccatcagatggacgttaagacagctttcctaaacggagagctggaggaggagatctatatggatcaaccagacgggtatgtactagaaggtcaggagggaatggtgtgtaaactattgaaatccttgtatggcctcaagcaagcacctaagcaatgtcatgagaagtttgacaccacgcttacatctgcaggctttgttgtgaacgaagctgacaaatgtgtatgctatcgctatggtgggggagaaggggtgatcttgtgcttatatgtcgatgacatactgatctttgggaccagccttaatgtgattgaggaggtcaaagactatctgtccaagagttttgaaatgaaagatttgggagaggctgatgttattcttaacatcaaactacaaagaggagatgagggtgggattacacttgtgcaatcccactatgtggacaaggttttgagtcgctttggatatagtgactgcaagccagctcctactccttatgatcccagcgtgctattaaggaaaaaccgaagaatagcaagggatcagctgagatactctcaaatcattggttcattgatgtacttggctagcgcaacgaggcctgacatctcatttgctgtaagcaagctgagccggtttgtctcaaatccgggagatgatcattggtag

SEQ ID NO: 13904 - DNA, 991 bp, Oryza sativa
  Clone ID: TFbOSC16291j.C1.o1.np
taaggcatgctctcgttgtggagaaatcggtcatgttgccagctcgtgtgccactacatgcgttcattgtgaggaagaccatccacccgataggtgtccaacgagcaggatcacttgtttcttttgtgaaggaactgatcatgtaccaaaagattgtcgattcagttttctgctgacgaagaagatggccaaccaacccgtcagttccaacggagagaagcatcaaggaaacacaaatcctcgccaagattacagtttcagcctaactccagtgccaggacagaggaaacaaaatgagaaaagaaaatgccgagtccgggaagatatctgttgcttcaattgtcaaggaatgggtcatttcgccgacaagtgcccaaaaccgagaaacgtagctgccagcacgtcagtccacgcaaacccccgcaatcagaagcttgctcctcaacgaattgtcatccatgcatcccgaagcagtcctatagcccgcgttgcaacagctccaattccaatgagtgcactaccacaaggtgtcaatgctcaatttcagccccagccaccagctgacaagacagaggccagtatctgcgttgtacctttggaagttccaatacagcagctgagaaatcaagtacaagatgaagaacccgagtgtacaaccattctctgcatcgacagcctcagcaaagaattgtcgtagatggaagaagttgtgtctctccccgacctactccaggccgagccaagagcaatcaacctccggagggcgataccaagcagaagaccgtcatccgcttcaaccagcaatcagaaggaagcttctcctgtgaatgatagcattatgtagtcctgtcacatcatcacagaaccaatcaaggatgcagtcactagaacaatgccagctatatctctccagaatcaaaatgagcagccatgtttgtggttttcagttcgctacttatcatggtgtaatcgaaagtttgcagcaaccatg

SEQ ID NO: 13905 - DNA, 2388 bp, Oryza sativa
  Clone ID: TFbOSC16541j.C1.o2.fg
atgcaatgcttctatatttcacggaaaaaacgaagtgaactgcctctctctcctgaggaggaggctaggttcgaggattcggattgcctgttccgtggaacattgatcagtatacttgctgacaatatagtggacgtgtacatgcacatgccttcggggaaggtcatgtggaatgcatttgaggccaagttcggagtttccgacaccagcagcgagctgtatgtcatggagcagttctatgactatgagatggtcgattaccgagaaggcgagagcaaaggacaacagggcaaaaatatcgagggaggttctagcgccaatttggtgcaaaagaagaaccctcacgcatcccacaacaacaacaacaagaaagtcaagcctgatgtcaaaccaaaggctactaccaattttaaggataaaggcaagggaaaggccaagggcgactgctttgtgtgcggtaagcctaggcattgggccaagaattgtcctaatcgcaaggacaagaagtctgccaacatggttattagcgagggcggaggaacatcggggtatggtaaatttttacctacaattctctctgtttttcattcacctgattggtgggttgatactggtgctaatattcatgtgtgtgctgatatttccatgttttcttcttatcaagtcgggagagattcctccttgttgatgggaaacgggtcgcttgcggttgttcatggtgttggtatggtcgatttgaagtttacttcgggaaagaccgtgcagctaaagaacgtgcagcatgtccctttaataaagaagaatctagttagcagctctctactgtgtagagatgcttttagacttgtgtttgaatccaataaatgtgccgtatctaaatatggaacttttattggaaaaggttatgtcagcggagttctgttccgtttttctttggatgacatgcgtaataataataatgatgtgaaccatattagcgagaatgatgagttcaatgtgtggcattcgcgactttgtcatatgaatttcggttgtatgacacgcttggctaatatgagtttaattgcaaaattcactttagtaaaaggttctaagtgccatacttgtgttcaatcgaaacaacctcgcaaacctcacaatgcatctgaggcgaggaatttggcacccctagaacttgttcatttcgatctgtgtgaaatgaacggcgtgttgagtaaagagggaaagaaatatttcatgacactgatagatgattgcactagattttgctatgtgtacctattgaaaccaaaggatgaagcattgtattactttaagatctataaagctgaggaatggtggggtgaggcaattttgactacttttcatgtcctgaataaaattccagtgaagcataagaaagtagcaccgttcaaggaatgggaaaggaagaaactaaatctctcatacctacgcacatggggctgtttggccaagaacacagtaatcaaacgcctgaggaaaatcctgaggaggataacattgtatactcgaaagagtaagagacaaagggttgcaaaatcctttggagatgactacattgtatacctcgtggatgacactccaagaactatagaagaggcatattcatctcctgacgctgactattggaaggaagcggtacgcagtgaaatggactcaattatatctaatagtacttgggaagtcgttgagcgtccatatgggtgcaagcctgtaggatgcaaattggttttcaagaaaaagcttaggccagatggtacaattaaaaagtacaaggtaaggcttgtggccaagggttataaaaaaagaagcctcaatgtgattgaggaggttaaggactttttgtcccaaagctttgaaatgaaggatttgggagtagctaatgttgttcttaacattaagctactgagaggagatgagggtgggattacactcgtgcaatctcactatgtggacaatgttttgagtcgctttggttatagtgactgcaagccatctcctactccttatgactctagtgtgcttttaaggaaaaaccgaagaatagcaagggatcaattgagatactcccatatcattggttcattgatatacttggctagtgcaacgagtcctgacatctcatttgctgtgagcaagctgagcagatttgtttcaaatccgggagatgatcattggcaagctctggaaagggtcatacgctatctaaagggcacagtgagctatggaattcactatactgtgtacccaaaagtactggaagggtatagtgactcaaacttgatatctgatgctgatgagataaaggccacaagtggatatgtgttcacacttggaggtggcgctgtttcagaccatcttaacgag

SEQ ID NO: 13906 - DNA, 1777 bp, Oryza sativa
  Clone ID: TFbOSC19063j.C1.o1.fg
atgcaatgcttctatatttcacggaaaaaacgaagtgaactgcctctctctcctgaggaggaggctaggttcgaggattcggattgcctgttccgtggaacattgatcagtatacttgctgacaatatagtggacgtgtacatgcacatgccttcggggaaggtcatgtggaatgcatttgaggccaagttcggagtttccgacaccagcagcgagctgtatgtcatggagcagttctatgactatgagatggtcgattaccgagaaggcgagagcaaaggacaacagggcaaaaatatcgagggaggttctagcgccaatttggtgcaaaagaagaaccctcacgcatcccacaacaacaacaacaagaaagtcaagcctgatgtcaaaccaaaggctactaccaattttaaggataaaggcaagggaaaggccaagggcgactgctttgtgtgcggtaagcctaggcattgggccaagaattgtcctaatcgcaaggacaagaagtctgccaacatggttattagcgagggcggaggaacatcggggtatggtaaatttttacctacaattctctctgtttttcattcacctgattggtgggttgatactggtgctaatattcatgtgtgtgctgatatttccatgttttcttcttatcaagtcgggagagattcctccttgttgatgggaaacgggtcgcttgcggttgttcatggtgttggtatggtcgatttgaagtttacttcgggaaagaccgtgcagctaaagaacgtgcagcatgtccctttaataaagaagaatctagttagcagctctctactgtgtagagatgcttttagacttgtgtttgaatccaataaatgtgccgtatctaaatatggaacttttattggaaaaggttatgtcagcggagttctgttccgtttttctttggatgacatgcgtaataataataatgatgtgaaccatattagcgagaatgatgagttcaatgtgtggcattcgcgactttgtcatatgaatttcggttgtatgacacgcttggctaatatgagtttaattgcaaaattcactttagtaaaaggttctaagtgccatacttgtgttcaatggaaacaacctcgcaaacctcacaatgcatctgaggcgaggaatttggcacccctagaacttgttcatttcgatctgtgtgaaatgaacggcgtgttgagtaaagagggaaagaaatatttcatgacactgatagatgattgcactagattttgctatgtgtacctattgaaaacaaaggatgaagcattgtattactttaagatctataaagctgaggaatggtggggtgaggcaattttgactacttttcatgtcctgaataaaattccagtgaagcataagaaagtagcaccgttcaaggaatgggaaaggaagaaactaaatctctcatacctacgcacatggggctgtttggccaagaacacagtaatcaaacgcctgaggaaaatcctgaggaggataacattgtatactcgaaagagtaagagacaaagggttgcaaaatcctttggagatgactacattgtatacctcgtggatgacactccaagaactatagaagaggcatattcatctcctgacgctgactattggaaggaagcggtacgcagtgaaatggactcaattatatctaatagtacttgggaagtcgttgagcgtccatatgggtgcaagcctgtaggatgcaaattggttttcaagaaaaagcttaggccagatg

SEQ ID NO: 13907 - DNA, 3492 bp, Oryza sativa
  Clone ID: TFbOSC413690j.C1.o2.fg
atggcggctccagaccggcgtggcagcagggagatcgggaagggcggtggacgacgtcggggacggcggccgtcggatctgctgcggccggtcggagaagacgggcgggcgatcaggtttttggggagcgcaaggcgcgactactcactgttcgtcaacatctacttcatcttcaccaacatgtcgaacactggagacaaggagaaggagactcccgtcaacaccaacggaggcaatactgcctcaaactccagcggaggaccattcttggggtataaccttattacattatttcaattagaagttttactgttaatgttcatcgcaatgtcaacattgtgtcattatgtgattgttgatgctaattcaacgttaagcatgctcatgttgattacattcaccactatcactggatcaaatcctattgtaaatatcatgtttattatcttgttattttggattaaaatatgccgaattatgaccaaatttccaacaatccaaaaacctgataggtcattttcggtagttggctttgctgctacactgaaaccacatgcctttgatggttcaaactataagagatggaaagcacgtgcactattgtggttgacagcgatgcagtgcttctatgtttcacggggcaaacgaagtgaaccacctctttctcctgaggaagaggctaagttcgaggcttcggattgcctgttccgtggagcattgatcagtgtactcgctgacaacatagtggacgtgtacatgcacatgccttctgggaaggacatgtgggatgcacttgaggccaagttcggagtttctgacgccggcagtgagctgtatgttatggagcagttctatgactacaagatggtcgatgaccgttctgtagttgaacaagctcatgagattcagatgctggctaaggaacttgagaacaacaactgtgagttgccggacaagtttgtggcaggtgacattattgccaaactaccaccttcttggtcggactttgccacttctctaaagcacaagagacaagagttcagtgttcctgatctcattggctctttgggtgttgaggagaaggcgagggcaaaggacgtccggggcaaaaaggttgagggaggttctagtgccaatatggtacagaagaagaacccttttgcatcccacaacaacaagaaagtcaagcctaatgtcaaacccaaggctgcaaccaattttaagaagaaaagcaagggaaaggcaaagggagactgctttgtgtgtggcaagtctaggcattgggccaaggactgtcctgagcgcaaagacaggaagtctgccaacatgatcattagcgagggcggaggaacatcggggtccggtaaaatattacctatagttctctctgtttttcattcacctgattggtgggtggacactggtgctaatattcatgtcgggagaggttcctccttgttgatgggaaatgggtcgcttgcggctgttcatggtgttggtacggtcgatctgaagtttacttcgggaaagaccgtgcagctgaagaacgtgcagcatgtcccttcaataaagaagaatctagttagcggctctctattgtgtagagaaggttttagacttgtgtttgagtccaataaatgtgtcgtatctaaatatgggacttttgttggaaaagacactgcggggctttccaaggaatggtggggtgaggcagttttgactgcgtgtcatgtcctgaataaaattccaatgaagcataaggaaataacaccattcgaggaatgggaaaggaagaaattaaatctctcatacctacgaacatggggctgtttggccaagataaatgtacctatagccaaaaagcggaaacttggaccaaaaactgttgattgtgtgtttcttggttatgctatccacagtgtgggttatagattcttaatagtaaactctggagtacccgacatgcatgttggtacaattcatgagtccagagatgctacattctttgagaatgaatttcctatgaaatatacacctagcacttctagtaaagaaactgtcatgccccatgagcactttgcaccgatagaacacaatgatcaaacgcctgaggaaaatcctgaggaggacaacattgtagatactcgcaagagtaagagacaaagggttgcaaaatcctttggagatgactatattgtatacctcgtggatgacaccccaagaaccatagaagaggcatattcatctcctaacgctgactactggaaggaagcagtacgcagtgaaatggactcgattatgtctaatggtacttgggaagtcgttgagcgtccatatgggtgcaagcccgtaggatgcaaatgggttttcaagaaaaagcttaggcctgatggtacaatcgaaaagtacaaggcaaggcttgtggccaagggttatacccaaaaggaaggcgaggacttcttcgacacatactcaccagttgctcgcttgaccacgattcgagtactacttgctctggcagcctctcatggtcttctcgtccatcagatggacgttaagacagctttcctaaacggagagctggaggaggagatctatatggatcaaccagaaggtcaggagggaatggtgtgtaaactattgaaatccttgtatggcctcaagcaagcacctaagcaatggcatgagaagtttgacaccacgcttacatctgcaggctttgttgtgaacgaagctgacaaatgtgtatactatcgctatggtgggggagaaggggtgatcttgtgcttatatgtcgatgacatactctcaaatcagctgagatactctcaaatcattggttcattgatgtacttggctagcgcaacgaggcctgacatctcatttgctgtaagcaagctgagccggtttgtctcaaatccgggagatgatcattggcaggctctggaaagagtaatgtgctatctaaagggtactatgagctatggaattcactataccgggtatccaaaagtactagaagggtatagtgactcaaactggatatctgatgctgatgagataaaagccacaagtggatatgtgttcacacttggaggtggcgctgtttcctggaagtcttgcaagcagaccatcttaacgaggtcaacaatggaagcagaacttacagcactagatactgcgacagttgaggccgagtggcttcgtgaactcctgatggatttgccggtggttgaaaaaccagtgccagctattctaatgaactgcgataatcaaacagtgattattaaagtgaacagttcaaaggacaacatgaagtcatctagacacatcaagagaagactgaaatctgtcagaaagcagaaaaactccggagtgatagcattggactatgtccaaacggctagaaatctggcagatcagtttaccaaggggctaccacgtaatgtgatagacagtgcatcgagggaaatgggcttgatacccacctaa

SEQ ID NO: 13908 - DNA, 4902 bp, Oryza sativa
  Clone ID: TFbOSC414105j.C1.o11.fg
atggcagtgaacgccagcttcagttcccacggttttggtgagggtcaccacgtcgctcagcttcgtgacctcgcccgcttccttggcttctcgtgtctcgagtacacggggtactccgtggaccgtgttccccctcgctgtgagctctctgtgtacctttaccctcgtggaggtatacacggagttggccttcgcccacaccacttcactgtggccaggcccactctccagatcgcgtaccaggacctctcctggactgcgcttcgtcgcttggcccacgactacagccaccgtctcgggggctctgccttctggcagcttccacgccttccttctggccacgcagacgccaggtacccttgtccgtacagcgagtctcagccagtgctgactcgcatggttgagctttcggaggctcaggccactcagcacgacctactccttgaggcttaccgctcccttgcccaccgctacgccgctttggaggcccgtctggccgaggagggtgtcacctcagttgacactgtctcctgggactcaggccgcctctgccacgccagctacctgtcctcccacagcttccgcggctctgctcgcactcccagtggcccgcactcccccagctcgcgtgcgccgtactcaccagtgtactccccctacccacacccagttagcccctcctacacccccggacacaccccagttgcttcctcccgccgtggcccacgctttatccgcactgcgcggaagcgtgttgttggttcttccaccgtgttccgtttcgactacccagctcccccaccgccagtggcccgtgctgctgtcggccctcgacagatggctagccgcccccgccgtgcagctcgtgcaccagcccgcttcggttttgagggaggtagagttgagcccgaagcaaatcatgagtcagctaatgagcagtctcaccacagcaaccgttcgcactgtaccgcttcccgcaacgcagaagttgagcaaccccaccgcagcaaccgcttgcatcacacagcttcccgtaatgcagaagtggaacagtcccaccactctcaccgcactgccagtcacaattctggagaagaacgcctcccttccccacctcatgtggaaaacaacatgcagcacttaatggcagttcagacacaaatcttgcaaggattagccgcagccgtagccggttttcagcataatgcgcatggaaatggccaccctcacatgagcaacaatagattcaagctgacagattttctgaggtctcgtccgccagagttctctcagaccgtcgagcccgtcgaggctgacgattggctgaaagatgttgatagaaaactcaacttagtgcagtctcatgtgcctgaaagcactattgacatgaagaaagaggaattcaacaaacttaagcaaggcaacagcagtgtcaatgagtacctaagtatgtttaacaagttggctcggtacactcctgaggaagtggacacagacaagaagaagatcaggaaattcttgaaagggatcgcagttggaatgagacttcagttgcttgctcatgacttccccacttttcaacatatgatcaacaaggcacttctacttgaggatgccagaaaagaggctactgaagaatacaagaaacgcaagtctaaccatcagggaaattcttccccaggcgcacctcgccctcgctacggtcaacccatgcaataccaccagtcggtcactcaggctaaccgccagccaggctacgcccctcgtcctcagatgaaccgtccggcacctcagccacagcagcgtgcccctagtggcaatactgcgccaaacagtgttacctctttcaagtcaccgccaggaccgtcatcagttcagtgtttctggtgcaaccagatgggtcactatgccagacagtgccctcagaatcctaccaacaccaactcagggcatgctaatggcagcactgctagaactcctactccagcggcagctcagtctctacattcccctgggaagaatataagggcaactcaaatatgcccggaagttaaccttagaattgaggaagttgacttcgtagccaaaccgatagtcctagactcgcaaagcttggacatcatcctagggatggattggttggctaagcacaaaggacagatagattgtgccgaaaagtccatcaccttgcaaggacctggaggaaagcaagtccgctttacctctaacacccctaccgcaagtcggtctatcctaacctgtttacaagtcacctccttggagtcgatgcccatagtctgtgaatatcccgacgtgtttccggaagaattaacgagtatgccaccagaccgagagattgagttcgccatagaactggcgccaggcaccgcaccaattgcaaaaagaccctaccgattggcagctaatgagttagcagaagttaaaagacaaattgaagaattggagagtaaaggttatgtgcgacctagctcatccccttggggagccccagtgcttctggttaagaaaaaggatggctctgagagaatggtaatcgactatagagccctgaatgaagtaactataaagaacaagtacccgttgccacggattgacgatttattcgatcaacttaaaggagcaagagttttctcaaaaattgacttgaggtcaggttaccaccaattgaaaatcagatctgaagatatcccgaagaccgctttctcaacgcgttatggtctatatgagttcacagtgatgtccttcggactcaccaatgctccagcattcttcatgaacttaatgaacaaaatcttcatggaatacctggaccagtttgtcgtggtgttcatcgatgacatcctgatatactccaagaatgaggaagaacatgctgaacacctgaggctgataatggaaaagctcagggatcatcaactattcgctaaattctcgaaatgcgaattctggttggatcgagtagcatttcttggacacgtgatctcctccaacagtgtcgaagtagatcccagcaaggttgaggctgtacttgcttggaacccgcccaagaatgtgtcagagattcgcagcttccttggcttagctggatattatcgaagattcattgaaggattctctaagctagccagacctatgaccgagctgttaaagaaggaaaagaaatttcaatggtctgcagcctgtgaagacagctttcaagaaatgaagaaaaggttgaccactgccccagttctcaccttgccagatatccgaaaggatttcgagatcttctgtgatgcatcaagacaaggcttaggatgtgtcctaatgcaagaacgaaaggttgtggcctatgcatccaggcagttcaggcctcatgaagtcaattatcccacccatgatctcgagttggcagccgtggttcatgctcttaagatctggaggcactatttaatcgggaacagatgtgaagtatacaccgatcacaaaagtcttaagtacatcttcactcagaccgagttaaatatgaggcagagaagatggctggaactaatcaaggattacgatcttggaattcattaccaccccggtaaagctaacgtggtcgctgatgcgctaagtcgcaaggcctattgcaatatagctcaaatacggcctgaccaagatcgcctgtgcagagaattggagaagttaaggctgaccgtggtacagtcaggtgtccctgccagcttgacagtgcagccaaccctagaatcgcaaatccgggaggctcagaaagatgacgaagggataaaagaattaataaaaagaatacaagagaagaaagacaccgatttctccatagacgaccaaggcacagtttggtgcggtccacgcatctgtgtaccggccaaaaaggagttaagagatctcatcctaaaagaagctcatgagtccgcctactccattcatccaggaagtacgaagatgtaccaagatatcaaggcatacttctggtgggctggaatgaagcgagatgtcacagaatactggaaatgggaagagatcggaatggatttcatcaccggtttgccaagaacccctagcgggtacgactccacctgggtaatcgtggaccgactcacgaaatcagctcatttcgtgccagtgaaaaccacctttgatggaaagaaactagcagaactctacatgacccatgtcgtgtgtagatttggctgtcccaagaagattgtgtcagaccgaagcactcagttcacctcaagttatcaggccagcattcagatgttgccgaatgaggcaatgttcggaagaaagtgccgcactcccttgtgctggaatgaggtgggcgaagcgctggtattcggtcccgacatacttaaggcagcaaaagaacaagttaagctgatccgagaacgtttaaagacagcgcagaaccgtcagaaggattacgctgacaatcggagacgtgaccttgagttcgaaaaaggagatcatgtgtacctgcgggtatcgcctctccgtggtatgaggaggtttgggatgtccggcaagttagcaccccgctgcatcggcccctacctcataactgccagacgtggcgaagtggcttatcagcttgagttacctgaaggtctcgcagatgtgcacaacgtgttccacgtatcccagttaaagaaatgtctccgtgttccagaagaacaagttcccctgggtaatatcgtgctggaaaagaatctgacctacaaggaaagaccgatcaaggttcttgaagaggcagaacgtcagactagaaggaagaccgtcaagttctacaaggtgcaatggagcaatcattctgaagatgaggcaacctgggagcgagaagatcttctccgcgccgagttcccggagctgctcccttag

SEQ ID NO: 13909 - DNA, 4026 bp, Oryza sativa
  Clone ID: TFbOSC900076j.C1.o3.np
atgccggtgaacttgtaggcacaaggcctatggtctgccgtggagccaggagacaacgaccgcgtcgaccgtcaagcgctcgcggcgatactccgcgcggtgccgcctgagatgctgtccaccctcgctatcaaggagacggtgcaggaagcatggcaggccatcaagatccggaggattggcgtgcggcgcgtgcgcgaggcgaatgagcagcagctgcggcgcgagttcgccgacatgtgtttcaaggacggggagtccgtggacgacttctcgctgcgactctgcggccccgccaacaatctccacacactcggtgacgaaatcactgaagcagaggtcgtcaagaagctgctgcatgtcgtgccggagaacttgcagcagatcgccatctcaatcgagacactgctcgaattgacgagatgtcccttgaagaggtgactggccgtctgcgttccgtcgagcagcgcaagctgcggaagggcaacggcgaccacgtcgatgccaacggccggctactctacacggaggaaaaatggctggctaagttccgtaagtctgcttctttgctggatggcggacaaagcgggagctcctcctctggcggcaatggcggccgccagggttgaggacgtgggaagaagaaaacaatggcgcttccaaagagacccagcccaagtcaaacgacgcgggccgcaatcctggaaattgcacctattgtggaaagcggggtcactgggccaaggactgccgcagcaagcccaagcctcaacaggcccatgtggcccaagaggacgatgaagggcccaccttgcttcttgctcgtgcagttcctgttccgccactgcctcgcgctacgccggcgaccccgccgcagtctaagccgctggaggttgtgcaagcaaaggtcttcgcgtcactcgacgacgcagcagagcgaagccagcggagatggatcctggacaccggcgccaccaaccacatgacggggtccagatctctcttcgccgagctggacacggcaatcactggcaccgtcaagttcggcgacggcttggtggtctccatcgagggacgcgacaccattctcttcgcttgcaagacaggcgagcaccgggcgctgaccggcgtctacttcatccctcgcctcacggccaacatcgttagtctcagacagatcgacgaagctgggagcaaggtgttgatttaccacgaggtgctgcggatttgggatccacaaggccgcctcctcgtcagggtagatcggggcgttacacgcctctacaccatcgacctcgatgttgatcgcccggtttgcctcgccgcacggagctcggaaccggcatggcgctggcatgcaaggtacggccacctcaacttccaggcgctgcgcaagctatcccagaagtcgatcgtgcgcggccttcccatgctggaccaggtgaacaaggtctgcgatgggtgcctcgtcgggaagcagtgacgcgcaagctttccgtcctgctccaagtaccgcgcgaccacgcacctcaacctcgtacatggtgatttgtgtggcccagttgaacctgcgacgcccgccggcaatcggtattttctccttttggttgatgatatgagccgctacatgtggttaacactgatcaggagcaaggacgaggcagcctctaccatcaagcacttccaggcacgcgccgaggtggaaagtggtcgtaagctgcatgtcctgcgcaccgaccgcggcggcgagttcaattctatcgagttcggcgaatactgcgttgatcgtggcgtccatcgacaacttacggcgccctactccccgcagtagaatggagcggtggagcaccgcaaccagaccatcatcgccaccgcaaggagcatgatgaaggccaaagggatgccgggcctcttctggggggaggccgtctccacagccgtcttcctcctcaaccgctcgccgacaaaatttctcgctaacaagacgccttaccgggcgtggtatggcgagcgccccgccgtccactttcttcgcacgttcggctgcatcggccacgtcaataatgacaagccggggctgaaaaagctcgacgaccggagcgccccgatagtcctgcttggctacgagcaggggtcaaaggcctacaggctctatgatccggttggtgaccgggtacatgtgtctcgtgacatcgtctttgacgaggacgctgcctggagctgggatgccgcgagcatgggctcgccgaataggagccgttcaccgtcgaacacgcggtgagcacgaccaaggaagaagtagtgacgcccgcaagctctcccccgcgatcgcaatcgccaccaacgccggtttcaccgactccagaacaaggtatgcaagcaacggaggcggaagtggagcacgcctcgcctccatcgcacgactccatcctcgacaccgacgccgaccccgagaaacgcgagccgcgctaccgcacgctcgacaacatcctcgggccagcttcaccgtccggcatggcgacgcgcctgctcgaacaactcgagctccatgccgtgagcgccgaggagccatcgtcgctggctgaggctgaggctgaggttgacccaaactggaagggggcgatggaagacgagatgaaatcgatcgaggagaacaatacttggagcctcactgatttacctgcagggcacagggcgatcggtctcaagtgggtttacaagttgaagcgagatgaacagggggctgtggtgtgccacaaggcgaggctcgttgcaaagggctacgtccagcgacagggggtggactttgatgaagtgttcactcctgttgctcgcctggagtcggtgcacttactcctcgccgttgctgcacatcaagcttgggaggtgcaccacatggacgtcaagtcagcgttcctcaacagtgagctccaggagatggtatttgtttagcaaccacccggcttcatcaacgccaacgatcaaggcaaagtgtacaagctccataaggtgttgtacggtctccggcaagctccttgagcgtggaacgccaagctagatagctccttgttgtcgctgggtttctgttgcagcagctcagaacatggagtctacacacgtgccaccgccggcaagcgactgatcgtcggtgttgatctcggaacactcaaatactacctcggcatctaagtgactcaacgcagtggctgcatcacgcttggccaatctgcgtacgccaccaagatattggagaaagctgggctccaagactgcaatccaagtcagactccgatggaggtatgtctcaaattgagtaagaactccgattctcctttgatggattcgactttctactgcatcctcgtcgggagtcttcgttacctcgtcaacacccgccccgacctggcatatgcaatcgggtatgtcagcagattcatggagactcctagagaagagcatctctctgctgtacggcgtatacagcgctatgtggccgggacgaggaactggggactcacttacctcggtgggaaggaagaaaagcctagtctgctgggttatagtgacagtgacctagcaggcgacactgacgatcgccggagcacctctggacaaatcttcttcaccggtggaagcccagtcacctggcaatcctccaagcaacgagtggtggtggctctgtcttcttgcgaagcagagtacattgctgctgcggtagcagcatgccagggagtgttgttggcgcgactcctgactgatgtgctggaggctgatgcgcctgctccaaaactgatggtggacaatcagtccacaatttctcttgtcaagaatcctgtgcatcacgaccggacgaagcatgttgacatcaaatttcattatctccgggagtgcgcagaacaaaagctaatcgaggttgcgttcgttggcaccgctgatcagcttggggatatcttcaccaagtcactcggcagaaccaggttccacgagctgtgttccaagattggtgtttctgatcttcgtcaaagg

SEQ ID NO: 13910 - DNA, 841 bp, Oryza sativa
  Clone ID: TFbOSC33028j.C1.o2.np
gtaggcgctctcgcggacccaccgcgccaccgcgtccgcggccgtccgccgccgcccggcgctgccccggtagatgttctccccatacggcccacgggagtgcttgagcgtgcagtcgtgggacctcttctcgccgtacctccgcgcgtacgcggcgagggtgccgtcccaggagagcttgccgacaccgacctccgcgcgcgcggcgttgtggggttgcaggaagtcgtgcggcgagttcgagaggaggtggctgcgacgccgaggatggcgacggcacggcctaccgacgcacgacagaggagggagaggcggctggaggcggccggcggcacgagagagagcggacgacggcggggaggggtggtgtggccacggggagacgcgggaggaggctaaaacgagagaacggaaggagggggttccattttataggcgcggggagggagctggccacgggagagggcggaacggaggcgggaatggcggccggcggccatggaaggtggccggggatggcgcggctgttccgggcgatcggattggagggaggaacggcgctagggttcacaggagagagaggaaggaggccggcggctggaggtcggggacgcctgacgggcgggacccacgtgggaggtgcgcggtcaacgcgcgtgcggcgcgcgtgcgcgggagggctgcggctcggcttgggccggggcaggcccaggcgggaggaggagaggagggagctgggccgaggggaggggagaggggtggcccgagagaaggaagggagggggacggaatcttgcacccaagattcgagaaggctagcaagaagataggtgggcagtct

SEQ ID NO: 13911 - DNA, 2179 bp, Oryza sativa
  Clone ID: TFbOSC4448j.C1.o1.fg
agagaagttggatttgcttcagtgcactgatcaggagaaagtctcatttgcatcacaccagttgcatggccctgcctctgaatggtgggatcacttccgcttgaataggactactgctgaacctatcacttggcttgaattcaccgctgctttccggacgacgcatataccatcgggagtggtgtctctcaagaagaaggaattcaggtcgctcactcagggttctcgctctgtcactgagtatctgcacaagttcaatcgtttggctcgttatgctccggaaaatgtgcgcaatgatgaagagcgccaggagaagtttttggaaggacttaatgatgagctttcttacccactcatgacgggggaatatcatgatttccagaagttggtggataaggctattcgccaggaagacaagtacaaccgcatggagcaaaagaaacgccggattgctcaattcaaggcacaacaggggaatagtcaaaggccgcgtcttactttgggaccccagtccatgccacagggaggttcttcgtctgttgttcgtccgcagcgtcagatcttcaacaacaatactggcaacaacatccgcaatcaagctccacgccctgttgcggttttgacacagcaacaacctgctaagagggagcaaggcagcaagcccgtggtgtgtttcaactgtggagacctaggacattacgctgataagtgtccgaagccccgacgcgtgaaggttgtccctacccagagcaactctaccgtaccagcatcaaaggctcgtgtcaatcatgttgctgctgcagaagctcaagatgctccagatgtgattttgggtacgttccttgttaacttagttcctgcaacagtgcttttcgattctggtgctacacattcattcttatctatgagttttgcgggaaatcatgggatggaagtagaagatcttagacgtcctttgatggttagtaccccaagtaatcaagcactctctttgcaacgtagcccctctgtcagaatagaaattcaaggagtaccatttctggccaatcttatcctgttagaatccaaagaccttgatgtcatcctagggatggactggttagccagacataaaggtgtgatagactgtgccaacagaaaagtaactctcaccagcaatgatggtcgcgttgtaacagttcatgcattgttttttgagtctttaaggtcaagattgaaccaaatatactttggaaaagattcctatagtccgggagtatcccaatgtgttcccagacgatttacctgggtatccgccttaaaaggatatagagttcagaatagatttggtaccagaaccactccgatccataagagaccttatagaatggcagccaatgagttggcagaagtcaagaggcaagtagacgatttgcttcagaaaggatacatcagaccgagttcatctccatggggagctccagttatttttgtggaaaagaaagaccatacccagaggatgtgtgtggactatcgtgcactaaatgatgtgactatcaagaataagtatccgctacctagaattgatgatttgtttgatcagcttaaaggtgccaccgttttctccaagatagatcttcggtcagggtatcaccagttgaggattaaagaggaagatatacctaagccagcttttaccactagtaaggtgtttatggaatacctagacaagtttgtggtggtctttattgatgacattcttatctactcccgaaccaaagaagagcatgaagaacatcttcgccttgcactagagaagctacaagaacatcaattgtatgctaagtttagtaagtgtgaattttggttgtctgaagtgaagttcctgggtcacgtcttctcagcagagagtgccgtcgatcctagtaatgtggaatccgtaaccaactggaaacaaccgaagatagtttcagagattcgcagtttcctaggcctcgcaggatattatcggagatttatagagaatttctccaagattgataagcccatgacacggctgcttcagaaagaggtggagtacaagtggtcagaagaatgtgtcacgaccggaaataacccaacgggctttcctgacgtgcgtgcattaatccttgtcccaggaggcaaggtacaccaaaagttgatacaattcagagtttaa

SEQ ID NO: 13912 - DNA, 4155 bp, Oryza sativa
  Clone ID: TFbOSC900056j.C1.o5.gm
atggaccaataccgaccactggtcgaagatctcaaactgctgtggaagaaagaaggcgtcctccccgtgtgggatgaggacaaacaggggatgctggtagcggcgagcgtcagcctcgtggacatcgagcaacctctgagtttcgatggcgtggggacgacgcgcatcgagggcttggtggaggcggcgggctcggcgagggaggttgatggtggcgaaagaggagttggcggtggaagcgggctcggtggagagtgtcgccggtcggtggagacgccggtcgggcaggtggcgtcgggcgtcggagaggaggaagcgacgacaacgaggaaggacgttaccgggctcgcggcgccgggctcggtggaggcggcggcctcgggctcagcgaggaaggcggcggcgccgggctcggtggagggcgtcgccggggacccccggtgtctcctctacccgccgccaccctcgctttcgcctctcgtcgtcggaaacgccctagcgccgtgtgccctagcgccgccgtcgccgccgtcgctccagccgtccttcgccgccgttccggtcgtcgccgtcgctcgggaagaccgtcgtcgtggtcgccaagtcgtcgccgtcctcgtccgccccttcgccgtcgctgtagaccgccggagcaccgtcgccgtcgtcaagccgaagagcgccgccgcttcttcttcgttgccgtcgccgtccgttcctcttccgccgctcttttggtcaccgcgctgccgttcgccggcgagcgtgcgccgtccgagccgccgagccgccgccgccggtggtgacgtcaccgctgacgtcatcgtcgccctctcccggggtgattatgatccaggaaaggtgcgctgcagtggattgtgttatgcaaggggtattgtcacaactcctttccgaggtaccgtggtgatgccgcgctacaagcctgagtacttgtttggtgttgagggttttgtccaggagttgagtacgatgtcctttgtcattggatttgggactgcccctttttatgctcagattcctcatgatcgtcatgaagagaagtgccgagtcaaagtcactttgaacagtaatagtgaagatatcccctcagtgatgttcgaagctggaggaagaaactacatccatgcatgtcaggaggtggcaaggatcgccataggagagctccgtgatcgctacagtgatcagttggccgacactgagtatcgctaccatcctcgccaaccacagggaagtgaccgtggcagctaccttgagactgaaggaattgagaatgatgctaccacaaggcatttggtcgagatgctgtgggctatggatgaaagtcgtgcggagactgtgttagcggctcaagatcgtgaagaccggaatcgtggtaagatttgcaagttagaagacaaggtggatcgtttggagagggaactagctgcattgaagggagaagcaccgccgcagaaggctaggattcgtctcaccgcaaggaagagagctctatttgtccctcgctatcaattggcgccaaaggttcgtgtggtggagaaagaagttgccccaaccctagcagatcctccggtcatcatcataagtgatgatgaagaagaagaatccaagcgcaaccattccaagattgagtgggaagctactcaagatgatgaagacgagccgaacgagccttcaatcgacctccgatgctcggaagaactagacaacgggaatggccccaacaacaacaataacaataacaatgaagggaacccaacccttgctcaagttcttgctcaacagactcagttaatgaacatgatgatgcagcaacttcagaatcagcagaaccaaggaaataaccatgcacctccccagaacaagttagcagaatttcttcgtgtgaggccgcctattttctctagtacctctaatcctgttgaagctggtgattggttgcatgccatagagaagaagttggatttgcttcagtgcactgatcaggagaaggtctcatttgcatcacatcagctgcatggccctgcttctgaatggtgggatcacttccgcctgaaccggactactgctgaacctatcacttggcttgaattcaccgctgctttccggaagacgcatataccatcgggagtggtgtctctcaagaagaaggagttcaggtcgctcacccagggatctcgctctgttacggagtatttgcacgagttcaatcgtctggctcgttatgctccggaagatgtgcgcaatgatgaagagcgtcaagagaagttcttggaaggacttaatgatgagctttcttacccactcatgactggagattattctgatttccagaagttggtggataaggctattcgtcaggaggacaaaaacaaccgcatggagcagaagaaacgccggattgctcaattcaagacacaacaggggaataatcagaagccgcgtcttactttaggaccccagaccatgccacatggaggttcttcatctgttgtacgtccgcagcgtcagttcttcaacaacaatgctggcaacaacatctgcaatcaagctccacgtcctgttgcagctccaacacagcaacaaccttccaagagggagcaaggcagcaaacccgtggtgtgtttcaactgtggagacctaggacattacgctgacaagtgtccgaagccccgacgtgtgaaggttgtccctacccagagcaactctaccgtaccagcgtcaaaggctcgtgtcaatcatgtcgctgctgcagaagctcaagatgctccagatgtgattttggtccgggagtatcccgatgtgttcccagatgatttacctgccaatgaattggcagaagtcaagaggcaagtagatgatttgcttcagaaaggatacatcagaccaagtttgtcaccatggggagctccggttatttttgtggaaaagaaagaccatacccagagaatgtgtgtggactatcgtgcactaaatgatgtgactatcaagaataagtatccactacccagaattgatgatttgtttgatcagcttaaaggtgccactgttttctccaagatagatcttcgatcaggatatcaccaattgagaatcaaagaggaagatatacctaagacagcttttaccactaggtatgggttgttcgaatgtactgttatgtcttttggacttaccaatgcccctgctttcttcatgaacttgatgaataaggtgtttatggaatacctagacaagttcgtggtggtctttattgatgatattcttatctactctcgaaccaaagaagagcatgaagaacatcttcgccttgcattggagaagttacgagaacatcaactatatgctaagtttagcaagtgtgaattctggttgtctgaagtgaagttccttggtcacgtcatctcagccggtggagttgccgttgatcctagtaatgtggaatccgtaaccaactggaaacaaccaaagacagtttcagagattcgcagtttcctaggcctcgcaggatattaccggaggtttatagagaatttttccaagattgctaagcccatgacacggctgcttcagaaagatgtgaagtacaagtggtcggaagaatgtgagcagagttttcaagagttgaagaatcgcttgatatcagctcctattttgattttgcctgatccaaagaagggtttccaggtgtattgtgatgcatccaaacttgggttaagttgtgttctgatgcaagatgggaagccgtccttcgccgccgttccggtcgtcgccgtcgctcgggaagaccgtcgtcgtggtcgccaagtcgtcgccgtcctcgtccgccccttcgccgtcactgtagaccgccggagcaccgtcgccgtcgtcaagccgaagagcgccgccgcttcttcttcgttgccgtcgccgtccgttcctcttccgccgctcttttggtcaccgcgctgccgttcgccggcgagcgtgcaccgtccgagccgccgagccgccgccgccggtggtgacgtcaccgctgacgtcatcgtcgccctctcccgtgagccggcgggcccgcccgccgccctcgctgacgggtgggtcccacctgtcatctccctcctcgcgccgcgccgccgcccgcccgtgccctag

SEQ ID NO: 13913 - DNA, 3237 bp, Oryza sativa
  Clone ID: TFbOSC900175j.C1.o11.fg
atggatgaagtcgggggtcgatggacattctccagggcaaatgaaggctacacgagctgcggcccgatgccgcgctacaagcctgagtacttgtttggtgttgaggggtttgtccaggagttgcgtacgatgtcctttgtcataggatttgggactgcccctttttatgcccagattcctcatgatcgtcacgaagaaaagtgccgagtcaaagtcaccctaaacagtaatagtgaagatatcccctcagtgatgttcgaagctggaggaagaaactacattcatgcatgtcaggaggtggcaaggatcgccataggagagctccgtgatcgctacagtgatcagttggccgacactgagtatcgctaccatccttgccaaccccagggaagtgaccgtggcagttaccttgagactgagggaattgagaatgatgctaccacaaggcatttggttgagatgctgtgggctatggatgaaacccgtgcggagattgtgttagcagctcaagatcgtgaagaccggaatcgtggtaagatttgcaagctagaggacaaagtggattgtttggagaaggaactagccgcattgaagggagaagcaccaccgcagaaggccaggattcgtcttaccgcaaggaagagagctctatttgtccctcgctaccaattggcgccaaaagtccgtgtggtggagaaagaagttaccccagccctagcggatcctccgatggtgctcactcgcagcaacgggaatggccccaataacaacaacaataacaacaacaatggagagaatcccacacttgcccaagtcctggctcaacaggcacagcttatgaacatgatgatgcagcaacttcagaaccagcagaaccagctcaaccaagggaacaacaatgctccaccgccgcagaacaagttagcagaatttcttcgttgcactgatcaggagaaagtctcatttgcatcacaccagttgcatggccctgcctctgaatggtgggatcacttccgcttgaataggactactgctgaacctatcacttggcttgaattcaccgctgctttccggaagacgcatataccatcgggagtggtgtctctcaagaagaaggaattcaggtcgctcactcagggttctcgctctgtcactgagtatctgcacgagttcaatcgtctggctcgttatgctccggaagatgtgcgcaatgatgaagagcgccaggagaagttcttggaaggacttaatgatgagctttcttacccactcatgacgggggaatatcatgatttccagaagttggtggataaggctattcgccaggaagacaagtacaaccgcatggagcaaaagaaacgccggattgctcaattcaaggcacaacaggggaatagtcaaaggccgcgtcttactttgggaccccagtccatgccacagggaggttcttcgtctgttgttcgtccgcagcgtcagatcttcaacaacaatactggcaacaacatccgcaatcaagctccacgccctgttgcggttttgacacagcaacaacctgctaagagggagcaaggcagcaagcccgtggtgtgtttcaactgtggagacctaggacattacgctgataagtgtccgaagccccgacgcgtgaaggttgtccctacccagagcaactctaccgtaccagcatcaaaggctcgtgtcaatcatgttgctgctgcagaagctcaagatgctccagatgtgattttgggtacgttccttgttaacttagttcctgcaacagtgcttttcgattctggtgctacacattcattcttatctatgagttttgcgggaaatcatgggatggaagtagaagatcttagacgtcctttgatggttagtaccccaagtaatcaagcactctctttgcaacgtagcccctctgtcagaatagaaattcaaggagtaccatttctggccaatcttatcctgttagaatccaaagaccttgatgtcatcctagggatggactggttagccagacataaaggtgtgatagactgtgccaacagaaaagtaactctcaccagcaatgatggtcgcgttgtaactgttcatgcattgtcttctgagtctttaaggtcaagactgaaccaaataactttggaagagattcctatagtccgggagtatcccgatgtgttcccagacgatttacctggtatgccgcctaaaagggatatagagttcagaatagatttggtaccaggaacaactccgatccataagagaccttatagaatggcagccaatgagttggcagaagtcaagaggcaagtagacgatttgcttcagaaaggatacatcagaccgagttcatctccatggggagctccagttatttttgtggaaaagaaagaccatacccagaggatgtgtgtggactatcgtgcactaaatgatgtgactatcaagaataagtatccgctacctagaattgatgatttgtttgatcagcttaaaggtgccaccgttttctccaagatagatcttcggtcagggtatcaccagttgaggattaaagaggaagatatacctaagacagcttttaccactaggtatgggttgtttgaatgtactgttatgtcttttggacttaccaatgcccccgctttcttcatgaacttgatgaataaggtgtttatggaatacctagacaagtttgtggtggtctttattgatgacattcttatctactcccgaaccaaagaagagcatgaagaacatcttcgccttgcactagagaagctacaagaacatcaattgtatgctaagtttagaggagttgccgtcgatcctagtaatgtggaatccgtaaccaactggaaacaaccgaagatagtttcagagattcgcagtttcctaggcctcgcaggatattatcggagatttatagagaatttctccaagattgataagcccatgacacggctgcttcagaaagaggtggagtacaagtggtcagaagaatgtgtcacgaccggaaataacccaacgggctttcctgacgtgcgtgcattaatccttgtcccaggaggcaagactgagccacaaactaagccttacccactagacatgtggaagtacggtagtgctttgcaacagaggcccgaagaccggtccttatatggccgaggtgctaccatcaaaaccatgcaccccgagcccagcctaaaaccattttggggattttga

SEQ ID NO: 13914 - DNA, 379 bp, Oryza sativa
  Clone ID: TFbOSC1516j.C1.o2.np
atgaagagaatagtgggaagtaaactgaatgtaaagaaagtgaatccgagctgtctgttcgtgggagctattcccagttatgaaccaagtgatatgttcgaagatagtcttgaagtgggtaacttgtatgaggttgacgccaaagatatgaattatgagaagttctggaactgaagtcccatcttcaagtgccacaatccaatcgaagtcagctagaggtgcaaccagggaaaagtcaggtgaagagaagattccatctgcaacaggagattgagccaagcagtccagagtggagaagttttgctaggcaagtttgttataaaagatgcgacggaagaagtcggacaagaagagaagaccgcccaacctatcttcttgc

SEQ ID NO: 13915 - DNA, 4346 bp, Oryza sativa
  Clone ID: TFbOSC400773j.C1.o40.np
atgggggaaaatcaaggaattgaacaggtgatgggaaaattggtagatatgcttgcaaagaaactcagtgagacctctactactatcaatgcaattgttcctcatgctgaatcagtacaaaaaattgagttgatgcaaaatgatattaagttggagggtgtcaaaaattatttgagttggacaaggagagcaatgttgattttaaagacaaaggggttagaaggatatgtcataggagaagtgaaggagcctgagagcacaagtgtagaatggaaaacttgaagtactaccaactctttagtggtagcgtggtagttgacctcactaatccctgctattgctacaactgttgagaccatctctagtgcgagtgagatgtggaaaactctcactaatctatactcagaagaaggtaatatgatgctaatgatggtggcacaagagaagataagtgctttgaaacagggggagcgcctatggcagaatatgtcgcagagttgaagtgtttgtgatttgatttagattattatgatcctcttgggttagagcattctaattacatagcaaaaatgaagaaatgggtagagcgtaaaagggtccttgagtttttgaagggcttaaatccggagttcaaaggaagaagagatgcaatgtttcaccaaaccactcttcctaccttagatgtggctattgcaactatggcacaagaggagcttaagaagaaactatttcctatgccacatcgtcttcatcaagtcccacctatgcaattgtacaaggtaataaaactagagagtgctttaattgtggtgaaatggggcatcttatgtgtgattgtcgtgcttctcacaagcctagttatggaagaggaagaaatggtgatagaggaggagcaagaggtggaagaggttatgaaagtagagataacagaggtagaggctatgagtacagaggtgatcacaaagctaatgtggtcactcttgaagggggttcttctgaacctataaatgttgatgttaccaactttgttcattccacctcagataattcaaatcaagcatttatgtccatcaatggttcttatccaaattggatattagactctagtgcattacacatgtaacgagtatgcgtggggcatttgcatcatataaaccatacccatttacacgtaaagaaacaattcaaattgccgatggaacatcatgcccacttaagggagagggtacagtgcagtgtactccttcaatcactttatcatcagtgttatatatttcttcctttccagtgaatttggtttcaaaaagttttcttgttgatcatatggactgtcaagtctcccttgatcgtgagaattgtttaattcaggagaggcaaacagggaagaaacttgggattggtgtcaggcatgatggactttcgtatttggatcggggaaggactaatgaagccatgtgtctagctttgatggcttccacaagtgaagaagagctaaggtgttatttttgcactgtcgattgggacatatatcttttgaaattataagtaaaatatttccagtagagttcagtagagtggataaacataagttagtatgtgatgcttgtgagtatgggaaacatacaaaaatgtcatatgtgagtagaggactccgaagtatgttgccctttatgctaattcactcagatatttggacctcacctgtggtttctatgagtggaatgaagtattttgtcacctttattgattgctactctcgcatgacatggatatatcttatgaggcacaaggacgaggtgcttaaatgcttccagaatttttatgcttacattaaaaatcattttaatgctcgggtttagtttattagaactgacaatggaggggagtatataaataagaatttagtaactttctttcatcagaaggaatattacatcaaacttcttgtcctgatactcctccacaaaatggggtggctgagaagaaaaatcatcatcatttggagacagctcgttcattgatgtatactatgaatgtacctaaattcttgtggagtgtggctgtaatggcagcaacatatcttatcaatcgtacaccatcgggaatacttgggatgaagacaccatatgagatgatatttcacaagaatgtatttgttcttccaccaaaggtgtttggttgcacatgctttgtcagaaacaacagaccttctgttgcaaaacttgatcttcataggttattcctctggccagaaggggtataagtgttggagtccatcagaacaatgaacatttgtaagtacggatgttacttttagagaatttgttccattttatgatgagaaaatagatttaagttcttttttttgttgatcttgataattcaactagtgtaatcatgataaacaaagggaggataaaataatgggttccaaggaagatgaacaagcgaaggagaaaaaagttgtgattggccaaatcccagttgatatgaatgatcctatataagagcaagagttgagaaagccacatgaagaggaaaatcttcaagtttacaaaaggagggcaagatttccagtgatccaataagttgtagaggataattaagtagtgggagatgcaagtcatgtgcaagtgcctttggagttagggggagaagaggatgaagttagagaagaagaatctaacttaccaattgccgtcagaaagggtgtaaaaagcaatgtaggtaaacctccctaagatatggttttgaagctcaagatgagggtaatgatgagaataacatatccaactatatttcttatgactctttgtcatctacatataaggcctttgtagcatcggtagatttagtgggaattctaaagaattggagagaagcaaagcaagatccaaaatgacatcaaactatgctggatgatctagaggctcttgagaagaacaaaacatggaatcttgtaccatttcctgaagggaagaaagttgtcaactgtaagtgggtatatacaataaagcaaaaccttaatggaaagaaggaaaggtagaaagcaaggcttgttgctaaggggtatagtcaaacatatggaattgattatgatgaaacttgtacaactaattttgattggtcactgcatcaattagatgtcaaaaatgcatttttacatggagaccttcaagaagtggtgtatatggatatcccacctggatttagcacttcacaaactgaaggaaaaaagtgttgaggttgaagaaatctttatatggtctcaaacaatcaccaggagaatggtttgattgttttcaacgtgtaatgtgtggcatgggttataagcaatgtaatggggatcatacatcattctatcatcataagggatgtcacgctactatctttgccgtgtatgtggatgacatgattatcattggggatgattctatagagatagcaagattaaaagaaaatctaagtaaggaatttgaacttaagaatttgggtcagctgaaatacttaggcattgagattgcaagatctcctagagggatagtactttcacaatgaaagtatgcgttagatctactcagtgacacaggtatgcttggttgtcgaccagcctctacacaaattgaacaaaaccataagttgtgtgctgaattaggagacccagtaaataaagagagttatcaaagacttgtgggacaggtgatatacttgtgtcatacaagacctgatataacccatgctgtaagtgtgataagtcagtatatgcataatcctagaagtggtcacatggatgctgtgtatagaattttgagatatttgaagggaagcctaggtaagggcttatggttcaagaaaattgacatcttgatgtggagggatactgtgatgcagatcagggcaactgtcttgatgatagaaggtcaatatcaggctattgtgtatttgttcgtggcaatttagtatcttggagaagcaagaaacaattggtggtgtctcgttcaactgctgaggcagaatacaagtcaatgtcgattagtttgagcgagttgttatgggtaagagatcttctaactgaattgaagttgatgataaacattcccatgaagttatggtgcgacagcaaatcagccattaatattgctaacaattcagtccaacatgatcgaacaaaacatgtggagaccgatcgcttctttattaaagaaaggatagatgacaaaaccttgaagttaaactttgtgaattctagagaacaagtggttgattgtttaacgaaggctttaggtgttaaatagtgtatgtcgtcatgtagcgagatgggcatgatagatatttatcgcccatct

SEQ ID NO: 13916 - DNA, 5133 bp, Oryza sativa
  Clone ID: TFbOSC32500j.C1.o1.np
ctcctggtttggaatggtatattcctggtttggagatagaactgtgtagccaggaatggttgttcagaaagtttgggcctatgcaacgggatgccgcgcttcaagcctgagtacttgttcggtgttgagggatttgtccaggagctgcgtacgatgtcctttaccataggattcgggactgcccctttgtatgcccagattcctcatgatcgtgataaagagaagtgctgtgtcaaggtcaccttgaatagtgatcgtgaagacctcccatcggtgatcttcgaggctggagggggaagctatcctcatgcttgtcaggaggtggcaaggatcgccataggagagctctggaccgttacaatgatctgttggccgacactgagtatcgctaccatcctcatcagccccagggaagggaccgtgccagctatgttgaccctgaaggaattgagaatgatgctagcacaagacatttggtcgagatgctgtgggccatggatgagtcccacgctgaagtcgtgtcagctactcaagctcgtgaagaccggaaccatggtaagatctacaagctggaggacaaggttgatcgtctggagaaggaactgaccgaattgaagggagaagcgccaccacagaaggccagggttcgtcttaccgcaaggaagagagctctttttattccccgctaccagttggtgcccaagatggtgaacacttgcagcaatggaaatgggcccaacaacaacaacaacaacaacaaatgagagattcccacgcttgcccaagtcctagctcaacaggcccaactcatgaacatgatgatgcaacaactccagaaccaacagaactaggggaacaatcacgctcctccccagaacaagttagcagaatttcttcgtgtgaggccgcccactttttccagcactaccaatccggttgaggctggtgattggctgcacgtcatagaaaagaagctggacctgcttcagggcactaaccaagaaaaagtctcctttgcttcacatcagcttcatggccctgcctctaagtggtgggatcacttccgtctcaacagggctactgctgaaccaatcacttggcttgagttcactgccgctttcaggaagactcacgtaccatcgagagtggtgtctctcaagaagaaggagttcagggcgctcactcagggatcccgttctgtcaccaagtacatgcatgaattcaatcgtctggcccgttatgctccggaggatgtgtgcacagatgaagagcgtcaagagaagttcttggaaggactgaatgatgagctttcttaccctctgatgactagggattattctgatttccagaagttggtggataaggccattcgccaggaggataagtacaaccgaatggaacagaagaaacgcaggattgctcacttcaaagctcagcagaggaatagtcagaggtcgcgtctcactatgggacctcaggcagtgtcacagggaggatcttcgtctgttgttcgtccacagcgtcagttcttcaacaacaatgctggcaataacaaccgcaaccaagctccacgccctgttgcaactccagtccagcaccagcctgtcaagagggagcaaggaaacaagccaggggtgtgcttcaactgtggtgaagcaggtcattattctgacaagtgtccgaagcctcgacgtgtgaagattgttcctgtgcagaataactccaatgcaccaacgtcaaaggctcgtgtcaatcatgttgctgctgcagaagcccaaggtgctccagatgtgattttgggtatgtttcctgttaactcagttcctgcaacagtgcttttcgattctggtgctacacattcttttttgtctatgagttttgcgggaaatcatgggatggagatggaagatcttagacgtcctttgatggttagtaccctagtaaccaaggactctcatcacaacgtagcccttctgtcagaatagagattcaaggtgttccatttctggccaactttattttgttagaatccaaagaccttgatgtcatcctagggatggactggttagctagatacaaaggtgtgatagactgtgacaatagtaaagtaactctcaccagcaatgatggtcaagttgtaactgttcatgcattgcctactgaacctttaaggtcaagtttgaaccaaataacattggaagagattcccatagtacgggactacccagatgtgttcccggatgatttacctggtatgccgcctaagagagatatataattcagaatagatctggtaccagggacaaccccgatccataagagaccttatagaatggcagccaatgaattagcagagggggatcaagagacaagtagatgatttgcttcagaaaggatacattagaccaagttcatctccatggggagctccagttatttttgtggagaagaaagatcatacccagaggatgtgtgtggattatcgtgcactgaataatgtgaccatcaagaataagtacccaatgcctagaattgatgatttgtttgatcagcttaaaggtgccaccgttttctccaagatcgatcttcgatcaggatatcaccagttgaggattaaagaggaagatatacctaagacggcttttaccactcagtatgggttatttgaatgtattgtcatgtctttcagacttaccaatgcccctgctttcttcatgaacttgatgaataaggtgtttatggaatacctggataagttcgtggtggtctttattgatgacattcttatctactcccgaaccaaagaagagcatgaagaacatcttcgtcttgcactagagaagctacgagaacatcagctttttgccaagtttagcaaatatgaattttggttgtctgaagtaaagtttcttgggcacgtcatctcagccagaggagttgccgtcgaccctagtaatgtggaatccgtaactaattggaaacaaccgaatacagtttcagagattcgtagtttcctgggtcttgcaggctattaccggaggttcatagagaatttttccaagattgctaagcacatgacacgcctgcttcagaaagacgtgaagtacaagtggtcaaaagaatgtgagcagagctttcaagagttgaaaaatcgcttaatatcagcacccattttgattttgccggatccaaagatgggtttccaagtgtattgcgatgcatctaagcttgggttaggttgtgttctgatgtaagatgggaaggtggttgcctacgcatctcgtcagttatgtccccatgagaagaattaccctacccatgatcttgagttagctgcagtggttcatgccttgaagatttggcgtcactatctctttggtactcatacggaggtgtacacggatcacaagagtttgaagtatatcttcacccagccagatttgaatatgagacagcgaatatggttggaattaattaaggattatgacatgggaattcattatcacccgggaaaggctaatgttgtagcagatgctctcagcaggaaaggcaattgcaatgctacggaaggacgacagttgccatgggagttatgcaaggaatttgaaagactgaatttgggaattgtcagtagaggttttgttgcagctttagaagcgaagtccacactcattgattagtgattaggttagagaagctcaaaccaatgatcctgatatccaagaaatcaagaagaatatgagaagaggaaaggctatcggttatttggaagatgagcaaggaactatatggttgggtgagagaatttgtgtcccagacaacaaggagttgaagggtacagtcctgaaggaagctcatgacactttatactccattcaccctggtagtaccaagatgtaccaagatctcatggagaaattttggtgggcgagtaggaagcgtgagatagcggagtatgtagctgtgtgtgatgtatgtcagcgagtcaaggcagaacatcagaaacccgcaggtttgctgcagcctttaaagataccagaatggaagtgggaggaaattgggatggatttcatcactggtctgcccagaatgtcatctggccatgattctatttgggtgatagtcgacaggcttacaaaagttgctcattgcatccctgtgaggacaacatattccggaaatcgtttggcagaattgtatatggcaaggattgtgtgtttgcatggtgttcctaagaaaatagtatccgatcaagcgagccagtttacttcaaagttctggaagaagcttcttgaagagatggcttctaagctgaatttcagtacctcatatcatccgcaaacagacggacaaactgaaagggtaaatcagattttggaagacatgttgagagcttgtgttttagacttcgatggaagttgttataagaatttgccttacgcagaattctcgtacaacaacagttaccaagctagtcttcaaatggctccttatgaagcactgtatggtcggaagtgccgcactccacttttgtgggatcaaacgggagaacgtcaggtttacgggactgatattctgagggaagcagaagagaaggtaaagatcattcaagaaagattacgtatagcccagtgtcgtcataagagatatgctgacaatcgccgcagggatctaagttttgagaaaggagatcatgtgtaccttcgtgtcacgcctcttcggggagtttatcgttttcacaccaaagggaaattggcaccgcgttttgtgggaccatataagattgtcagtagaagaggtgaggtcgcctatcagttggagttacctcaatccttggcaggtgttcataatgtgttccatgtgtcacagctaaaatagtgtttgagggtacccactgaagaagctaatcctgagcagatagaaatccaggaggatctgacttatgttgagaaaccaatccgtatcttggagacagatgagagaagaaccaggaatcgagttatccgtttctgcaaggtccaatggagcaatcactcggaagaagaagctacctgggaacgagaagatgaattaaagtcagctcatccgcatctcttcgccagctcttccgaatctcaaggacgagattctgtt

SEQ ID NO: 13917 - DNA, 2643 bp, Oryza sativa
  Clone ID: TFbOSC13800j.C1.o1.fg
atggaggcagaagactggctacgcatcatagagaagaaactgactcttgtcagggtacgcgaaaccgacaaagtaatcttcgcagtaaaccaactggaaggacccgctagtgattggtgggacacctacaaggaagctcgggaaaacgatgctggagaacccacttgggaggagttcactgcagcatttcgcgagaacttcgtacctgctgcagtgatgcgcatgaagaagaacgagtttagatggctgcggcaagggaatacaacggtgcaagaatatctgaacaagtttactcagttggcccgctatgcaattggagacctagcggatgaagaagaaaagatcgacaagttcatagaagggctgaatgatgaattgcgtggacctatgatcgggcaggatcacgagagtttccagagcctgatcaacaaagtcgtcaggctagagaacgatcaaaggacggtggaacacaaccgcaagaggaggcttgctatgagtcgcctacctcagatagtgcctcagcgactcaagggagccacttcatccggatggaagccccctatcgtggcaaccaaccgtcccgctgcacctagcaacttcaacaggccagttgcaattcagaaccgcacccctacaccaactttggctgcccctggagccaagatgaatgtgaactgcttcaattgcggggggtatgggcactacgccaacaactgccctcatccacgcaagactcctgtccggaccggcacgaatgcaatgactgttcgtggcactactacccctgttaccgggcgaggtctattcaagactccgcaatctaacaggaccgccactggacttgggcgcggacaagtgaaccatgtccgagctgaagaggcccaggaagatcagggcatactcatgggtatgttctctatcaattctaccccggttaaagttctcttcgattctggtgcatcgcattcatttatatctctgaaggctagtcaaaagcacaacttaaccctagtgggacttagaaagcctatgatagtacactcacctgggggcgagataactgtgagtcatgcttgcatagacgtaccaattcgtcttagggacgtggtgtttccctccaatcttatgatcttaatacctcagaccctagatgtcatactgggcatggattggttaacaaagaatagaggtgtaattgactgtgggcgtagagaggtgaccttaaccacaccctggggatcggatatgagagcaaccatggatcaagatcctaggctaaccgaacgtgccggaggtatatttaccatgctacccctaaagggaatgcctgtagtgcagcgatttcctgatgtgttcccagaagatttacctggaatgccaccagatcgtgacataaagttcattattgacctgatacctggaaccgcccccatatccaagagaccatatcggatgccggttaatgagttagaagaacttaaaaagcaaattagggagttgcaagaaaagggatttgtacgccccagttcgtcaccttggggagccccagtgctattcgtcaagaagaaagatggtagcatgagaatgtgtgtggactaccgatcactgaacgaagtaactattaagaacaagtacctactaccaaggattgatgatctcttcgatcaactcaaaggagctaaggtgttttcaaagatcgacattcgatcaggataccaccaactgaagattaggaccaaggatattcccaagaccgcgttttcaacacactatggattgtatgagttcacagtgatgtcatttggtctaaccaatgccccagcctacttcatgaatcttatgaacaaaataaacaccctggacattcaacctcttttgagaacccaaatagaagaagcccagaaggacaacgaggaaatccgagagttgaaggaacgcttagctgcaggacgtgcaaaggaattttcaatcgacgaaaaagatgttctatggtataaaaagagaatttacgtacccgaacagggtggactgaggggattaattttaaaggaagctcacgaatcggcatactcattgcaccccggaagtacgaagatgtaccaagatctgaaggaaggatactggtggcccaacatgaagagagatgtggcagaatacgtagcactctgtgacgtatgccaaaaagtgaaggctgagcatcagcgaccggcaggcttgctgcaaccccttaggattcctgaatggaaatgggatgagatagtgtgtcttcatggtatacctaagaggattatatccgatcgaggcacacagtttacctcgcatttctgggaaaaagtacatgaagccctaggaagttatcttgcttttagcacagcttatcatccacagacagatggccagacggagagaaccaaccaggtactggaggacatgctgagagcttgtgcgttggattttagcaaagactgggagaggtgtttgccctacgccgagttctcctacaacaacagctttcaagcaagcctgaagatgtcccccaatgaagcattgtttggtcgacgatgccggacgccgctgatgtggtctgagacaggtgaacgggcggtatttggacctgacattatcaatgaggccgaagaaaag

SEQ ID NO: 13918 - DNA, 1251 bp, Oryza sativa
  Clone ID: TFbOSC15177j.C1.o4.np
acaaaataccagaggaagcatgagatgcaagaagaaaaatattatgaagatgattgcaattttgatcctcattggagttgcgagtttttcaggttctgctagaatgaggggatgagattgccgtcaatagaagattgcccaggatgtggtggctctagaaggagatatgttgggagttcaagtcgatcacatgcaaggagagaggatcggcaagtgcagaaaaagttgcctgttcaccagagattgggtccaactcatcaagattcgtttcaggaggaggatgctgaagatgaagatgaaactaggaaaccccaatggtgtccttctggcattttcactaagaaccagaagagaagaattcaaaggacgaggaacatggagcaaattcaagaggccaaagaagagatcaatcatcggctaaagaggacaaggaatgagtggcgtgttaagagcaaggttgtctcagctgatgaggtcgaagccgacaaggcgagatggttagccaaagggaaggctgttgcttcttcattggtttacatggtctttatattgccagcaaaatattgtgctaaaccagccgatgcagaaatcatggaagaatctttggctaagttgggtctgtcacctaagcaagctatctttgagaagccagaaggaacagggcatcggcatttgaagccgttatatgtcaagggatttgtcaatggcaagccgatctccaagatgttagttgatggtggggctgctgtgaacttgatgccttattctaccttcaggaagttagggaagaattcagatgatctcatcaagactaagatggtgctcaaagactttggagggaatccttcagaaccaaaggaattttgaaagtggagttgactattggcagcaagacaatttctactaccttttttgtcattgatgggaaaggttcttacagtatgttgttgggaagggattggattcatgcaaattgttgtattccttcgaccatgcaccagagcttgatccaatggaaaggagaccagatagaaatcgtgccagccgacaagtcagttaatgttggtaatgccgatttgactatttgggagatggatggatgtccgattgtgatatacaaccagttagagatggagagccctaattgttgttttgagggcgtcgttgagggttcaaatttctacaccgaagatactgtagatgatctcgatgataaatatgggcacagggcagagaggatttcttagtgag

SEQ ID NO: 13919 - DNA, 2692 bp, Oryza sativa
  Clone ID: TFbOSC16862j.C1.o1.gm
agtacttgcatgagttcaaccgccttgcgcgctacgctcctgaggacgtgcgcaccgatgctgagaagcaggagaagtttttgtttgggctcgacgatgaattgaccaaccagctaatctccggagtctatgaggactttgagaagcttgtggacaaggctatccgccaggaagagcaacgcaacaaaatggaccgaaaaagaaaggcagctcagatcagctttcctcaggggaacaatcagaagcctcgcttcatgacgggacagctaggtgggccttccaccctgatcgtctgtcagcaccgtccctatcacccgagtaacttcgacaacgactacaacggtggcagtcacaacaacagtaagcagcacaaccacaactcgactccacccccactaatggcaccagctcagtcagatccgccagctgtgtcagctcagtcagaacaacccaagaagagggctgtaggaaagccaggaccctgcttcaactgtggcaagcacggccactttgctagcaagtgtccgaagctgaatcgcactggacccaggttcatccaggcccacgccaatcatgtgtctgcagtggaagcacaggcagcaccagaggtcgtgttgggcacgtttccagtgaactcatatccagcaacagttctctttgattcaggtgcctcgcattctttcatttccaaaagatttgctgggacacatggattatcggtagtggaacttaaaataccgatgcaggttcatacccctggaaatgatatgaggacagcacactactgcccctcggtgactatagagatcagaagatcaccgtttctatccaacctcatccttctcgaatctaaagacctggatgtcattcttggaatggattggttgaccagaaacaagggagtgattgactgcgcaagccgcaccatcaccctaaccaacgacaaaggggagaagatcaccttccgttccccagcgtcgcagaagtccgtagcgagtctgaatcaggctgctattgagggtcagacagaaacagtggagaaaagtcccaggaagttggaggatattcctatagtacaagagtatcctgaggtgttcccagaagacctcactacaatgccaccgaagagagaaatcgagttccggatcgatttggcacccgggactactccaatttacaagaggccgtacagaatggcagctaatgagctagcagaggtcaagaagcaggttgacgaacagctgcagaaagggtacatccgaccgagtacttcaccttggggtgctccggttatctttgtggagaagaaagacaagaccaagaggatgtgcgtggattatcgcgcccttaatgaggtcacaatcaagaacaaatatccgttgccaagaattgatgacctgtttgatcagctaaaaggagctaaggtgttttccaagatagacctacgatcaggctatcatcagttgagaattcgggaagaggatattcccaagacagccttcaccactcggtatgggttgtttgagtgcacggttatgtcctttggactcaccaatgcaccggctttcttcatgaacttgatgaacaaagtgtttatggagtttcttgacaagtttgtcgtggtattcattgacgacatacttatttattcaaaatcagaagaggaacatgagcaacatcttcgtctggtacttgagaaattgaaggagcaccagttatatgccaagtttagcaagtgtgacttctggttatcggaggtcaaatttctgggtcacgtcatttctgctcaaggcgtggcagtggatccatcaaatgtggaatcagttacaaagtggaccccaccaaagacagtttctcagatccggagttttcttggacttgcgggctattaccgtcggttcatcgaaaatttctctaagattgccaggcccatgacacagttgctaaagaaagataaaaaattcaaatggtcagctgagtgcaaccaaagttttgaagaactcaagaagaagttagtctccgcaccagttctaattctgccagatcagacgaaagacttccagttgcgcccacacgagaccaattatcccactcatgaccttgagttggcagcagtggttcatgctctgaaaatctggcggcactatcttattggcaaccgctgtgaagtttacactgatcataagagcctgaagtacatcttcacccagcccgacttaaatctccggcaacgaagatggctggagttgattaaagattatgacatggggatacactatcatccaggcaaagcaaatgtggtagcagatgctctgagcagaaagagctattgcaatgcagtatgtaccgaaggcatgtgtgacaaattgcagcaagatcttgagcacctaaatttgggcatcgtagaacacgggtacgtagctgccctagaggcccggcctacgctcgtggatcaagtcagagcagctcaagtaaatgatcctgaaatagctgagctgaaaaagaatatgagggttggaaaagctcgagatttccatgaggatgagaatggcacaatctggttgggagaaagattgtgtgtgcctgacgacaaagaactgaaggatctcatactcacagaagctcatcaaactcagtattcaattcatcccggcagtactaaaatgtaccaggacctcaaagagaaattctg

SEQ ID NO: 13920 - DNA, 4227 bp, Oryza sativa
  Clone ID: TFbOSC18686j.C1.o1.fg
atggtgaagacaaggaatgatccccgtgactccaacgacgccagtggcagcgaagagcagaccgatggagctcatgtcagtggtgcatctggcagcagatcatctccaccgcccgaaaacccaacagtcactcaaatgatgacaatgatgatgcaacagatgcagcaacattaccatcagatgttgcagcaggcgcaacagaaccagcagtttggtcctccaccatcacacgtgtccaaactgttagactttcttcgtatccagccacccactttctcaagcaccaccaacccaatggaggccaatgactggctccgtgctattgagaagaagctgaacctactgcaatgcaacgaccaagagaaagttgcttttgctacacaccagttgcaaggtcccgcttctgcctggtgggataactacgtggcgacccgtctagatgcaacggagaagagagagttccgtgcgctccagcaaggaaccatgtcagttacagagtacttgcatgagttcaaccgccttgcgcgctacgctcctgaggacgtgcgcaccgatgctgagaagcaggagaagtttttgtttgggctcgacgatgaattgaccaaccagctaatctccggagtctatgaggactttgagaagcttgtggacaaggctatccgccaggaagagcaacgcaacaaaatggaccgaaaaagaaaggcagctcagatcagctttcctcaggggaacaatcagaagcctcgcttcatgacgggacagctaggtgggccttccaccctgatcgtctgtcagcaccgtccctatcacccgagtaacttcgacaacgactacaacggtggcagtcacaacaacagtaagcagcacaaccacaactcgactccacccccactaatggcaccagctcagtcagatccgccagctgtgtcagctcagtcagaacaacccaagaagagggctgtaggaaagccaggaccctgcttcaactgtggcaagcacggccactttgctagcaagtgtccgaagctgaatcgcactggacccaggttcatccaggcccacgccaatcatgtgtctgcagtggaagcacaggcagcaccagaggtcgtgttgggcacgtttccagtgaactcatatccagcaacagttctctttgattcaggtgcctcgcattctttcatttccaaaagatttgctgggacacatggattatcggtagtggaacttaaaataccgatgcaggttcatacccctggaaatgatatgaggacagcacactactgcccctcggtgactatagagatcagaagatcaccgtttctatccaacctcatccttctcgaatctaaagacctggatgtcattcttggaatggattggttgaccagaaacaagggagtgattgactgcgcaagccgcaccatcaccctaaccaacgacaaaggggagaagatcaccttccgttccccagcgtcgcagaagtccgtagcgagtctgaatcaggctgctattgagggtcagacagaaacagtggagaaaagtcccaggaagttggaggatattcctatagtacaagagtatcctgaggtgttcccagaagacctcactacaatgccaccgaagagagaaatcgagttccggatcgatttggcacccgggactactccaatttacaagaggccgtacagaatggcagctaatgagctagcagaggtcaagaagcaggttgacgaacagctgcagaaagggtacatccgaccgagtacttcaccttggggtgctccggttatctttgtggagaagaaagacaagaccaagaggatgtgcgtggattatcgcgcccttaatgaggtcacaatcaagaacaaatatccgttgccaagaattgatgacctgtttgatcagctaaaaggagctaaggtgttttccaagatagacctacgatcaggctatcatcagttgagaattcgggaagaggatattcccaagacagccttcaccactcggtatgggttgtttgagtgcacggttatgtcctttggactcaccaatgcaccggctttcttcatgaacttgatgaacaaagtgtttatggagtttcttgacaagtttgtcgtggtattcattgacgacatacttatttattcaaaatcagaagaggaacatgagcaacatcttcgtctggtacttgagaaattgaaggagcaccagttatatgccaagtttagcaagtgtgacttctggttatcggaggtcaaatttctgggtcacgtcatttctgctcaaggcgtggcagtggatccatcaaatgtggaatcagttacaaagtggaccccaccaaagacagtttctcagatccggagttttcttggacttgcgggctattaccgtcggttcatcgaaaatttctctaagattgccaggcccatgacacagttgctaaagaaagataaaaaattcaaatggtcagctgagtgcaaccaaagttttgaagaactcaagaagaagttagtctccgcaccagttctaattctgccagatcagacgaaagacttccaggtctactgtgatgcatctcgccaaggattgggatgtgtgttgatgcaagaaggcagagtggtcgcatatgcttcgcgacagttgcgcccacacgagaccaattatcccactcatgaccttgagttggcagcagtggttcatgctctgaaaatctggcggcactatcttattggcaaccgctgtgaagtttacactgatcataagagcctgaagtacatcttcacccagcccgacttaaatctccggcaacgaagatggctggagttgattaaagattatgacatggggatacactatcatccaggcaaagcaaatgtggtagcagatgctctgagcagaaagagctattgcaatgcagtatgtaccgaaggcatgtgtgacaaattgcagcaagatcttgagcacctaaatttgggcatcgtagaacacgggtacgtagctgccctagaggcccggcctacgctcgtggatcaagtcagagcagctcaagtaaatgatcctgaaatagctgagctgaaaaagaatatgagggttggaaaagctcgagatttccatgaggatgagaatggcacaatctggttgggagaaagattgtgtgtgcctgacgacaaagaactgaaggatctcatactcacagaagctcatcaaactcagtattcaattcatcccggcagtactaaaatgtaccaggacctcaaagagaaattctggtgggtcagcatgagaagagagatagccgaattcgtcgcactctgcgatgtttgtcagcgagtcaaagcagaacatcagaggcccgcaggactgctacaaccccttcagatcccggaatggaaatgggaagaaatcggaatggatttcataacaggtttgcccagaacatcgtcggggcacgattcaatctgggtggtcgtggatcgactcaccaaagttgctcattttattccagtacacactacctatactgggaaaaggttggcagagctttatctttcaagaatcatgtgtttgcatggggtacctaagaagattgtatctgatcgaggaagtcaattcacttcaaagttttggcagaaactgcaagaagaattggggactcgtttgaatttcagcacggcttatcatccacaaacagatgctatcagtccagtttgcaaatggtaccgtttgaagcattgtacggacgaaagtgccgcacaccacttttctgggatcaaacaggggattatgtgtacccttcgtgtcactccgcttcggggagtacaccgcttccaaaccaaaggcaagttggcaccacgctttgtgagaccatacaggatcttggaacgcagaggtgaagtcgcttaccagctagagcttccacctaatatggttggtatccacgatgtgtttcatgtgtctcaactgaagaagtgtttgagggtacctgaggaacaagctagctcagagcacattgacatccaagaagatttgacctacgtggagaagccagttcgtatccttgagaccagtgagagaaggaccagaagcaaggtgatcaggttttgcaaagttcaatggagccaccactcagaggaagaggccacctgggaaagagaagatgaattgaaggccgcccatccgcacctcttcgccagctcttccgaatctcggggccgagattccgtttaa

SEQ ID NO: 13921 - DNA, 4551 bp, Oryza sativa
  Clone ID: TFbOSC400481j.C1.o14.fg
atggtgaagacaaggaatgatccccgtgactccaacgacgccagtggcagcgaagagcagacagatgaagctcataccagtggtgcacctggcagtagttcatctccgccgcccgagaacccaacagtcactcagatgatgacaatgatgatgcaacagatgcagcaacattaccatcagatgttgcagcaggcgcaacagaaccagcggtttggtcctccaccatcacacctgtccaaactgttagactttctccgcatccagccacctactttctcaagcaccaccaacccaatggaggccaacgactggctccgtgctattgagaagaagctgaaccttctgcaatgcaacgaccgagagaaggttgcttttgctacacatcagttgcaaggtcctgcttctgcctggtgggataactacgtggcgacccgtctaggtgcaacggaggttacttgggcagagttttgtcaaaactttaggaaggcacagattcctaaagggattatggcacaacagaagagagagttccgtgcattgcaacaaggaaccagaacgattacagagtacctgcacgagttcaaccgcctcgcgcgctacgctcccgaggacgtgcgcaccgatgctgagaagcaggagaagtttttgtttgggctcgatgatgaattgaccaaccagctaatctccggagtctatgaggactttgagaagcttgtggacaaggctatccgccaagaagagcaacgcaacaaaatggaccgaaaaagaaaggcagctcagatcagctttcctcaggggaacgatcagaagcctcgcttcatgacgggacagctaggtgggccttccaccctgatcgtctgtcagcaccgtccctatcacccgagtaacttcaacaacgattacaacggtggcagtcacaacaacagtaagcagcacaaccacaactcgactccacccccactaatggcaccagctcagtcagatccgccagctgtgtcagttcagtcagaacaacccaagaagggggctgtaggaaagccaggaccctgcttcaactgtggcaagcacggccattttgctagcaagtgtccgaagctgaatcgcactagacccaggttcatccaggcccgcgcccatgatgtgtctgcaaaggaagcacaggcagcaccagaggtcgtgctgggcacgtttccagtgaactcatatccagcaacagttctctttgattcaggtgcctcgcactctttcatttccaaaagatttgctgggacgcatggattatcggtagtggaacttaaaataccgatgcaggttcatacccctggaaatgatatgaggacagcacactattgcccctcggtgactatagagatcaaaagatcaccgtttctatccaacctcatccttctcgaatctaaagacctggatgtcattctcggaatggattggttgaccagaaacaagggagtgattgactgcgcaagccgcaccatcaccctaaccaacgacaaaggggagaagatcaccttccgttccccagcgtcgcagaagtccgtagcgagtctgaatcaggctgctattgagggtcagacagaaacagtggagaaaagtcccaggaagttggaggatattcctatagtacaagagtatcctgaggtgttcccagaagacctcactacaatgccaccgaagagagaaatcgagttccgaatcgatttggcacccgggactgctccaatttacaagaggccgtacagaatggcagctaatgagctagcagaggtcaagaagcaggttgacgaacagctccagaaagggtacatccgaccgagtacttcaccttggggtgctccggttatctttgtggagaagaaagacaagactaagaggatgtgcgttgattatcgggcccttaatgaggtcacaatcaggaacaaatattcgttgcccagaattgatgacctgtttgatcagctaaaaggagctaaggtgttttccaagatagacctacgatcaggctatcatcagttgagaattcgggaagaggatattcccaagacagccttcaccactcggtatgggttgtttgagtgcacggttatgtcctttggactcaccaatgcaccggctttcttcatgaacttgatgaacaaagtgtttatggagtttcttgacaagtttgtcgtggtatttattgacgacatacttatttattcaaaatcagaagaggaacatgagcagcatctccgtctggtactcgagaaattgaaggagcaccagctatatgccaagtttagcaagtgtgacttctggttatcggaggtcaaatttctgggtcacatcatttctgctcaaggcgtggcagtggatccatcaaatgtggagtcagttacaaagtggaccccaccaaagacagtttctcagatccggagttttcttggacttgcgggctattaccgtcggttcatcgaaaatttctccaagattgccaggcccatgacacagttgctaaagaaagatgaaaaattcaagtggtcagctgagtgcaaccaaagttttgaagaactcaagaagaagttagtctctgcaccagttctaattctgccagatcagacaaaagacttccaagtctactgtgatgcatctcgccaagggttaggatgtgtgttgatgcaagaaggcagagtggccgcatacgcttcgcgacagttgcgtccacacgagaccaattatcccactcatgaccttgagttggcagcagtggttcatgctctgaaaatctggcggcactatcttattggcaaccgctgtgaagtatacaccgatcacaagagtctgaagtacatcttcactcagcctaacttgaatctccgacagcgaagatggctggagttaattaaagattatgacatggggatacattatcatccaggcaaagcaaatgtggtagcagatgctttgagcagaaaaagctattgcaatgccttatgcactgaagacatgtgtggcaaattgcagcaagatcttgagcacctaaatttgggcatcgtggaacacgggtacgtagctgccctagaggcacggcctacgctcgtggatcaagtcagagcagctcaggtaaatgatcctgaaatagctgagctaaaaaagaatatgagggtcggaaaagcccgagatttccatgaggatgagcatggcacaatctggttgggagaaagattgtgtgtgcctgacgacaaagaactgaaggatctcatactcacagaagctcatcaaactcagtattcaattcatcccggcagtactaaaatgtaccaagacctcaaagagaaattctggtgggccagcatgagaagagaaatagccgaattcgtcgcactctgcgatgtttgtcagcgagtcaaagcagaacatcagaggcccgcaggactgctacaaccccttcagatcccggaatggaaatgggaagaaatcggaatggatttcataacaggtttgcccaggacatcatcggggcacgattcaatctgggtggtcgtggatcgactcaccaaagttgctcatttcattccagtgcacactacctatacggggaaaaggttagcagaactgtacttagcaaggatcatgtgtctgcatggggtacctaagaagatagtatctgatcgagggagtcagttcacttcaaaattttggcagaaactgcaagaagaattggggactcgtttgaatttcagcacggcctatcacccgcaaactgatggtcagaccgaaagggtcaatcagatcttggaagatatgctgcgagcgtgtgcgctcgattttggtggagcatgggataaaagtctaccgtatgcggaattctcttacaacaacagctatcagtccagtttgcaaatggcaccgtttgaagcattgtacggacgaaagtgccgcacaccacttttctgggatcaaacaggtgagcgccaactgtttgggacagaagtgttaaccgaagcagaggagaaagtcaggaccgtcagggaaagactgcgaatcgcccagtctcggcagaagagttatgctgataaccgccgaagagagcttactttcgaagcaggggattatgtgtaccttcgtgtcactccgctccggggagtacaccggttccagacgaaaggcaaattggcaccacgctttgtgggaccatacaggattttggaacgcagaggtgaagtcgcttaccagctagagcttccatctaatatggttggtatccacgatgtgtttcatgtgtctcaactgaagaagtgtttgagggtacctgaggaacaagctagctcagagcacattgacatccaagaagatttgacctacgtggagaagccaattcgtatcctggaaaccagcgagagaaggaccagaaacaaagtaatcagattttgcaaagttcagtggagccaccactcagaggaagaggccacctgggaaagagaagatgaattaaaggccgcccatccgcacctcttcgccagcccttccgaatctcggggtcgagattccgtttaa

SEQ ID NO: 13922 - DNA, 4614 bp, Oryza sativa
  Clone ID: TFbOSC400738j.C1.o7.fg
atggaggcagaagactggctacgcatcatagagaagaaactgactcttgtcagggtacgcgaaaccgacaaagtaatcttcgcagtaaaccaactggaaggacccgctagtgattggtgggacacctacaaggaagctcgggaaaacgatgctggagaacccacttgggaggagttcactgcagcatttcgcgagaacttcgtacctgctgcagtgatgcgcatgaagaagaacgagtttagatggctgcggcaagggaatacaacggtgcaagaatatctgaacaagtttactcagttggcccgctatgcaattggagacctagcggatgaagaagaaaagatcgacaagttcatagaagggctgaatgatgaattgcgtggacctatgatcgggcaggatcacgagagtttccagagcctgatcaacaaagtcgtcaggctagagaacgatcaaaggacggtggaacacaaccgcaagaggaggcttgctatgagtcgcctacctcagatagtgcctcagcgactcaagggagccacttcatccggatggaagccccctatcgtggcaaccaaccgtcccgctgcacctagcaacttcaacaggccagttgcaattcagaaccgcacccctacaccaactttggctgcccctggagccaagatgaatgtgaactgcttcaattgcggggggtatgggcactacgccaacaactgccctcatccacgcaagactcctgtccggaccggcacgaatgcaatgactgttcgtggcactactacccctgttaccgggcgaggtctattcaagactccgcaatctaacaggaccgccactggacttgggcgcggacaagtgaaccatgtccgagctgaagaggcccaggaagatcagggcatactcatgggtatgttctctatcaattctaccccggttaaagttctcttcgattctggtgcatcgcattcatttatatctctgaaggctagtcaaaagcacaacttaaccctagtgggacttagaaagcctatgatagtacactcacctgggggcgagataactgtgagtcatgcttgcatagacgtaccaattcgtcttagggacgtggtgtttccctccaatcttatgatcttaatacctcagaccctagatgtcatactgggcatggattggttaacaaagaatagaggtgtaattgactgtgggcgtagagaggtgaccttaaccacaccctggggatcggatatgagagcaaccatggatcaagatcctaggctaaccgaacgtgccggaggtatatttaccatgctacccctaaagggaatgcctgtagtgcagcgatttcctgatgtgttcccagaagatttacctggaatgccaccagatcgtgacataaagttcattattgacctgatacctggaaccgcccccatatccaagagaccatatcggatgccggttaatgagttagaagaacttaaaaagcaaattagggagttgcaagaaaagggatttgtacgccccagttcgtcaccttggggagccccagtgctattcgtcaagaagaaagatggtagcatgagaatgtgtgtggactaccgatcactgaacgaagtaactattaagaacaagtacctactaccaaggtttgatgatctcttcgatcaactcaaaggagctaaggtgttttcaaagatcgacattcgatcaggataccaccaactgaagattaggaccaaggatattcccaagaccgcgttttcaacacactatggattgtatgagttcacagtgatgtcatttggtctaaccaatgccccagcctacttcatgaatcttatgaacaaaataaacaccctggacattcaacctcttttgagaacccaaatagaagaagcccagaaggacaacgaggaaatccgagagttgaaggaacgcttagctgcaggacgtgcaaaggaattttcaatcgacgaaaaagatgttctatggtataaaaagagaatttacgtacccgaacagggtggactgaggggattaattttaaaggaagctcacgaatcggcatactcattgcaccccggaagtacgaagatgtaccaagatctgaaggaaggatactggtggcccaacatgaagagagatgtggcagaatacgtagcactctgtgacgtatgccaaaaagtgaaggctgagcatcagcgaccggcaggcttgctgcaaccccttaggattcctgaatggaaatgggatgagataggtatggattttattgttggattgcccaagaccgcaacaggatatgattccatttgggtgatcgtggatcgactcaccaagacggcaagattcatccccgtcaagacaaactatagcagtgctaaacttgccgagttgtatatgaccaggatagtgtgtcttcatggtatacctaagaggattatatccgatcgaggcacacagtttacctcgcatttctgggaaaaagtacatgaagccctaggaagttatcttgcttttagcacagcttatcatccacagacagatggccagacggagagaaccaaccaggtactggaggacatgctgagagcttgtgcgttggattttagcaaagactgggagaggtgtttgccctacgccgagttctcctacaacaacagctttcaagcaagcctgaagatgtcccccaatgaagcattgtttggtcgacgatgccggacgccgctgatgtggtctgagacaggtgaacgggcggtatttggacctgacattatcaatgaggccgaagaaaaggttcgcttgatccgtgaccgtttaaaggtagcacaatcacgacaaaagagttatgccgacacccgaagaagaaacctagaatttaaggaaggagattacgtttatttaaaggtttctccgatgaggggaacaaaaaggtttagggttaagggaaaactagcaccaagatacgtgggaccctttcaaatcacggctagaagaggagaagtcgcatatcagttacagctaccagagaatatcgctgatgtgcacccagtcttccatgtgtctcaattaaagaaatgcttacgagtgccggaagaacaagctccgctggaagagattcacattagcaatgatcttacgtatccagaacacccgatccggatattggatgaagccgagaagaggactaggagcaaagtgtggcgtatgaacaaggaagcagtacgtagtgagatagactcaattatgtctaatggtacttgggaagtcgttgagcgtctatatgggtccaagcctgtaggatgcaaatgggttttcaagaaaaagcttaggccagaggttacaattgaaaagtacaaggcaaggcttgtggccaagggttatacccaaaaggaaggcgaggattttttcgacacctactcatcagttgcccatttgaccacgattcgagtactacttgctctggcagcctctcatgctcttctcgtccatcagatggacgttaagacagctttcctaaatggagagctggaggaggagatctatatggatcaaccaaacgggtatgcactagaaggtcgggagggaatggtgtgtaaactgttgaaatccttgtatggccttaagcaagcacctaagcaatggcatgagaagtttgacaccacacttacatctgctggctttgttgtgaacgaaactgacaaatgcgtgtactatcgctatggtgggggagaaggagtgatcttgtgtttatatgtcgatgacatattgatctttaggaccagcctcaatgtgatcgaggaggtcaaggactttctgtccaagagttttgaaatgaaggatttgggagaggctgatgttattcttaacattaagctactaagaggagatgagggtgggattacacttgtgcaatcccactatgtggacaaggttctgagtcgctttggacacaacgactgcaagccagctcctactccttatgatcccagtgtgctattaaggaaaaaccgaagaatagcaagggatcaactgagatactcacaaatcataggttcattgatgtacttggctagtgcaacgaggcctgacatctcatttgctgtaagcaagctgagccggtttgtctcaaatctggtggatgatcattggcaggctttggaaagagtaatgcgctatctaaagggcactatgagctatggaattcactataccgggtacctaaaagtactggaagggtatagtgactcaaactggatatctgatgctgatgagataaaagccacaagtggatatgtgttcacacttggaggtggcactgtttcctggaagtcttgtaagcagaccatcttaacgaggtcaacaatggaagcagaacttacaggactagatactgcgacagttgaggccgagtggcttcgtgaactcctgatggatttgccggtggttgaaaaaccagtgccagctatcctaacgaactgtgataatcaaacagtgattattaaagtgaacagttcaaaggacaacgtgaagtcatctagacatatcaaaataagactgaaatctgtcagaaagcagaaaaactccggagtgatagcattggactatgtctaa

SEQ ID NO: 13923 - DNA, 4216 bp, Oryza sativa
  Clone ID: TFbOSC401018j.C1.o41.np
atgtcatacacaccgcctggccgtcgtggtggcggtggcggcgggggaagcgacaacggctgcggcatcactcccgctagtcgatgcagggcacactgcccgtctcttgatcctgtcgaggacaaattatatagactgagcgctgttgatgcgcgtcaacctgcaggcgcaggggctctggacggccatcgatccctgctatgcggagtaccgcgaggatcgtgcagcgctctcggcgattctccaagctgtgccccgcgagatgttgcgcggcttggcaaagcacgacacggcgaaggcggcgtgggatgccattaaaaccatgcgggtcggtgtcgaccgcgtgagcgaggcgagggagcagggattccgccgtcagttcgaggcgatgcgcttcaaggacggtgagacaccggaggaatttgcgatgcggctcactgccatcgttgcggacatgcgcaacatgggcggagtcatggaagacgaacacatcaacaagaagctgctgcgtgttgtccccaagaagtacaagccggtggcaatttccctcgagcagctcctcgacgtgaagaccatggccctggaggagctcatcgagtggctgtcgacggtcgactcctacagtgatgatgaggaggcaagtgacggtggcaaattgtacctcactaaggagcagtggcaggccggtgtcaagcagcgggagtaggagggatctggcagcagcaacaagggccgggcgggctctggcaaccagaaccgtcgaggcaaggccggcgattcaccgaagggaaaggagatggccaccagcggccatggctgtcgtgacatctctaaggtgaagtgtttcaattgtgatgaatacggtcattactcgaagcagtgccgtatgccgcgtcgccaatgtcggggagaggcaaatgcaaatctggtccaggctgaggaagagccgactctgctcatggcacacgtgatgggggtgtcgctcgccggcgaagcggccgttggtcgaacaccttgtgtgcaggaagtgcatctcacagagaagaaggttgtgctggaccatgaggatgggcgtaaggaggagaagactggagagtggttcctggacaccggggccacgaatcacttgacgggcgcacgctcagcgttcgcggagcttgacactggtgttgtgggcacggttaaattcagcgatggctcagtggttgacatctaggggcgcggaactgtggtgtttcagagcaagaatggtgatcaccgctcactagaggcagtgtactacatccccaagctgagaaaaaacattgttagtgttggtcgcctcgatgcgcgcggctacgacgcacacatttggcatggtgttttcacgttgcgtgacccggaagggatgcagctagctaaggtaaatcgtgattcaagttacctgtatgttctcaagttgaaccttgcgacactaatctgtatggcagcgagcggctccgagctagcatggcgatggcatgcacgatttggccatctgaatttcctggcacttcggaggttggcaaaaggaggcgtggtccgcaggatcccgcaaattgatcacattgatcagttgtgtgacgggtacctcgcgggcaaacaacatcgcacaccgttcccagaggaggcgcagtacagggcgcagacggcgctcgagctggtgcacggtgacctctgcggaccaatcacgccggcgacgacagggggcaagaagtatttcttgctcctagtcgatgacatgagtcatcacatgtggatacgactcctctctgccaaacacgaagcatcggcagcgattaagccggcgtggagaaggatagcaatcggaagctcatggcgctgcgcactgatcgcgggggtgaattcacctctatagagttcatggagtactacgcggacacaggggtgaaacgttaaatcactgcaccctactcacggcagcagaacagtgtcgtggagcggcgcaatcagactgtggtggcagcagctaggtccatgctgaaggcggcaaacatgctggcatatttctggggagaggcggtggttgcagccgtctatgtcttgagcaaatcaccaatgaagagtcttgatggggtgacgccgtatgaagcgtggtatggtcgccgacccactgtcgaacacctgcgtgtgtttgagtgtgtgggctatgttaagacagccaagccaaacttgagaaagcttgatgatcgtagcacgaggatggtcttcatcggctacgagcaaggatcaaaagcctacaagatgtatgattttgtggtgcgacgcgtgtgtgtgtcacgcgacgtcgtttttttatgagacgacgttctgggactggggcagcaacactgatgaagaaggagatcaggacgcgtatgtggagtttacggtggagaatttcacaatcccagtccaagggagtgagacacatgcccaggatgcagcagccactccaaccatgctagcaacatcaccaacatcaagcaccggaactgcaacaactctgccatctggtgttgaattctgttcccctccaactgatgctagtgaagggactgatgaagggcccaggagctacagaacagtggtgaacacgcttgccaccttgaccccaatcctagattttaattacagtgatcaatgccttatggcagcagaggaaccagcaagtttcttggaggctgagcaggagagctgctggaggaaggccatgcttgaagagatggaatcaattgaaggtaacaacacctggactctctatgatttgccctctagccacagagcaacaggactgaaatgggtttacaaaatcaaacgtgatgccaaagatgtcattgtgaagtacaaagctcgattggtggcaaagggatatgtccatcaacaaggagttgattttgatgaagtatttgccccagtgacgaggatggagactgtgcgattgctgattgcaacggctgctcatcagggatgggaagttcatcagatggatgtgaaattagctttcttgaatagggaattggaagaagatgcttaggtggttcaaccacctggttttgttgttgatggaaaagaagacaaggtgttgaaattgaagaaggccctatatggactgaaacaagcaccacgtgcatgttatgcgaagttggattctagtcttgtgagcctgaattttgtcaagagtggtgtcaaaagtgctgtgtatactcgaggagagaagaactcatgacttgtggttggtgtatatgtggatgatctcattactacaggagcaagtctgatggaaataaacaagtttaaggagcagatgcaggctctttttaaaatgagtgatctcggtctgctctcttattatctcgggatggaggtgaaacatgcaaaggaagggatcacagtgtctcaaggtgcatatgcagcaaagatacttgacaaagctgggatgagggattgtaatccatgtcagactcccatggatgctcggttgaagttgagaaaggagggaggagaatgtatggaggaaactcaattcagaagcataattgggagcttgaggtacttggtgaacacaagacctcatctaagttattcggttggttatgttagcaggtttatggagaaaccgacctctgaacattgggctgccatgaaacatattttgaggtatgtggcaggtactctgaatctcggggtggaattcagaaagaagcaacaacaggttcctcagctgaatggctatagtgacagtgatatggctggggatattgatgatagaaagagtacaaccggagttctatttaaattgggagacagtttgatcagttggcagtcacaaaaacaaaaggtggtagcaatatcttcgtgtgaggctgaatatatagctgctgcaactgctgctgtacaaggagtgtggctggctcgaccaataggtgagttggaaggccaagaacctggttgtgcactgatcaaggttgataacaagtctgctataagtctcttgaagaatcctgtgcttcatgatcgcagtaaacatattgatacaaagttttatttcatctgggattgtgttgatcagaaacgggtggaggtggaatacataaggttagaggagcaacatgcagatattttaacaaagcctcttggtaagattcgatttttggagttgagaggcaagctgggattagttccagtctgatgcttc

SEQ ID NO: 13924 - DNA, 906 bp, Oryza sativa
  Clone ID: TFbOSC401101j.C1.o2.np
tgtcactgcagcggtagcggcagcggtagtgccctaggtggccatgagctcgttgtgcaacaagtgaaggaggttgggttgacgctatgttaccccatgctcgaggagaacaactacggcgtttgggcagtgaaaatgaaaattttcatgcgcgcacaaggcgtgtgggctgctgtggagggcaacacggccgatgagaagatggaccaaatggctctcaccgccattgtacaagctatgccggaggccgtggtgatgaccatatttgagaaggagacggcgaaggcagcgtgagacgccctcaagttgatgaacatgggtgaagagagtatcaagaaggcctgagtacaaacccttaagagcgagcttgatggtatgaaaatgggtaattctgagaaaattaatgattttgctttaaaggttaccacgatcatgaacgagattcactctcttggcgtgaaagtggaggagaccaccgtcgtggagaagctcctacattctgttcccgagaagtcctaatccctcataagcaccattgagcaatggggggatgtgtcagagatgatggtgacaaagacaattgggcacctgcgggcattcgaggactcttcacaggggctgcgtcgtgacaaagagggggagcagcagctgttcgccgcatatgccgagccacgactgatgcgtgctgagtgggaggccaaggttgctaaagagaggaggagtggaggtggttccggcagcagcagtggtggtgacaagaggaagtaccacggcaaattcgacaaggcaaaagttcattgctacaattgtcaagagtatgggcatttcgctgatgagtgtcctaagccgaagaaggacatggcttttcttgccacagttgacgcggatgatgagccaacattggtg

SEQ ID NO: 13925 - DNA, 3930 bp, Oryza sativa
  Clone ID: TFbOSC900319j.C1.o16.fg
atggtgaagacaaggaatgatctccgtgactccaacggcgccagtggcagcgaagagcagacagatgaagctcataccagtggtgcacctggtagcagttcatctccgccgcccgagaacccaacagtcactcagatgatgacaatgatgatgcaacagatgcagcaacattaccatcaaatgttgcagcaggtgcaacagaaccagcagtttggtcctccaccatcacacgtgtccaaactgttagactttcttcgtatccagccacccactttctcaagcaccaccaacccaatggaggccaacgactggctccgtgctattgagaagaagctgaacctactgcaatgcaacgaccaagagaaagttgcttttgctacacaccagttgcaaggaagacagctggaccgaaaaagaaagacagctcagatcagctttcctcaggggaacaatcagaagcctcgtttcatgacgggacagctaggtgggccttccaccctgatcgtctgtcagcaccgtccctatcgcccgagtaacttcaacaactattacaatggtggcagtcacaacaatagtaagcagcacaaccacaactcgactccacccccactaatggcaccagctcagtcagatccgccagctgtgtcagctcagtcagaacagcccaagaagggggctgtaggaaagccaggaccctgcttcaactgtggcaagcacggccactttgctagcaagtgtccgaagctgaatcgcactggacccaggttcatccaggcccacgccaatcatgtgtctgcaatggaagcacaggcagcaccagaggtcgtgttgggcacgtttccagtgaactcatatccagcaacagttctctttgattcaggtgcctcgcattctttcatttccaaaagatttgctgggacacatggattatcggtagtggaacttaaaataccgatgcaggttcatacccctggaaatgacatgaggacagcacattattgcccctcggtgactatagagatcagaagatcaccgtttctatccaacctcatccttctcgaatctaaagacctagatgtcgttctcggaatggattggttgaccagaaacaagggagtgattgactgcgcaagccgcaccatcaccctaaccaacgacaaaggggagaagatcaccttccgttccccagcgtcgcagaagtccgtagcgagtctgaatcaggctgctattgagggtcagacagaaacagtggagaaaagtcccaggaagttggaggatattcctatagtacaagagtatcctgaggtgttcccagaagacctcactacaatgccaccgaagagagaaatcgagttccggatcgatttggcacccgggactgctccaatttacaagaggccgtacagaatggcagctaatgagctagcagaggtcaagaagcaggttgacgaacagctgcagaaagggtacatccgaccgagtacttcaccttggggtgctccggttatctttgtggagaagaaagacaagaccaagaggatgtgcgtggattatcgcgcccttaatgaggtcacaatcaagaacaaatatccgttgcccagaattgatgacctgtttgatcagctaaaaggagctaaggtgttttccaagatagacctgcgatcaggctatcatcagttgagaattcgggaagaggatattcccaagacagccttcaccactcggtatgggttgtttgagtgcacagttatgtcatttggactcaccaatgcaccggctttcttcatgaacttgatgaacaaagtgtttatggagtttcttgacaagtttgtcgtggtgttcattgacgacatacttatctattcaaagtctgaagaacaacatgagcaacatcttcgtctggtactcgagaaattgaaggagcaccagttatatgccaagtttagcaagtgtgacttctggttatcggaggtcaaatttctgggtcacgtcatttctgctcaaggcgtggcagtggatccatcaaatgtggaatcagttaccaagtggaccccaccaaagacagtttctcaaatccggagttttcttggacttgcgggttattaccgtcggttcatcgaaaatttctctaagattgccaagcccatgacacagttgctaaagaaagatgaaaaattcaaatggtcagctgagtgcaaccaaagttttgaagaactcaagaagaagttagtctctgcaccagttctaattttgccagatcagacaaaagacttccaagtctactgtgatgcatctcgccaagggttgggatgcaaagcaaatgtggtagcagatgctttgagcagaaaaagctattgcaatgccttatgcactgaagacatgtgtggcaaattgcagcaagatcttgagcacctaaatttgggcatcgtggaacacggatacgttgctgccctagaggcaaggcctacgctcgtggatcaagtcagagcagctcaggtaaatgatcctgaaatagctgagctaaaaaagaatatgagggtcggaaaagcccgagatttccatgaggatgaacatggcacaatctggttgggagaaagattgtgtgtgcctgacgacaaagaactgaaggatctcatactcacagaagctcatcaaactcagtattcaattcatcccggtagtactaaaatgtaccaggacctcaaagagaaattctggtgggtcagcatgagaaaggaaatagccgaattcgtcgcactctgcgatgtttgtcagcgagtcaaagcagaacatcagaggcccgcaggactgctacaaccccttcagatcccggaatggaaatgggaagaaatcggaatggatttcatcactggtttgcccaggacatcgtcagggcatgattcaatttgggtagtcatggatcgcctcacgaaagttgctcattttattccggtgcacactacctatacggggaaaaggttggcagagctgtacttagcaaggatcatgtgtctgcatggggtacctaagaagatagtatctgatcgagggagtcagttcacatcaaaattttggcagaaactgcaagaagaattggggactcgtttgaatttcagcacggcttatcatccgcaaacagatggtcagaccgagcgagtaaatcaaatcttggaagatatgttgagagcttgtgcacttgactttggtggagcctgggataaaagtctaccgtatgcggaattctcttacaacaacagctatcagtccagtttgcagatggcaccgtttgaagcattgtacggacgaaagtgccgcacaccacttttctggaatcaaacaggtgagcgccaactgtttgggacagaagtgttaaccgaagcagaggagaaagtcaggaccgtcagggaaagactgcgaatcgcccagtctcggcagaagagttatgctgataatcgccgaagagagcttactttcgaagcaggggattatgtgtaccttcgtgtcactccgctccggggagtacaccggttccaaacgaaaggcaaattggcaccacgctttgtgggaccatacaggatcttggaacgcagaggtgaagtcgcttaccagcttgagctcccatctaatatggttggaatccacgatgtgtttcatgtatctcaattgaagaagtgtttgagggtacctgaggaacaagctagctcagagcacattgacatccaggaagatctgacttatgtggagaagccgattcgtatcctcgagaccagtgagagaaggaccagaaacaaggtgatcaggttttgcaaagttcagtggagccaccactcggaagaagaggccacctgggaaagagaagatgaattgaaggccgctcatccgcacctctttgccaactcttccgaatctcggggtcaagattccgtttaa

SEQ ID NO: 13926 - DNA, 4275 bp, Oryza sativa
  Clone ID: TFbOSC900325j.C1.o4.fg
atggtgaagacaaggaatgatctccgtaactccaacgacgccagtggtagcgaagagcagacagatgaagctcataccagtggtgcacctggcagcagttcatctccgccgcctgagaacccaacagtcactcagatgatgacaatgatgatgcaacagatgcagcaacattaccatcagatgttgcagcaggcgcaacagaaccagcagtttggtcctccaccatcacacgccaacgactggctccgtgctattgagaagaagctgaacctactgcaatgcaacgatcaggagaaagttgcttttgctacacaccagttgcaaggtcccgcttctgcctggtgggataactacgtggtgacccgtccagatgcaacgaaggttacttgggcagagttttgtcaaaactttaggaaggcacagattcctgaagggattatggcacaacagaagagagagttccgtgcattgcaacaaggaaccagaacggttatagagtacctgcacgagttcaaccgccttgcgcgctacgctcctgaggacgtgcgctccgataccgagaagcaggagaagtttttgtttgggctcgatgatgaattgaccaaccagctaatctccggagtctatgaggactttgagaagcttgtggacaaggctatccgccaggaagagcaacgcaacaaaatggaccgaaaaagaaaggcagctcagatcagctttcctcaggggaacaatcagaagcctcgcttcatgatgggacagctaggtgggccttccaccctgatcgtctgtcagcaccgtccctatcacccgagtaacttcaacaacgattacaacggtggcagtcacaacaaccgtaagcagcacaaccacaactcgactccacccccactaatggcaccagctcagtcagatccgccagctgtgtcagctcagtcagaacaacccaagaagggggctgtaggaaagccaggaccctgcttcaactgtggcaagcacggccactttgctagcaagtgtccgaagctgaatcgcactagacccaggttcatccaggcccgcgccaatcatgtgtctgcagaggaagcacaggcagcaccagaggtcgtgttgggcacgtttccaatgaactcatatccagcaacagttctctttgattcaggtgcctcgcattctttcatttccaaaagatttgctgggacacatggattatcggtagtggaacttaaaataccgatgcaggtacatacccctggaaatgatatgaggacagcacactactgcccctcggtgactatagagatcaaaagatcaccgtttctatccaacctcatccttctcgaatctaaagacctagatgtcattctcggaatggattggttgaccagaaacaagggagtgattgactgcgcaagccgcaccatcaccctaaccaacgacaaaggggagaagatcaccttccgttccccagcgtcgcagaagcccgtagcgagtctgaatcaggctgctattgagggtcagacagaaacagtggagaaaagtcccaggaagttggaggatattcctatagtacaagagtatcctgaggtgttcccagaagacctcactacaatgccaccgaagagagaaatcgagttccggatcgatttggtacccgggactgctccaatttacaagaggccgtacagaatggcagctaatgagctagcagatgtcaagaagcaggttgacgaacagctgcagaaagggtacatccgaccgagtacttcaccttggggtgctccggtgatctttgtggagaagaaagacaggaccaagagaatgtgcgtggattatcgcgcccttaatgaggtcacaatcaagaacaaatatccgttgccaagaattgatgacctgtttgatcagctaaaaggagctaaggtgttttccaagatagacctacgatcaggctatcatcagttgagaattcgggaagaggatattcccaagacagccttcaccactcggtatgggttgtttgagtgcacggttatgtcctttggactcaccaatgcaccggctttcttcatgaacttgatgaacaaagtgtttatggagtttcttgacaagtttgtcgtggtgttcattgacgacatacttatctattcaaagtctgaaaaacaacatgagcaacatcttcgtctggtactcgagaaattgaaagagcaccagttatatgccaagtttagcaagtgtgacttctggttatcggaggtcaaatttctgggtcacatcatttctgctcaaggcgtggcagtggatccatcaaatgtggagtcagttacaaagtggaccccaccaaagacagtttctcagatccggagttttcttggacttgcgggctattaccgtcggttcatcgaaaatttctccaagattgccaggcccatgacacagttgctaaagaaagatgaaaaattcaagtggtcagctgagtgcaaccaaagttttgaagaactcaagaataggttagtctctgcaccagttctaattttgccagatcagacaaaagacttccaagtctactgtgatgcatctcgccaagggttgggatgtgtgttgatgcaagaaggcagagtggtcgcatacgcttcgcgacagttgcgtccacacgagaccaattatcccactcatgaccttgagttagcagcagtggttcatgctctgaaaatctggcggcactatcttattggcaaccgctgtgaagtatacactgatcacaagagtctgaagtacatcttcactcagcctgacttgaatctccgacagcgaagatggctggagttaattaaagattatgacatggggatacattatcatccaggcaaagcaaatgtggtagcagacgctttgagcagaaaaagctgttgcaatgccttatgccctgaagacatgtgtggcaaattgcagcaagatcttgagcacctaaatttgggcatcgtggaacacgggtacgtagctgccctagaggcacggcctacgctcgtggatcaagtcagagcagctcaggaaaatgatcctgaaatagctgagctaaaaaaaaatatgagggtcggaaaagcccgagatttccatgaggatgagcatggcacaatctggttgggagaaagattgtgtgtgcctgacgacaaagaactgaaggatctcatactcacagaagctcatcaaactcagtattcaattcatcccagcagtactaaaatgtaccaagacctcaaagagaaattctggtgggccagcatgagaagagaaatagccgaattcgtcgcactctgcgatgtttgtcagcgagtcaaagcagaacatcagaggcccgcaggactgctacaacctcttcagatcccggaatggaaatgggaagaaatcggaatggatttcatcactggtttgcccaggacatcgtcagggcatgattcaatttgggtagtcgtggatcgcctcacgaaagttgctcatttcattccggtgcacactacctatacggggaaaaggttggcagagctgtacttagcaaggatcatgtgtctgcatggggtacctaagaagatagtatctgatcgagggagtcagttcacttcaaaattttggcagaaactgcaagaagaattggggactcgtttgaatttcagcacggcttatcatccgcaaacagatggtcagaccgagcgagtaaatcaaatcttggaagatatgttgagagcttgtgcacttgactttggtggagcctgggataaaagtctaccgtatgcggaattctcttacaacaacagctatcagtccagtttgcaaatggcaccgtttgaagcattgtacggacgaaagtgccgcacaccacttttctgggatcaaacaggtgagcgccaactgtttgggacagaagtgttaaccgaagcagaggagaaagttaggaccgtcagggaaagactgcgaatcgcccagtctcggcagaagagttatgctgataaccgccgaagagagcttactttcgaagcaggggattatgtgtaccttcgtgtcactccgctccggggagtacaccggttccaaacgaaaggcaaattggcaccacgctttgtgggaccatacaggattttggaacgccgaggtgaagtcgcttaccagcttgagctcccatctaatatggttggaatccacgatgtgtttcatgtatctcaattgaagaagtgtttgagggtacctgaggaacaagctagctcagagcacattgacatctag

SEQ ID NO: 13927 - DNA, 4766 bp, Oryza sativa
  Clone ID: TFbOSC900398j.C1.o13.np
ctccgggtcaccgacaggtggggcccacctgtcggccccttcttcctcctccagccgacggcaccgccgccgccgaaaccgccaccgacgccgccggtttccccgtttcccgcggcccactccgcccgtaaccccaagcccacgtcgccgcccaccttccccgcacctcccgccagttcgggggcccgcaaacggcgggggggatttgaaatttcccatggtgaagacaaggaatgatccccgtgactccaacgacgccagtggcagcgaagagcagaccgatggagctcatgtcagtggtgcatctggcagcagatcatctccaccgcccgaaaacccaacagtcactcaaatgatgacaatgatgatgcaacagatgcagcaacattaccatcagatgttgcagcaggcgcaacagaaccagcagtttggtcctccaccatcacacgtgtccaaactgttagactttcttcgtatccagccacccactttctcaagcaccaccaacccaatggaggccaatgactggctccgtgctattgagaagaagctgaacctactgcaatgcaacgaccaagagaaagttgcttttgctacacaccagttgcaaggtcccgcttctgcctggtgggataactacgtggcgacccgtctagatgcaacggaggttacttgggcagagttttgtcaaagcttcaggaaggcacagattcctgaagggattatggcacaatagaagagagagttccgtgcgctccagcaaggaaccatgtcagttacagagtacttgcatgagttcaaccgccttgcgcgctacgctcctgaggacgtgcgcaccgatgctgagaagcaggagaagtttttgtttgggctcgacgatgaattgaccaaccagctaatctccggagtctatgaggactttgagaagcttgtggacaaggctatccgccaggaagagcaacgcaacaaaatggaccgaaaaagaaaggcagctcagatcagctttcctcaggggaacaatcagaagcctcgcttcatgacgggacagctaggtgggccttccaccctgatcgtctgtcagcaccgtccctatcacccgagtaacttcgacaacgactacaacggtggcagtcacaacaacagtaagcagcacaaccacaactcgactccacccccactaatggcaccagctcagtcagatccgccagctgtgtcagctcagtcagaacaacccaagaagagggctgtaggaaagccaggaccctgcttcaactgtggcaagcacggccactttgctagcaagtgtccgaagctgaatcgcactggacccaggttcatccaggcccacgccaatcatgtgtctgcagtggaagcacaggcagcaccagaggtcgtgttgggcacgtttccagtgaactcatatccagcaacagttctctttgattcaggtgcctcgcattctttcatttccaaaagatttgctgggacacatggattatcggtagtggaacttaaaataccgatgcaggttcatacccctggaaatgatatgaggacagcacactactgcccctcggtgactatagagatcagaagatcaccgtttctatccaacctcatccttctcgaatctaaagacctggatgtcattcttggaatggattggttgaccagaaacaagggagtgattgactgcgcaagccgcaccatcaccctaaccaacgacaaaggggagaagatcaccttccgttccccagcgtcgcagaagtccgtagcgagtctgaatcaggctgctattgagggtcagacagaaacagtggagaaaagtcccaggaagttggaggatattcctatagtacaagagtatcctgaggtgttcccagaagacctcactacaatgccaccgaagagagaaatcgagttccggatcgatttggcacccgggactactccaatttacaagaggccgtacagaatggcagctaatgagctagcagaggtcaagaagcaggttgacgaacagctgcagaaagggtacatccgaccgagtacttcaccttggggtgctccggttatctttgtggagaagaaagacaagaccaagaggatgtgcgtggattatcgcgcccttaatgaggtcacaatcaagaacaaatatccgttgccaagaattgatgacctgtttgatcagctaaaaggagctaaggtgttttccaagatagacctacgatcaggctatcatcagttgagaattcgggaagaggatattcccaagacagccttcaccactcggtatgggttgtttgagtgcacggttatgtcctttggactcaccaatgcaccggctttcttcatgaacttgatgaacaaagtgtttatggagtttcttgacaagtttgtcgtggtattcattgacgacatacttatttattcaaaatcagaagaggaacatgagcaacatcttcgtctggtacttgagaaattgaaggagcaccagttatatgccaagtttagcaagtgtgacttctggttatcggaggtcaaatttctgggtcacgtcatttctgctcaaggcgtggcagtggatccatcaaatgtggaatcagttacaaagtggaccccaccaaagacagtttctcagatccggagttttcttggacttgcgggctattaccgtcggttcatcgaaaatttctctaagattgccaggcccatgacacagttgctaaagaaagataaaaaattcaaatggtcagctgagtgcaaccaaagttttgaagaactcaagaagaagttagtctccgcaccagttctaattctgccagatcagacgaaagacttccaggtctactgtgatgcatctcgccaaggattgggatgtgtgttgatgcaagaaggcagagtggtcgcatatgcttcgcgacagttgcgcccacacgagaccaattatcccactcatgaccttgagttggcagcagtggttcatgctctgaaaatctggcggcactatcttattggcaaccgctgtgaagtttacactgatcataagagcctgaagtacatcttcacccagcccgacttaaatctccggcaacgaagatggctggagttgattaaagattatgacatggggatacactatcatccaggcaaagcaaatgtggtagcagatgctctgagcagaaagagctattgcaatgcagtatgtaccgaaggcatgtgtgacaaattgcagcaagatcttgagcacctaaatttgggcatcgtagaacacgggtacgtagctgccctagaggcccggcctacgctcgtggatcaagtcagagcagctcaagtaaatgatcctgaaatagctgagctgaaaaagaatatgagggttggaaaagctcgagatttccatgaggatgagaatggcacaatctggttgggagaaagattgtgtgtgcctgacgacaaagaactgaaggatctcatactcacagaagctcatcaaactcagtattcaattcatcccggcagtactaaaatgtaccaggacctcaaagagaaattctggtgggtcagcatgagaagagagatagccgaattcgtcgcactctgcgatgtttgtcagcgagtcaaagcagaacatcagaggcccgcaggactgctacaaccccttcagatcccggaatggaaatgggaagaaatcggaatggatttcataacaggtttgcccagaacatcgtcggggcacgattcaatctgggtggtcgtggatcgactcaccaaagttgctcattttattccagtacacactacctatactgggaaaaggttggcagagctttatctttcaagaatcatgtgtttgcatggggtacctaagaagattgtatctgatcgaggaagtcaattcacttcaaagttttggcagaaactgcaagaagaattggggactcgtttgaatttcagcacggcttatcatccacaaacagatggtcagaccgagcgagtaaatcaaatcttgtaagatatgttgagagcttgtgcacttgactttggtggagcctgggataaaagtctaccgtatgcggaattctcttacaacaacagctatcagtccagtttgcaaatggtaccgtttgaagcattgtacggacgaaagtgccgcacaccacttttctgggatcaaacaggtgagcgccaactgtttgggacagaagtgttaaccgaagcagaggagaaagtcaggaccgtcagggaaagactgcgaatcgcccagtctcggcaaaagagttatgctgataaccgccgaagagagcttactttcgaagcaggggattatgtgtacccttcgtgtcactccgcttcggggagtacaccgcttccaaaccaaaggcaagttggcaccacgctttgtgagaccatacaggatcttggaacgcagaggtgaagtcgcttaccagctagagcttccacctaatatggttggtatccacgatgtgtttcatgtgtctcaactgaagaagtgtttgagggtacctgaggaacaagctagctcagagcacattgacatccaagaagatttgacctacgtggagaagccagttcgtatccttgagaccagtgagagaaggaccagaagcaaggtgatcaggttttgcaaagttcaatggagccaccactcagaggaagaggccacctgggaaagagaagatgaattgaaggccgcccatccgcacctcttcgccagctcttccgaatctcggggccgagattccgtt

SEQ ID NO: 13928 - DNA, 4913 bp, Oryza sativa
  Clone ID: TFbOSC900414j.C1.o9.np
agacgattatcctggtttaggcccttagcatggggtaataccctacgtctggtgatgtagattggatctatgtcaactaaaaagacaagagtgttaccgcttagggttagtgccagcgcccttatagagctagggcaaccgacgacatgcttcgtacagtatccctcataatccggctccagccgacggcaccgccgccgccgaaaccgccaccgacgccgccggtttccccgtttcccgcgcccactccgcccgtaccccacgcccacgtcgccgcccaccttccccgcacctcccgccagctcgcgcgcccgcaaacggcgggggatttgaaatttcccccactctctctctcctcctccatatggtgaagacaaggaatgatccccgtgactccaacgacgccagtggcagcgaagagcagaccgatggagctcatgtcagtggtgcatctggcagcagatcatctccaccgcccgaaaacccaacagtcactcaaatgatgacaatgatgatgcaacagatgcagcaacattaccatcagatgttgcagcaggcgcaacagaaccagcagtttggtcctccaccatcacacgtgtccaaactgttagactttcttcgtatccagccacccactttctcaagcaccaccaacccaatggaggccaatgactggctccgtgctattgagaagaagctgaacctactgcaatgcaacgaccaagagaaagttgcttttgctacacaccagttgcaaggtcccgcttctgcctggtgggataactacgtggcgacccgtctagatgcaacggaggttacttgggcagagttttgtcaaagcttcaggaaggcacagattcctgaagggattatggcacaatagaagagagagttccgtgcgctccagcaaggaaccatgtcagttacagagtacttgcatgagttcaaccgccttgcgcgctacgctcctgaggacgtgcgcaccgatgctgagaagcaggagaagtttttgtttgggctcgacgatgaattgaccaaccagctaatctccggagtctatgaggactttgagaagcttgtggacaaggctatccgccaggaagagcaacgcaacaaaatggaccgaaaaagaaaggcagctcagatcagctttcctcaggggaacaatcagaagcctcgcttcatgacgggacagctaggtgggccttccaccctgatcgtctgtcagcaccgtccctatcacccgagtaacttcgacaacgactacaacggtggcagtcacaacaacagtaagcagcacaaccacaactcgactccacccccactaatggcaccagctcagtcagatccgccagctgtgtcagctcagtcagaacaacccaagaagagggctgtaggaaagccaggaccctgcttcaactgtggcaagcacggccactttgctagcaagtgtccgaagctgaatcgcactggacccaggttcatccaggcccacgccaatcatgtgtctgcagtggaagcacaggcagcaccagaggtcgtgttgggcacgtttccagtgaactcatatccagcaacagttctctttgattcaggtgcctcgcattctttcatttccaaaagatttgctgggacacatggattatcggtagtggaacttaaaataccgatgcaggttcatacccctggaaatgatatgaggacagcacactactgcccctcggtgactatagagatcagaagatcaccgtttctatccaacctcatccttctcgaatctaaagacctggatgtcattcttggaatggattggttgaccagaaacaagggagtgattgactgcgcaagccgcaccatcaccctaaccaacgacaaaggggagaagatcaccttccgttccccagcgtcgcagaagtccgtagcgagtctgaatcaggctgctattgagggtcagacagaaacagtggagaaaagtcccaggaagttggaggatattcctatagtacaagagtatcctgaggtgttcccagaagacctcactacaatgccaccgaagagagaaatcgagttccggatcgatttggcacccgggactactccaatttacaagaggccgtacagaatggcagctaatgagctagcagaggtcaagaagcaggttgacgaacagctgcagaaagggtacatccgaccgagtacttcaccttggggtgctccggttatctttgtggagaagaaagacaagaccaagaggatgtgcgtggattatcgcgcccttaatgaggtcacaatcaagaacaaatatccgttgccaagaattgatgacctgtttgatcagctaaaaggagctaaggtgttttccaagatagacctacgatcaggctatcatcagttgagaattcgggaagaggatattcccaagacagccttcaccactcggtatgggttgtttgagtgcacggttatgtcctttggactcaccaatgcaccggctttcttcatgaacttgatgaacaaagtgtttatggagtttcttgacaagtttgtcgtggtattcattgacgacatacttatttattcaaaatcagaagaggaacatgagcaacatcttcgtctggtacttgagaaattgaaggagcaccagttatatgccaagtttagcaagtgtgacttctggttatcggaggtcaaatttctgggtcacgtcatttctgctcaaggcgtggcagtggatccatcaaatgtggaatcagttacaaagtggaccccaccaaagacagtttctcagatccggagttttcttggacttgcgggctattaccgtcggttcatcgaaaatttctctaagattgccaggcccatgacacagttgctaaagaaagataaaaaattcaaatggtcagctgagtgcaaccaaagttttgaagaactcaagaagaagttagtctccgcaccagttctaattctgccagatcagacgaaagacttccaggtctactgtgatgcatctcgccaaggattgggatgtgtgttgatgcaagaaggcagagtggtcgcatatgcttcgcgacagttgcgcccacacgagaccaattatcccactcatgaccttgagttggcagcagtggttcatgctctgaaaatctggcggcactatcttattggcaaccgctgtgaagtttacactgatcataagagcctgaagtacatcttcacccagcccgacttaaatctccggcaacgaagatggctggagttgattaaagattatgacatggggatacactatcatccaggcaaagcaaatgtggtagcagatgctctgagcagaaagagctattgcaatgcagtatgtaccgaaggcatgtgtgacaaattgcagcaagatcttgagcacctaaatttgggcatcgtagaacacgggtacgtagctgccctagaggcccggcctacgctcgtggatcaagtcagagcagctcaagtaaatgatcctgaaatagctgagctgaaaaagaatatgagggttggaaaagctcgagatttccatgaggatgagaatggcacaatctggttgggagaaagattgtgtgtgcctgacgacaaagaactgaaggatctcatactcacagaagctcatcaaactcagtattcaattcatcccggcagtactaaaatgtaccaggacctcaaagagaaattctggtgggtcagcatgagaagagagatagccgaattcgtcgcactctgcgatgtttgtcagcgagtcaaagcagaacatcagaggcccgcaggactgctacaaccccttcagatcccggaatggaaatgggaagaaatcggaatggatttcataacaggtttgcccagaacatcgtcggggcacgattcaatctgggtggtcgtggatcgactcaccaaagttgctcattttattccagtacacactacctatactgggaaaaggttggcagagctttatctttcaagaatcatgtgtttgcatggggtacctaagaagattgtatctgatcgaggaagtcaattcacttcaaagttttggcagaaactgcaagaagaattggggactcgtttgaatttcagcacggcttatcatccacaaacagatggtcagaccgagcgagtaaatcaaatcttgtaagatatgttgagagcttgtgcacttgactttggtggagcctgggataaaagtctaccgtatgcggaattctcttacaacaacagctatcagtccagtttgcaaatggtaccgtttgaagcattgtacggacgaaagtgccgcacaccacttttctgggatcaaacaggtgagcgccaactgtttgggacagaagtgttaaccgaagcagaggagaaagtcaggaccgtcagggaaagactgcgaatcgcccagtctcggcaaaagagttatgctgataaccgccgaagagagcttactttcgaagcaggggattatgtgtacccttcgtgtcactccgcttcggggagtacaccgcttccaaaccaaaggcaagttggcaccacgctttgtgagaccatacaggatcttggaacgcagaggtgaagtcgcttaccagctagagcttccacctaatatggttggtatccacgatgtgtttcatgtgtctcaactgaagaagtgtttgagggtacctgaggaacaagctagctcagagcacattgacatccaagaagatttgacctacgtggagaagccagttcgtatccttgagaccagtgagagaaggaccagaagcaaggtgatcaggttttgcaaagttcaatggagccaccactcagaggaagaggccacctgggaaagagaagatgaattgaaggccgcccatccgcacctcttcgccagctcttccgaatctcggggccgagattccgtt

SEQ ID NO: 13929 - DNA, 930 bp, Oryza sativa
  Clone ID: TFbOSC423524j.C1.o5.fg
atggcggagaaggaggtcgggaggatcttcgtgggcgggctgtcgtgggacaccacggagcgcacgctcgagcgcgccttcagcgagtacggcaaggtcatcgagacgcagatggtcgtattggaaagagacacaggccgctcccgtggatttgggtttgttacattctcagaacctcgggctgtggatgctgcaattcggggaatgcataatggagaactagatggcagaaccatttctgtgaacaaggctcaacctaggatgaacactgatgatggctatggctatggtggtggtggtggtggtggtggtacttactcatctggtgctagaggtggatatcgtggtggaggtgatgcagttccctctgcaaatgatgactgcttcaaatgtggccgtgcgggacattgggctcgtgaatgtccttattccagtggaggtgggggtggtagaactggaaggtactcacccccttccagatatggcagtggaactggtggtggacgtggtgaccgctttggaggatcagaccgttttgctaaccgctatgttgatgaccgatatgatggtgggcgctatgttgatgatcgctatggtggtggtggacgtgatcgatatgccactgatcgctatccaccaactgccgatcgttttacaggtgacagatatggtggttctgatcgttatgcatcaagtggatttaccagggaaagaagctatgaaagagatggaggacggtccggtggaagttactatcgtgatgaacctagaggctctggtggttatgacagaggtggcatgcgcatggggagtggtgacagatacgggaccggtggacctgctcgctttgctgggagttacagagataggcctgccccatatgatcgtcccagccgggcagcagcacgcacttatgatgaccgctactga

SEQ ID NO: 13930 - DNA, 910 bp, Oryza sativa
  Clone ID: TFbOSC423524j.C1.o9.gp
taatcttcaatgctatccagaataaaattatataagacagcacactcggaacacgattattacactggagggtaattacacagtaccacgataacagggaatcagaatcacccactgcctggagcttaatgtgccaacatactaacaattcaagaactgccttattgtctcactagtaattaaacaaactgcatggaagaacaacactcaaagagtcgatgtactaatacaggaaggcaaataaagtaggaactgcgaactggaacatatatttgtaattctggtcttctgcaatgctccgaagtaacctccatcagtagcggtcatcataagtgcgtgctgctgcccggctgggacgatcatatggggcaggcctatctctgtaactcccagcaaagcgagcaggtccaccggtcccgtatctgtcaccactccccatgcgcatgccacctctgtcataaccaccagagcctctaggttcatcacgatagtaacttccaccggaccgtcctccatctctttcatagcttctttccctggtaaatccacttgatgcataacgatcagaaccaccatatctgtcacctgtaaaacgatcggcagttggtggatagcgatcagtggcatatcgatcacgtccaccaccaccatagcgatcatcaacatagcgcccaccatcatatcggtcatcaacatagcggttagcaaaacggtctgatcctccaaagcggtcaccacgtccaccaccagttccactgccatatctggaagggggtgagtaccttccagttctaccacccccacctccactggaataaggacattcacgagcccaatgtcccgcacggccacatttgaagcagtcatcatttgcagagggaactgcatcacctccaccacgatatccacc

SEQ ID NO: 13931 - DNA, 5607 bp, Oryza sativa
  Clone ID: TFbOSC400058j.C1.o8.fg
atggccgcaagaatggtgacggcggggcttcgtccacctcatgcttgggccaagcgagctgttcggggtggcgcgttggtggtggtgccggcagtggcggagcctaggccatggcaggcagccaggacatgcttgctagggagcgaggctggccgaattaacgttggtgtcgaggctggcacacgggaagagatggtgcaggcgtggcaggccggcgcgtggatggcgacggtaaccggagagctagtgtggcacttgattgatcatctccatgccgggtcattgcttgttactcttggaggttgccgcctcctagacggcttgtggaggagttgcccggtgacctctccgagaagattgtggaggaggcccggcgctggctttgctatcaccggcacgctcttgatggagattgatcaccgcaacctccaactcaatgcccaagctatgaatgctttgttcaactctttgagccaagaggagttcgatagagtgagcaaccttgagactgcatatgagatttggaacaagttggcggagatccatgagggcataagcgagtacaaggatgccaagcttcatttcctcaagatccaatatgagacattctccatgttgcctcatgagagtgtgaatgacatgtatgggaggctcaatgtcattgtaaatgatctcaagggacttggggcaaactataccgatcttgaggttgcccaaaagatgcttagggctctaccagagaagtatgagacccttgtcaccatgctcatcaactctgacatgtcaaggatgacacccgcaagcctcttggggaagatcaacaccaatgacatgtacaagttgaagaagaaggagatggaggaagtctcacattccaagaagtgcattgttctacaagccgaagttaaagacaagggcaagggcaaggtgaatgaagccaatgaggacttggaggaagagattgcccttcttgctagaaggtgctttgagtgtggtgagaagggacactttgcttccaagtgcccttccaaggatgatgatggagacaagtcatccaagaagaagagtggaggctacaagctcatgaagaagctcaagaaggaaggcaagaatattgaggcctttatcggggaatgggactcaaatgaggagagctccgcctcatccgggtccgaagaagaaggtggtgatgatgcaagctccaagaagaagaagatggccgttgttgccatcaaggaggctccatcactcttcgctccactttgtctcatggcaaaggactcctctaaggtagcatttcttagtgatagtgagagtgatgatgattgtgatgatgtttcctatgatgagcttgtgagtatgtttaaggagctctatgcttatagtgagaaggagattgtcaagttcaaggcccgaaagaaggatcatgcttctttggaggtcttgtatgaggagctaaagacctctcatgagagactcaccatttctcatgagaagcttaaggaagctcatgacaacctcctttccactactcaacatggagttctcattgatgttggcatatcttgtgatttgcttgatgatagtgctatttgccatattgctcatgttgtatcatctagcatttctacctcttgtgatgatcttgtggatatgcctagctctagctctagcacttgtgtttctatttgtgatgcctcacttgttgttgagaacaatgagcttaaggagcaagtggttaagctcaacaagagtttggagatgtgcttcaagggaaggctcatgatggtagcattattgctagatatgtgggttcccctatactccgtggtgaactaccgcaccggtgggagccattgtgtgcttgatagtggatgcactcaacacatgactggtgatagggctatgttcaccatatttgaagtaggagggaaagaacaagagaaagtgacatttggagacaatagcaaaggaaaggtaattgggttagttgcaaaaacttcaatgggttggctttggcataggaggctagcccatgtttgcgtgaatcaattgagcaaactttcaaaacgtgatctagttgtgggcttgaaagatgtgaagtttgagaaagataagctttgtagtgcttgtcaagctggcaagcaagttgcatgttctcatcctactaagagtatcatgtccacatctagaccattggagctcttgcatatggatttgtttggcccaacaacctataagagcattggtgtggagaggaaaaatcgtacattgattgagatggcaatgactatgcttgatgaatatggtgtttctgattccttttgggcggaagccataaacaccgcttgccatgcaaccaattggctttatttgcatcgtctcatgaaaaagactttctatgagcgaattattgggaggaagccaaatgttgcctattttcgagtttttggttgcaagtgttatatttatcaaaagggtgttagactaaccaaatttgaaagtcgttgtgatgaagggtttcttctaggttatgcctcaaatagcaaggcataccgggtctacaacaagaacaaaggtattgtggaagaaaccgccgatgttcaatttgatgagactaatggctcccaagaggggcacaagaatctggatgatgtaggtgatgaaggcttgatgagagctatgaagaacatgtcaattggagatgtcaagcctactgaagtggaagacaagccatccacctccactcaagatgagccatctacttccgctacgccaagtcaagctcaagttgaagtggaggaggagaaggcacaagatccacctatgccaccaaggatacacaccgctctttccaaggatcacccaattgaccaagtgttgagtgacattagtaagggtgttcaaactcgatctcgtgtcgcttcaatttgtgaacattactcgtttgtttcttgtcttgagccaaaacatgtagatgaagctctttgtgatccggattggatgaatgctatgcatgaagagctcaacaactttgcaagaaataatgtgtggactttggttgaaagacttagagaccacaatgtcatagggacaaagtgggtctttaggaacaaacaagatgagaacgggttggtggtgagaaacaaggcaaggttggtggcacaaggtttcacacaagttgaaggtttggacttcggtgaaacttttgcccccgtggcaagacttgaggctattcgcatccttcttgcatttgcattatgctttgatataaaactatttcaaatggatgtgaaaagtgcttttctaaatggtgaaattgccgaacttgtctttgttgaacaacctcccggttttgaagatcctaaaaatcctaaccatgtttataaactctcaaaagctctttatggtttaaaacaagctcctagggcttggtatgaaagattgagagattttcttttgtcaaaggatttcaaaattggaaaagttgacaccacccttttcacaaaaatcattggtgatgatttctttgtgtgtcaaatttatgttgatgatttcattttcggttctactaataaggtattttgcaagggatttggtgatatgatgtctagggaatttgagatgtccatgattgaagaattgagcttcttccttggacttcaaatcaagcaactcaaggatgggacgttcgtgagccaaaccaagtacatcaaggatctactcaagaggtttggcttggaggatgcgaagcccatcaagacacctatggcaaccaacgggcatctcgaccttgatgagggaggtaaaccggtagatttaaagctttatcgttctatgattggtagcttgctttaccttactgcatctaggccggatatcatgtttagtgtttgcatgtgtgcacggtttcaagccgctcctaaggagtgtcacttagtggccgtgaaaaggattctaagatatttaaagcattcctctactattggcttgtggtacttaaaaggtgctaagtttaaacttgttggctattccgattcggattatgccggttgcaaagtggatagaaagagcacattcggtagttgccaaatgcttggtagatcccttgtgtcatggtcatccaagaaacaaaactccgtagccctctaccgccgaggcggaatatgtttcggcggaaactatattcttatttttggccaaaatgagattttcctccaaaatgagattgagagagaatttgagaaaagtttcaaaacaaagttgaggtggtctgatcgagctcggtcagcggtcgacggtctgaccgagctcggccgacggtctgaccgacatgtggacggcggtctgaccggccgttatccaccgcaaatgcctccccgcactcgtcatagtcgtcgtgagcccacgcccgatcccgtgagtgaggagtcaagcggagatgagtacgctcaaagtgatgaagaggttgaggccaatgttgagggggctagtgaggaggaaagtggagatgatgtcagtggaagtggagaggatgaggatgaaggaagtgatgatatgcacattgatccctccatccagtttgttgtgaacatgaggaatccatcgcagtataccattttgaggcaccatgatcagtttttgaggcctcgggacacccggaatccccgttttcacaccgctttccaaaagatgtgggtggctggagactatagtgagatgaagtggatgtccgacacccttcagtgttctatctctaggaggcaattctggcggctcctcagtattcgcttggactttggagatgacttgcatgaggagcacactcacaatccgctctccatagactacgtctctcagttttacgaagacggagtgtggtacacacatgggaaggttgccggcttgaggaccatcccctgtgtggttaacaggattgtgagagttaccatcctccctcgccttggtaacaatgatgacattaggggggtggcttggcacgtcatcgatgccatcattcagggccatcaattcgacattgtgtctcttatgatgcaagagattgccatctctaaggctacattcactcagggaatctattatgccccttacatcatgaggttgattcaagacaagcttggggctgttgggcaaaatttaaagaagcacaagcagtacaagccccgccttcagcttggagctccccgtgctcctagggcggcaccctcctctcatcctggagctagctcaagctcagcacctcctcctcctcatgggtatgatccaaatgcttttttctatcctcagtatgcctactttggaatgcaaccaaacgaatactttaacccggtacttggggctattaataccctaagtgaaagcattcaacgcttgtccaccgggcatgaagctttgcatgagaatgttcgtggattgcgcacagatgttggagacttgaatgcttctgtggggagattgcacactagagtgggtacattggattctcgagtccaaatgttggagagctcccaagcatttgtgtatcatcgtcgtcgtgatgctcctcatccttccacttcggcgcgtcctcctcctctacaagagtga

SEQ ID NO: 13932 - DNA, 2796 bp, Oryza sativa
  Clone ID: TFbOSC900191j.C1.o6.fg
atgtcgaacactggacacaacggcaacactggagacaaggagaaggaggttcctgtcaacatcaacggagtcaatactgcctcaaactccaacagaggaccattcttggggtccttttcggtagttggctttgccgcaacactgaaacatcatgcttttgatggttcgaactataagagatggaaagcacgtgcactactatggttgacagcgatgcaatgcttctatgtttcacggggcaaacagagtgaaccgcctctctcttctgagaaggaggctaagttcgaggcttcggattgcctgttccgtggagcattgatcagtgtactcgctgataatatagtggacgtgtacattcacatgccttcacggaaggacatgtatgatgcacttgaggccaagttcagagtttccgacgccggcaacgagctgtatgtcatggagcagttctatgactacaagatggtcgatgaccattctgtagtgcaacaggctcatgagattcagatgctggcaaaggaacttgagaacaacaactgcgagttgccgggcaagtttgtggcgggtggcattattgccaaattgccaccttcttggttggactttgctacttctctaaaacacaaaaggcaaaagttcagtgttactgatctcattggctctttgggtgttgaggagaaggagagggcaaaggacaaccggggcaataagatcgagggagggacaagaagtccgccaacatggttattagcgagggtggatgaacattggggtacggctactaccaattttaagaagaaaggcaagggaaaggccaagggcaactgctttgtgtgcggtaaacctaggcattgggctaagaattgtcctgatcgtagggacaagaagtccgccaacatggttattagcaagggtggaggaacattggggtacggtcgggagaggttcctctttgttgatgggaaacggatagcttgcggctgttcatggtgttgcatgttgactaaagggggaaataaatatttcatgacactgatagatgattgcactagattttgctatgtgtatctattgaaaacaaaggatgaagcattacattactttaagatctataaagctgagacactgcgggactttccaaggaatggttggggtgaggcaatcttgactgcttttcatgtcctgaataaaattccagtaaagcataacttggccaaggtgaatgtacctatagccaaaaagcgtaaacttggaccaaagacggtagactgtgtgttccttggttacgctatcctcagcgtgggttattggttcttaatagtaaactctggagtacccgacatgtgtatgggtacaattactgagtccagagatgccacattctttgacaatgaatttcccatgaaaaatacacctaacacttctagtcaagaacctgttttaccccatgagcactttgcaccgatagaacacaatgatcaaacgcctgaggaaaatcctgaggaggataacattgtagatactcgaaagagtaagagacaaagggttgcaaaattctttggagatgactacattgtatacctcatggattacactccaagaaccatagaagaggcatattcatctcctgacgctgactattggaaggaagtgaaggcaaggcttgtggccaagggttatacccaaaaagaacgcgaggacttttttgacacctattcattagtagcccgcttgaccacgattcaagtactacttgctctggcggcctctcatggtcttctcgttcatcaaatggacgttaagacagctttcctaaatagagagctggaggagaagatctatatggatcaaccagatgagtatgtactagaaggtcaggagggaatggtgtgcaaactgttgaaatctttgtatggcctaaagcaagcacctaagcaatggcatgagaagtttgacacaacacttacatctgctggctttgttgtgaacgaagttgacaaatgtgtgtactatcgctatggtgggggagagggagtgatcttgtgtttatatgtcgatgacatattgatttttggaaccagcctcaaagtgattgaggaggttaaggactttctgtccaaaagctttgaaatgaaggatttgagagtggctgatgttattcttaacattaagctactgagaggagatgagggtgggattatactcgtgcaatctcactatgtggacaagatgatcattggtaagctttggaaaagagtaatgcgctatctaaagggcacagtgagctatggaattcactatactgggtacccaaaagtactggaaggatatagtgactcaaactggatatctgatgctgatgagatagaggccacaagtggatatgtgttcacacttggaggtggcgctgtttcatggaagtcttgcaagcagaccatcttaacgaggtcaacaatggaagcagaactcacagcactagatactgccacagttgaggccgagtggcttcgtgaactcctgatggatttgccggtggttaaaaaaccagtgccagctatcctaatgaactgtgataatcaaacaatgattattaaggtgaatagttcgaaggacaacatgaagtcagctaggcatgtaaagagaagactgaaatctgtcggaaagcagaaaaaatccagagtgatagcactggactatgtccagacagctaaaaatctggtagatcagtttaccaaggggctactacataatgtgatagacagtgcatcgagggaaatgggtttgagacccacttag

SEQ ID NO: 13933 - DNA, 5483 bp, Oryza sativa
  Clone ID: TFbOSC28808j.C1.o2.np
aggggcgaccacccaaccaactaccgcggagaaggcattgacgattttgtggcagagttggctcgcatgaccctggtggtgggctaccccaatgcgtcggagtactcgactgttccgccgctcagtggcaagcttcctcaccgtgttcgtctggaggttcatggctaagtgggcacctgcctcgctaacatggtggttgtggcatctggaggcacagcagatcacgcctgtcaggaggcagcatatctgatgatggccagacttcgtgagcgcgacaactacatcttctgcaacacggcgtaccgtttccaccctcgccgagcaagtggtgacggtgtcagcaccttccgtccgacagccggtgagaacgacaccaccttcggtcacatgtgcgcaatgatgaggggaatggacaggatgcactcggatctgcacaaggcgtccaaggccttgaatgatgggaagctcgtgaggatcatagctctgaaggatgagatagcacgcctgaagaaggagaatgctcacttgaagggtctccccattcccggaggagtccggatccgcaccatgccccgcaagtcgacgactgcacccgtgcgcatttagcttgcgcccaggaacccacctccgcccgcagctctcgcagctcctccagttccgcccgcagttcccgcagctcctgcagctccacctccagtcccggctccagtcccagtgtcagctcccgcgtctgctctctccttcgctccagcatcagccgccaggggtccagccagtggcaacggaggttggttgcctgctactcccagtggcagccgcgaccacagtagcagcagttccagtggctcagagctgggcagcggcgagacgtatctgctagactccaggagccgctcagagggacctggcctcttccttcagatggccaacaccaggaatggcagccgtgcagcaggtgagggcagcaacggcgaagaacgcaccgacggtgggtatcccaacagcgcctccggcaatggtccgcccccgctccccgagaatccgactcttgccccagtaatggctcatcaaactcagatgatggcagccatgatgcagcagatgcagcagcggcaccagcagatgcaccagaggatgcagcagcaagccgagcagcagtagcaacagtttggtccccctccccctcagtccaagctactagagtttttacgcgtcaggccacccaccttttccagcaccaccaaccctatggaggcaaatgactggctccacaccatagagaagaagctcaatctcctacagtgcaatgatcaggagaaggttgccttcgccacacaccagctccaaggtcccgtgtcagcttggtgggacaatcacatggccacccgtccggcaggtacggaggtcacttgggtggagttctgtcgcagctttaggaaggcgtaggtgcccgacggggtcgtggcacagaagaagagagaattccgggcactccaccagggcaaccggacggtaactgagtacctccatgagttcaatcgcctagcgtgatatgcaccggaggatgtccgcactgacgcagagaagcaagagaagttcctagcaggcctagatgacgagctgaccaaccagttgatctctggagactacgccgactttgagaagctggttgacaaggcaattcgtcaggaggatcagcgcaacaaagtggacaggaagagaaagccagcgcagttccggtcaaaccaaggaagtcaccagcgaccgcgcttcactcccggacagcagggtggacctaccaccatgatcgtccgccagcatcgccctttcaactcgagcagcttccacccgggcgctagtggcagctagaaccaccagggaggtcagctcaactgcagtgcagctctgcgcccaccaatggcaccggcacaatcagttccatcagcccaagccaagaaggagactagagcaaagccaaggtcctgtttcaactgtggcgagcatggccactttgccaacaagtgcccgaagccaaggcgtgccgggccaaggtttgcccaagctcgtgtcaaccacgcgtccgcagaggaggcgcaagcagcaccagaggtcgtactgggtacgtttcttgtcaactcagtccctgctacagtactttttgattctggtgcaacgcattctttcatttcaaagaaatttgtggggatgcatgggttaagaaaagaagagcttagtacaccaatgagggttcataccccgggaaatagttcaacctcggtcagttatagccctttagtgctaatagaaatacacctatcacaatttctagccaacctcatccttctcgaatccaaagacctagatgtcattcttgggctggatgggctgaccaagttcaagggagtcattgattgtgcgaatcgcacagtcaccttgaccaatgagaagggagaaaccatggtgtacaagtcaccagtctcaccgaagcagagaatctccttaaatcaaattgaggtggaaaaccctgtgaccaccgaggagaagagttcgcggaaattggaggatatccccatagtctgcgagtacccagaagtgttccccgaagacctcactaccatgccacctaagagagagattgaattccggattgatttggcaccgggaaatgccccaatttacaagagaccgtacagaatggtagccaatgagctagcagaggtcaagaagcaggttgatgagcagttgcagaaagggtacattcgactaagtacttcaccttggggtgctccggtcatttttgtggataagaaggacaagacgaagagaatgtgcgtcgattatcgcgcactcaatgaggtcacaatcaagaacaaatatcctttgccgcgaattgatgatttgtttgatcaactgaatggagctaaagtgttttctaaaatagacctgcgatcaggctatcaccagttgagaattcgggaggggatattcccaagacagccttcaccactcggtatgggttgtatgagtgcacggttatgtcttttggacttaccaatgcacccgcattcttcatgaacttgatgaacaaaatgttcatggaatttctggataagtttgtggtggtattcatcgatgacattcttatctattccaaattggaagaagaacatgagcgacatctccgtctggtactcgagaagttggaggagcaccagttatatgccaagttcagtaaatgcgacttttggctatcggaggtcaaattcttgggtcacgtcattacagctcagggcgtggcagttgatccgtcgaatgtggagtcagttaccaagtggaccccacctaagaccgtgtcacaaattcggagttttcttggacttgcgggttattaccgtcggttcattgaaaatttctccaggatcgccagacctatgactcagttgcttaagaaagatgagaaatttaaatggacagctgagtgtgacaagagttttgaggagttcaataagaaattagtatccactccagttctgattttgcccgaccagacgaaagacttccaagtctattgcaacgcgtcccgtcatgggcttggatgtgttctaatgcaagagggcagagtggtcgcttatgcctcgcggcagttgcgtccgcatgaagggaactatccgacacatgacttggagttggcagcggtggtttatgctttaaaaatctggacgcgttatctgattggcaaccgctgcgaagtatatacggaccataagagtctaaaatatatcttcacccaacctgatgtaaatctccgacagcgaagatggttggagttaatcaaggattacgacatgagcattcactatcatccgggcaaagccaatgtggtggcagatgcattaagcaggaagagctattgcaataccttatgcactgaaggcatgtgtaaggaattgcagcaggagcttgaacacctcaacttggggcttgtagaatacgggtacgtggctgccctagaggcacgacctacgctcgtggatcaagtcagagcagctcaagtaaatgatcctgaaatagcggatatgaaaaagaatatgagggtcggaaaagcccgggatttccacgaagatgaacatggcacaatctggttgggagaaagattgtgcgtacctgacgacaaggaactaaaggatctgatactcaccgaggctcatcagactcagtactccattcatccaggcaacaccaaaatgtaacaagacctcaaagaaaagttttggtgagtcagcatgagaagagaaatagctgaatttgtcgcactctgcgacgtttgccaacgagtgaaggcagagcaccaaaggccagcaggttttctacaacctcttcagatcccgaaatggaaatgggaggagattggaatggacttcataacaggactgccccggacatcatctggccacgattcaatctgggtagtcgtgaatcgactcactaaagttgcccatttcattccagtgcataccacgtatacggggaagaaattggcagagctgtacttggcaaggatcatgtgtctgcatggagtacccaagaagattgtatctgatcgagggagtcagttcacctcaaaattttggcagaagctgcagaaagaattggggacccgtttgaatttcagcacaacctaccatccgcagacagatggccaaaccgaaagggtcaatcagatcttggaagatatgctacgtgcatgtgtgctcgattttggtggagcatgggataaaagtctgccttatgcggaattctcgtacaacaacagctatcaggccagtctacagatggcaccgttcgaagcgttgtatggccggaagtgccgcacacctctctactgggatcaaacaggtgaacgtcaactgttcgcaacagaagtgttaacgaaagcagaagagaaagtcagaaccgtcagagagaggctgagaattgcccagtctcgacagaagagctacgcggacaaccgccgaagggagctcacttttgaagcaggggattatatgtatctccgtgttactccgctccggggagtgcatcgtttccagacgaagggcaagttggcaccacgcttcgtgggaccatacaaaatcttggaacaaagaggagaagtcgcctatcagctagaacttccatccaacatgatcggcatccatgtcatgttccatgtatcccagttaaagaagtgcttgagggtacccgaagaacaagccgattcggagcacattgacatccaagaagatctgacctatgtggagaagccagttcgtatccttgagaccagtgaaaggaggacaagaaacaaggtcaccaggttctgcagggttcagtggagccaccacttagaagaataagcaacctgggaaagggaaaatgggttaaaggccgcccatccgcacctcttcaccagctcttccgaatctcggggtcgagattccgtt

SEQ ID NO: 13934 - DNA, 4788 bp, Oryza sativa
  Clone ID: TFbOSC416746j.C1.o20.fg
atgggaacccctggagatcaaggcatcctcgatgagttctccacaaaccctttccatgcaaagaaaaacaagaactggatactcatagcggacaatgaagtaatagccaacgttgctgcctcctacatgagcttcatgtccgccttgaacttgggactatggctacaatcaggagtaggcacaagagcggcggtagatgactcaataaagaaagccacacccgacaggtggctggtcatgggggctatagctttgagagctgagcccgagttttgggcgcgtcttgtacagaggctcgacgtgtgcacgttcacgcgggagtctggtagtcctcccggcgttgtcttcctcaactccggcgagcgctccgactccggcgagggtcggaacacttggtatcagagccgaagatcatcgggaggcgggatgtcgcggcactccgagccgcacggcgggcgttcgcacacgccgccgcgtcgtcgacgcctatcgatctcgccggagcccactcgtgggcgcggcgggccgaagatcatcgtcaggcgcacgatcaaggaggccaacgcgacgatccagtacccgacgctcacccgcaccaactacgacgaatgggcaatgttgatgcaggtgaacatggaggcagcaggcatctggtacgcggtcgagccgtaccccgacgaggaggtagagtaccgcgacgaccgtctcgctctggcggccattctccgctccgtcccatcggagatgctccccacgctccgtggcaagcgctcggcgcgagctgcgtgggacgcgatcaagacgatccgcgtcggcgtcgagcgcgtgcgcgagagcaaggcgcagcagctccggcgtgagttcgcggcgctgacctggaaggagggggagaccgccgaggacttctccgtgcgcatcaccggcctcgccaacaacctccgcacgcttggcgacaacatctccgacgccgacgtcgtccgcaagatgcttgacgtcgtccccgagcacctggaacagatcgccgtcgcggtcgagacactccttgacctgaacaccgtttcggtcgaggaggtgaccgggcggcttcgcgccgttgagcaacggcgtcacaggtcggcgcccgtcgtcaacaaccaggggcggctcctcctaacgcaggaggagtggatggcgaagctcaagaaccccggagcgtccggagagaaggggacccccagcgggtccggcggaggcggcaacaagcgtaccgggggatcgcgcaggcacgaccgcggcaaaggcggctctcgccaggctgccgggcctggagacggctcgaaccagcccaagaagacggacaagtgccgctactgcggcaagaagggccattgggctaaggaatgccggtcacggttgcgggacgaggcccatctggcccaaggcgaagaagaggaggagcccatgctgatggttgccacggcgcaagtcaacgccatctcgtcttcttccccgccgcgcttcacatcactgccggcgcttgaacagatccacctcgacgagagtaagctcttcgttcagctgggcggcgagcacggaggagaagccaccagatggatcctcgacacgggcgccaccaaccacatgacggggacgcgatctgccttctccgagctgaacaccggcatccgcggcacggtcaagttcggggacggctccgtcgtcggcattgaagggcgtggcaccgtcctcttcaagtgcaaggacggggaacatcaggcgctggagggagtgtaccatattccgcgcctcaccaccaacatcgtcagcctggggcagctcgacgaggagaagttcaagtggagctgtgaagatggagtcctcaagatctggaacaagcagcgtcgactactcgccaaggtggtgcgctcgccgaaccgcctctacgtcgtcaagctcaacatcgggaggccggtctgcctcgcggcacaagggggcgacatcgcctggcgttggcacgcaagattcggccacctcaacttccgcgcgctcgagaagcttggtcgcgccgtcatggtgcgcgggcttcccctgatcaaccatgttgatcaagtctgcgacagctgcctggtcgggaagcagcggcgcctgcccttcccgtctaaggccaagtaccgcgcgaaagaaaaactcgagctggtgcatggggacatctgtgggccggtgacgccggcgacgccaagcgggaacaagctgttccttctcctcgtcgacgatctgagccgctatatgtggctcatcctcctcagcagcaaggaccaagcatcggtggcaatcaagcgcttcctggcgtgcgcggaggcggaagccgggcggaagctgcgcactctgcgcactgaccgcggcggcgagttcacggcgcacgcgttcgcggagtactgcgccgagcacgggatccagaggcacctcaccgcgccgtacacaccccagcagaatggcgtggtcgagaggaggaaccagacggtgatggggatggccagaagcatgatgaaggcgaagtcactgccgggctggttttggggggaggcggtgaacaccgccgtgttcctcctgaaccgggctccaacgcagtgcgtcgacggcaagactccttttgaggtatggcatggtgtcaagcccccagtccattttctccgcacgttcggttgtgttgcacatgtgaagaacggcggccagcgactcgccaagctcgacgacaggagcatgcccatggtgtttgtgggctacgaagctggaaccaaggcataccgcttctataacccggtgtcgcggcgcgttcacgtgtcgcgcgacgccgtgttcgaggaggagcgaagctgggagtggggagccgagaagggagctggacctgacgacgacatcgagccgttcgtggtggagcacctcgccacgggaccaacggggcagggaggccctgtcgccgcgactccgaccgcgacacagcgctctacatcagcaccagctcccatggcgccgcctgcgacaccaagtcaagccggaacgcccacacacggggcggggcctcgtacaccggcttcagcctcttcaccggcaatcgagttcgcctctccgccgcagggggacctcgatctggacaacgaccacgacgacgatgtacctctccgcttccgcaccgttgacaaccttctcggggcatcctcgcctccgggtcttgcagaacgggaagtgacagaggggctcatggtggcgatcgaggacgaaccagcaacggctgaggaagccaagcaagtcaaggagtggcgtgaagcgatgatcgaggagatggcatcgatcgagcacaacaagacctggtctctggtggagctgccggcggggcaacgtgccatcggcctcaagtgggtcttcaagatcaagaaggacgagcacgggaacatcaccaagcacaaggcccgactcgtcgcaaaaggctatgtacaacgccaaggcatcgactatgaagaagttttcgcgccggtcgcaaggattgagtccgtgcgcgtgctcctggccgtggccgctcacaggtcatggtcagtgcaccacatggatgtgaaatcggcgtttctcaacggcgatctggcggaagaagtctacgtgcagcagccgcccggctttgtcgccgccgggcacgagcgcaaggtgctgaagctgcacaaggcgctttacggcctcaagcaggcgccacgcgcctggaactcgaagctcgacagcagcctgctcatgctcggtttcgcccggagcgagtgcgaacacgggctgtacacgcgcagcgacggcgagaagcggctggtggtgggaatctacgtcgacgatctcatcatcacaggaggctccaccgaggtgatcaacacattcaagacggagatgaagactctgttccgcatgagtgatctcggtgtactgtcctactacctcggaatcgaggtccgacaggggcggcgcggcatcgagcttctgcaggccgcctacgccaagaagatactggaaaaggcgggcatgggaacctgcaatccgtgcgcgacgccgatggaggcaaggttgaagctgtccaagcagagcacctcgccggcagtcgacgcgacggagtaccgcagtctgatcgggagtctgcggtacttgatgaacacacggccggacatggcgttcgccgtaggttacctgagcaggttcatggagaaccccaggcaggagcacttggcagccatgaagcacctgctccggtatgtggccggaacgatcgactacggcttggtgtacaccagcggcgacaccgagttcaacctcgtcggctacagcgacagcgacatggccggcgacatcgacgaccggaagagcaccagcggcatcatctacttcctcggcggcaaccctgtggcgtggcagtcgcagaaacagcgcgtggtggcgctgtcgtcgtgtgaagcagagtacatcgctggcgcagcagcagcgtgccagggcgtctggctcagacggctgctgcaggatgtggtgggcgtcagcgggcctccaccacaactcaagatggacaaccagtctgcaatcgccctcagcaagaatccggtacttcacgatcgatctaagcatattgatacaaagtttcattttcttcgtgagtgcgtggatagtggggcggtgcgcctggcgttcgtgagcacccaagcgcagctcgcggacatcatgacgaaggcgctcgggaggtccaagtttcaggagcttcgcgagctgatcggcgtcaccaagctcaagtga

SEQ ID NO: 13935 - DNA, 1044 bp, Oryza sativa
  Clone ID: TFbOSC10366j.C1.o2.fg
atgtcgggtcacacgggggatggtaatgatggtgaaaagggagctaggattccttttgactatccctctacatctacatcttatgtgagtacctatagtggcaaagctccgtactttaatggtaaggactatgccgcttggaagcataagatgaagatgcatttgaagtctattaacccatctatttggagaatagtcgaaaaaggctatgttttgcagaatcctgaagatcccaccaaggaggacaacgagaacgagcacaagaacgctcaagccgctaatgcaatacttagcgccttgagtagaagtgagttcaaccgtgtggatggcattgaaagtgccaaagtgatttgggacacgcttcggaacctgcatgaaggcacggatagtgttcgtgagtccaaggtggagattctcaaggggcaatttgagaggtttgtgatgttggatggagaaatcccaagcgacatgtacgaccggttgagcaagatcgtcaacgagatcaagggacttggctccaaggacatgaccgatgaggttgtggtcaagaagatggttcgggcaatcactccaaggaactctaccttggtgaccatcattcgtgagcgtccggactacaaaactctcacaccttatgatttgctcgggcgtatccttgcccatgacatgctcgtgcaagattccaaggatgtcatccaatatatcaaccaaagctcaaccgcaagcatcaagaaggaagacttggcattgaaggcagaggaagaagaagaagagaaccgcaagagcaagagcaaggtggagatcgatgatgaagagatggctcttttcgtcaagaagttcggcaagttcatgagacaaagcggcttcttcaagggaagctcttccaagcactactccaacaagtcaagtggaagacactccgcaagggtgtgctatgtgtgcaaagagcccgggcacttcattgcggagtgcccccacctcaaggatggttcccacctcaaggaagataagaaaaagggtgagaagaaggatgagaagaagtag

SEQ ID NO: 13936 - DNA, 4531 bp, Oryza sativa
  Clone ID: TFbOSC401417j.C1.o15.np
accagactgagaagtggcggagataagcccacgggggtcgctggggagtccatgccttactcagcaagaaaccaaaacaacaaccaccacaactcgcagcttccaccacctcccactcggaattcgggagcgagtggtagccgtccaaccggcgcgatggatcccactttggctcagattctcgcggcgcagagtcagctcttcgaccgcttggtcgcgactcaggaggccttgggcaatgctctcctccagaacaaccgtcagccacagtctaagctggcggaagtgcagcgtacacagccacctgtgttctctgctgctgctgatcctctcgacgcggatgactggctccgcgatatcgagaacaagcttaacttcgtccgttgtgacgatgaggagaaggcgacctacgccgcctactaccttcagggcgctgcagctgcctggtgggagacttacaagtctacactcccccagggcaccgccatcacctggaacgtgttcaagcagggcttccgcactgctcacgtcccagaagggcttatgaaggccaagaggaaggagttcctcaatctcacccagggggacttgcctttcatggagttccttagtcgcttcaactaccttgcacggtatgcgactgatgagctaggcactactgaggcgaggaaggtgcaactttgccttgatcgccttagccctgagttgaagcacggtctctctacccatgagatcgacagtatgaagacccttgttgacaaggccctccgctgggaggcaagtgagaaggaagtagctgtggaccgcaagcgcaagttcttggcgcgcagggctactgtcagccgttcgagtcgcccacgcacttggcagcctgctccagctgcacgtcctgcttctgctccaccgcagaggctccagtacgcccccggaggctacaaccgtgctgcaaatgttaactgcttcaactgcgggaagttgggacactactccaacaactgtccttacccgcgtcgcaccggtgctcctccgccgcgccccgcagcaccgcagccccgtcctccacagggccgtggcgcccctgctgctgctccacgtgggggccgagccgctcccaagccggctcagaactttgggcgcggtcgtctcaaccacgcgaccgcagaggaggctgttgacgcacccgatgtggtgctaggtacctttcttgttcactcagttcctgtttggtgttatttgattctggtgcatctcattcctttatatccaccaaagtagcaaaacaaaacaacatagccaccacccttttagacacccccatgataatccaatctcctgggtcaaccttcaaaaccagaacaatatgcaaggatgtgcctattctcattgataaggtagagttcaaagccgacctaatccaagtgagttccttaagtttagatgtcatcctaggcatggattggctttccaaacacaaggggaatatcaactgtgcttctaaaaccatctcttttgtcaacaccaatgggaaaacagccaccttcacttccaataaagccaccacctcaaaacagccatgtatcaactctctcatcaaacctgagcttgaatcaatacccgtggtgtgtgaatatcctgatgtcttccctgatgagctaccaggaatgccacccgatcgtgacattgagttcgtgattgatcttgttcctggtgcgacgcctgtcgctaagcaaccctaccgtatgaccagtgatgaattggttgagctcaagaagcaaattgatgagcaactggagaagggtttcattcgacacagcagctctccttggggctgtcccgttctttttgctccaaaaagtgatggtacgcttcggctgtgtgttgactaccgtccactaaatgaggtgacaatcaagaacaagtatccactcccccgcatcgatgatctctttgaccaaatgaccggtgcgcaagtattctccaagattgatttgaggtctggatattttcaactcaagatcagaccggaggatattccgaaaacagctttcagaacccgctatggtttgtttgaatacaccgtagtttctttcggcttaaccaatgctcctgccacttttatgaacttgatgaacaaggttttcatggagtacttggacaaatttgtggtggtgttcattgatgacatcctcgttttctcgaagaatgaggaagaacacgcacaacatctaaggctagtgcttgacaaacttcgtgagcatcaactctatgcaaaattcaacaaatgcgagttttggatgaatgaagtggcctttctcggtcatgtgatatccgggggtggtatcgcagttgatccaagcaaagtggaaagtgtgcttaactgggaacagcccaagaccgtgacagaggttcgagcttttcttggcttagccggttattaccgccggttcattgggaatttctctaagattgctagaccgctgacccaacttctcaagaaggagaacaagtttgtatggtcagaggtatgcgaggcaagtttccaagagttaaagaaaaggctcacaacggccccagtgcttataatgcccgatatccacaagaatttcgatgtctattgtgacgcatctcaaaatggcctcgggtgtgtattgatgcaagaaagaaaggttgtggcctatgcttcacgtcagctgcgccctcatgaactcaattatccgacccatgacttggaattggcagccgtggttcatgccttgaagatctggcgccactaccttatcggtaaaagatgcgaaatctataccgaccacaaaagtttgaagtatttcttcacccaaccagatctgaacctaaggcaaagaagatggttggaactcatcaaagactacgatctcggcatccattaccatcccggtaaagccaatgttgtagccgatgcactcagctggaaacttaaccacatttctgcttctgaacttgtcacacaaccagagttgttactggaatttcagaagctcaatcttggtgtggttgaagaaggttttgttactgccctagcacttcaaccgaccctcctttctcagataaaagaggctcaactcactaaccaggaggtagctgaaattaaaaaggaaatggcaagtggcaagccaactatcttttccttggatgatgatggtgttgttgttcatgggaagcaattgtttgtccccgacactcaacatcttcgggagcttattcttacagaggcacacgagtctcccatgtccatccatccaggttgcactaagatgtaccaagatatccgctctctttattggtggcctaccatgagacgtgatattgctgcatatgttgctatttgtgatgtgtgtcagcgtgtcaaggctgagcaccagcgtcctgcaggtttgcttcaacccttgcaaattcctgagtggaagttcaatgaagttggaatggatttcataacaggtcttcccaagacttctaatggacatgattccatatgggtcatcgttgaccgcttgaccaaggttgcccatttcattccggtgaatgtctcctacaatggtgcaaagctggcaaagctctatttgactcacatcgttcgcttgcatggggtaccgaaggccattgtatcagaccgtggtccccagttcacttcccggttttgggagaatcttcatgagctccttggtactcaattgttctttagcacagcttttcacccacagactggaggtcagactgagcgcaccaatcagatcttggaagatatgctcagatcttgtgtcctcagttacaacaccaattgggagaaatgtctgtcctttgccgaattctcatacaacaacagttaccaagctagcctccaaatgtcaccctttgaggctttgtatggaagaaagtgtagaaccccactcttctggtcagaggtgggagaaagacaactctttggtcctgccgttatcaaggaagccgagcaaaacgtcgctctcatcagaaaccggctaaaggaggcacagtcacgccaaaagagctattccgaccgtcgccgtcgcgaattaagctttgaggttggtgactatgtctatctaaaggtctcgccgttgcggggcactcgccgatttcaagtgcatggaaaattggcgcctcgatacattggtccatatcgagttcttgccaagaggggtcaagttgcttacaagttgcagctgccatctcaactctcagatgtgcacgatgtgttccatgtttcgcaactcaagaagtgccttcgagttcctacggagctcactccgctagaagacatcaatatccaacccgacctctcctaccaagagtatccaatccgcattctagaggaagccgagcgacacatgcgaagccgctccatcaagatgctcaaaatccagtggagcaaccacactcccgaagaagcaacatgggaaagggaagaccgccttagagccgattttcctagtttcttctcctagatcctatcaaatctcggggtcgagattttgtt

SEQ ID NO: 13937 - DNA, 3900 bp, Oryza sativa
  Clone ID: TFbOSC418198j.C1.o21.fg
atgggggaaaatcagggactggaacaagtaatgggtaaattggtagagatgcttgcaaagaagtttaatgaggctccaactacgagtagtgcagtggttcctcatactgaatcggtgcaaaaaattgagttgatgcaaaatgacattaagttggagggtgtaaaaaattatttgagttggtcaagaagagctttattgattttgaagacaaaggggttagaaggatatgttaccggagagataaaggagcctgagaacatatcaagtgttgaatggaagacttggagtactaccaactcgttagtagtagcatggttattaacctcacttatccctgctattgctacaactgttgagaccatttctagtgcaagtgagatgtggaaaactcttactaatctctactcaggagaaggaaatgtgatgttaatggtggaggcacaagagaagataagtgttttgagacagggggagcgttctgttgcagaatatgttgctgaattgaagcatttgtggtctgatttggatcattatgatcctcttgggttagagcaccctgattgtatagcaaaaatgagaaaatggattgagcgtagaagggtcattgagttcttgaagggcttaaattcggagtttgaaggaagaagggatgcaatgtttcatcaaaccacccttcctagcttggatgaggctattgcagctatggcacaggaggagcttaagaagaaagtattgcctagtgccacaccatcttcaccaagccccacctatgtagttgcacaaagtaaagagaccagggagtgcttcaattgtggtgaaatggggcaccttatacgtgattatcgcgctcctcgcaagcctagttatgggagaggaagatttggtgataggggtggagcaagaggtggaagaggttatgcaggtagaggtaacagaggtagaggctatgagtatagaagtgatcacagagctaatgtggtcacgcttgaagagagttgttctggatctacaaatgttgatgttgccaatcttgttcattcttcctcaggtaactcaaaccaagcatttatgtctatcaatagttctcattcaaattggatacttgactcgggtgcatctagacatgtcacggtgaatttggtttcgataagttctcttgttgatcatatgaattgtcgggtctcccttgatcgtgagaattgtttaattcaggagagggaaacagggaagaaacttgggattggcgtcaggcgtgatggactttggtatttggatcgaaaggagacaagtgaagatgtatgtcttgcattgatggctcctacaagtgaagaagaggctaagtttattagaactgataatggaggggagtatataaacaatgaatttagtagctttctttcatcagaaggaatattgcatcaaacttcttgtcctgatactcctccacaaaatggggtggctgagaggaaaaaccgtcatctcttagagacagcccgctcattgatgtatgctatgaatgtacctaaattcttgtggagtgaggcagtaatgacagcaacttatcttatcaaccgcacaccatcaagaatacttggaatgaagacaccatgtgagatgatatttggaaagaatgaatttgttgttccaccaaaagtgtttggttgcacttgttttgttagagatcatagaccttccattggaaaacttgatcctcgggctgtcaaatgcatctttgtaggctattcatctggccagaaggggtataagtgttggagtccatcagaacgacgaacctttgtaagtatggatgttacttttagagaatctgtcccattctatggtgagaagacagatttaagttctttattcattgatcttgatgattcaactagtggtcatgatggtcaccaaatgaaagatgaaatattgggtccaaagggagatgaacaaccaaagaaggaaaagcttgtggttggttcaattccatgtcccatgggtggtcctgttgcacaggagcaagaatggaggaagccacatgaagagaaaaatcttcaagtatacacaaggagaacaaggtgtccagtaatccaacaagttgaagaggataatcaggtagaggaagatgtaagccgtgagcaaggatctttggagtcagggggagaagaagaggaagttagagaagaatctgacttaccaattgccattagaaagagtgtgagaagcaatgcaggtaaacctccactaaggtatggttttgaagctcaagatgagggtgatgatgaaaataatatatccaactatgtttcctatgactccttgtcatccacatataaggcctttatagcatcactagattcagtgcaaatcccaaaggattggagagaagcaaagcaagatccaaggtggcatcaagctatgctagatgaactagaggctcttgaaaagaacaaaacatgggatcttgtaccatttcctaaagggaagaaaattgtcaactgtaagtgggtttatacagtaaagcaaaatcctgatggaaaggtggaaagatacaaagcaaggttggtggctaagggatatagtcaaacatatggaattgattatgatgaaacttttgcaccagtagcaaagatgagcacggtaagaactcttatatcttgtgcagctaattttgattggccattgcatcagttagatgtcaagaatgcattcttacatagagatcttcaagaagaggtgtatatggatgtcccacctggatttgccacttcacaaactaaaggaaaggtgttgagattgaagaaatctttgtatggtcttaaacagtcaccaagagcatggtttgatcggtttaggcgtgcaatgtgtgctatggactataagcaatgtaatggagatcatacagttttctatcatcatagtggagatcatataaccattcttgctgtctatgttgatgatatgattatcactggaaatgattgcttggagataactaggttgaaacggaatctaagcaaagaatttgaggtcaaggacctaggccagttgagatattttctgggtattgaaattgcaagatctcctagagggatagttatttcacagcgaaaatatgtattggacttgcttagtgaaacaggtatgcttggatgttgcccagtctctacaccaattgatcaaaatcataagttatgtgcggagtctggagatccagtgaatagggaaagataccaaagattggtgggaagactgatatatctatgtcatacacgacctgacataacatatgctgtcagtatggtgagtcgatatatgcatgatccaagaagtagtcatatggaggcggtgtatagaatcttgagatatctgaagggaagtccaggcaaaggcttatggttcaagaaaaatggacatcttaagatagaagggtattgtgatgcagattgggctagctgtcttgatgatagaaggtcaacttcaggctattgtgtttatgttggtggcaacttggtatcttggagaagcaagaaacaatccgtagtgtctcgctcaactgctgaagcagaatacagggcaatggcagcgagtttaagtgagttgttgtggttaagaaatcttctagttgagctgaaaattttggggaacactcccatgaagctattgtgtgataataagtcagctattaacattgctaataatccagtccaacatgatagaacaaagcatgtggagatagatcgtttctttatcaaggaaaaattggacgagggagtgttggaattaggatttgtaacgtctggtggacaagttgctgattgtttaacaaagggcttaggtgttaaagagtgtaattgttcatgtgacaagatgggtatgatagatatctatcacccatcttga

SEQ ID NO: 13938 - DNA, 4194 bp, Oryza sativa
  Clone ID: TFbOSC10678j.C1.o1.np
ctctgttcctgagctgcaaaatccttccccggttctgttcacctgcactcacaggtgtacaggacgagcaggtgcttctggaactccgtccgcttgagaacttgcacgggtaggcgggcgatcaagtttttaggtagcgcttcaagcgcgactgctcctgttcttcgcgactactactgctacatcgacgcctttgtcaacatgtcgacggagattggagacaaggaggtgaacgacatcaacggaggcaatactgcctcaaaatccagcggtgggacgttcttagggtctttttcggtagttggctttgctgcatcactaaaaccacatgctttcgatggttcaaattataaaaaatggaaagcacgtacacttttatggttgacggcgatgcattgtttctttgtctcacggggcaaaccgagtgaaccgcctctctctccagaggaggaggctaagttcgaggcttcggattgcctgttccgtggagtattgatcagtgtactcgttgactatatagtggacgtgtacatgcacatgccttcagggaaggacatgtgggatgctcttgaggccaagttcggggtttccgacgccggcagtgagcggtatgtcatggagcagttctatgactacaacatggtcgatgaccgttctgtagtggaacaggctcatgaaattcagatgctggcaaaggaacttgggaacaacaactgcgagttgccggacaagtttgtggcggatggcattattgcaaaattgccactttcttggtcagactttgctacttctctaaaacacaagaggcaagagttcagtattactgatcttattggctctttgggtgttgaggagaaggcaagggcaaatgacaaccggggcaaaaagatcgagggaggttctagcgccaatttggtgcagaagaagaaccctcacacatcccacaacaacaacaagaaagtcaaacttgacgttaaacccaaggctacaaccaattttaagaagaaaggcaagggaaaggcaaaaggagattgctttgtgtgtggcaagcctgggcattaggccatggattgtcctgagcgcaaggacaagaagtctgcaaacatggttattagtgagggcggaggaacattgtggtatggtaaatttttacctacagttctctctgtctgtcactcacctgattggtgggttgatactggtgctaatattcatgtgtgtgcggatatttccctgttttcttcttatcaagtcgggagaggttcctccttgttgatgggaaacggatcgcttgtggctgttcatggtgttggtacggtcgatctgaagtttacttcgggaaagatcgtgcagctgaagaacgtgcagcatgtcccttcaataaagaagaatctagttagcggctctctactgtgtagagatggttttagacttgtgtttgaatacaataaatgtgtcatatctaaatatggaacgtttattggaaaaggttatgacagcggaggtttgtttcgcttttccttgaatgatatgtgtaataaagttgtgaaccatgtaagcgatgataatgatgagtccaatgtgtggcattcgcgactttgtcatgtgaattttggttgtatgacaggcttagccaacatgagtttaattccaaaattcactttagtcaaaggctctaagtgccatacttgtgttcaattaaaacaacctcgcaaacctcacaaggcatctgaggcgagaaatttagcaccactagaacttgttcattccgatatgtgcgaaatgaacggcgtgttgactaaagggggaaagaaatatttcatgacattgatagatgattgcactagattctgctatgtgtacatattgaaaacaaaggatgaagcattacattactttaagatctataaggctgaggtaaaaaaccaactggaaaggaaaatcaaacggttaaggtctgataggggtggagagtatttttccaatgagtttacttctttctgcgaagagtatggaattattcatgagaggacgtctccctattcaccctagtcaaacagggtagccgaaagaaagaaccgcactctaactgagatggtgaatgccatgttagacactgcagaactttccaaggaatggtggggtgaggcaatattgactgcatgtcatgtcctgaatagaattcctactaagcataaggaagtaacaccattcgaggaatgggaaaggaagaaattaaatctctctcacctacgcacatggggctgtttggccaagataaatgtacctatagccaaaaagcgtaaacttggaccaaagaccgtagattgtgtattctttggttatgctatccacaatgtgggagataggttcttaatagtaaattctggagtacccgacatgcgtgttggtacaattactgagtctagagatgccacattttttgagaatgaatttcctatgaaaaatgcacctagcacttctagtcaagaacctattttatcccctgagcactttgtgccgataaaacacattgatcaaacgcttgaggaaaatcctaaggaggataacattgtagcaactcgaaagagtaagagacaaaggactgcaaagtcttttggagatgactacattgtatatcttgtggatgatacttcaagaaccattgaagaggcatattcatctcctgacgctgactattggaaggaagcgatacgctgtgagatgaactcaattatgtctaatggtacttgggaagtcgtcgagcgtatatatgggtgcaagcttgtaggatgcaaatgggttttcaagaaaaagcttaggcctgatggtacaattgaaaagtacaaggcaatgcttgtggccaagggttatacccaaaaagaaggtgaggattttttcgacacttattcaccggttgctcgcttgaccacgattcgagtactactcgctctggcagcctctcatggtctactcgtccatcaaatggatgttaagacagctttcctcaatggagagttggaggaggagatctatatggatcaatcagatgggtatgtactagaaggtcaggagggaatgatgtgcaagctgttaaagtccttgtatggtctcaaacaagcgcctaagcaatggcatgagaagtttgacaatacacttacatctgctggctttgttgtgaacgaagctgacaaatgtgtgtactatcgctatggtgggggagagggagtaatcttgtgtttatatgtcgatgacatattgatctttgggaccagcctcaatgtgattgaggaggtcaaggactttctatccaaaagctttgaaatgaaggatttgggagtggctgatgttattcttaacattaaactactgagaggagatgagggtgggattacacttgtgtaatctcactatgtggacaaggtcttgagtcgctttggttatagtgactgcaaggcagctcctactccttatgatcctagtgtgctattaaggaaaaaccgaagaatagcaagggatcaattgagatactcccagattattggttcattgatgtacttagctagtgcaacgaggcctgacatctcatttgctgtgagcaagttgagccggtttgtttcaaatccgggagatgatcattggcatgctcttgaaagagtaatgcgctatctaaaagggacaatgagctatggaattaactacgctgggtacccaaaagtactggagggctatagtgattcaaactggatatctgatgctgatgagataaaggccacaggtgggtatgtgttcacacttagagggggtgttgtttcctagaagtcttgcaagcagaccatcttaacgaggtcaacaatggaagcagaactcacagctttagatactgccacagttgaggccgaatggcttcgtgagctcctgatggacttgccggtggttgaaaaaccagtaccagcaatcctgatgagctgtgataatcaaacagtgattattaaagtgaacagtttgaaggacaagatgaagtcatccaggcatgttaaaagaagactgaagtctgtcagaaagcagaaaaactccggagtgatagcattagactatgtccagatggctaaaaatctggcagatcagtttaccaaggggctaccacgtaatgtgatagactgtgcatcaaggaagatgggtttgagacccact

SEQ ID NO: 13939 - DNA, 3024 bp, Oryza sativa
  Clone ID: TFbOSC19178j.C1.o1.fg
atgtctgcgcctggagccggcgccgctgctgctgctggaggagatggcggaggtggtgcgccaccaggagctggagctggaggtggtgcgccaggagctggagcctgtgccgcgaacaacaacaccaacggagtcaattctgcctcgcaatccagtggagggccattctcggggtatatccttctcctgttcctgttcccgttgttagcgctttactgctatgttcctgttcctgatattcatgatgtctctagcatgctactgcgttactgctatgttcttgttcctgatattcataatgcgcatgatgccattagtatgctactggttatgttacatgttgtcactagatcaccctacactgtttatgccatgattattgtcttaacattttggattaaaatatgccgatttatgaccatatttctaacaatccaaaaacctgataggttattttcggtagttggctttgctgctgcactgaaaccacatgcttttgatggttctaactataagagatggaaagcacgtgtactattgtggttgacagcgatgcaatgcttctatgtttcacggggcaaacgaagtgaaccacctctttctcctgaggaggaggctaatttcgaggcttcggattgcctgttctgtggagcattgatcagtgtactcgctgacaacatagtggacgtgtatatgcacatgccttctaggaaggacatgtgggatgcacttgaggccaagttcggagtttctgacaccggcagtgagctgtatgtcatggagcagttctatgactacaagatggtcgatgaccgttctgtagtagaacaagctcatgagattcagatgctggctaaggaacttgagaacaacaactgtgagttgccggacaagtttgtggcgggtggcattattgccaaactgccaccttcttggtcggactttgccacttctctaaagcacaagagacaagagttcagtgtttctgatcttattggctctttgggtgttgaggagaaggcgagggcaaaggacgtccggggcaaaaaggttgagggaggttctagtgccaatatggtacagaagaagaaccctcatgcatcccacaacaacaagaaagtcaagtctgatgtcaaacccaaggctgcaaccaactttaagaagaaaggcaagggaaaggcaaagggagactgctttgtgtatggtaagtatgggcattgggccaaggactgtcctgagcgcaaagacaggaagtctgccaacatggtcattagcgagggcggaggaacatcggtgtacggtaaaatattacctacagttctctctatttttcactcacctgattggtgggtggatactggtgctaatattcatgtcgggagaggttcctccttgttaatgggaaacggttcgcttgcggttgttcatggtgttggtacggtcgatctgaagtttacttcgggaaagaccgtgcagctgaagaacgtgcagcatgtcccttcaataaagaagaatcttgttagtggctctctattgtgtagagaaggttttagacttgtgtttgagtccaataaatgtgtcgtatctaaatatgggacttttgttggaaaaggttccaagtgccatacttgtgttcaatcgaaacaacctcgcaagcctcacaagacatctgaggcgaggaatttggcacctctagaacttgttcattctgatttgtgcgaaatgaacggcgtgttgactaaagggggaaagaaatatttcatgacactgatagatgattgcactacattttgttatgtgtatctattgaaaacaaaggatgaagcattgcattactttaagatctataaagctgagtttggaattattcatgagaggacgcctccctattcaccccaatcaaatggggtggtcgaaagaaagaaccgtactctaactgagatggtgaatgccatgttagacactgtagggctttccaaggaatggtggggtgaggcagttttgactgtgtgtcatgtcctgaataaaattccaatgaagcataaggaagtaacaccattcgaggaatgggaaaggaagaaattaaatctctcatacctgcgaacatggggctgtttggccaaggtaaatgtacctatagccaaaaagcagaaacttggaccaaacactgttgattgtgtgttccttggttatgctattcacagtgtaggttatagattcttaatagtaaactctggagtacccgacatgcatattggtacaatttttgagtccagagatgctacattctttgagaatgaatttcccatgaaacatacacctagcacctctagtcaagaaactgtcatgccccatgagcactttgcaccgatagaacacaatgatcaaacgcctgaggaaaatcctgaggaggacaacattgtagatactcgcaagagtaagagacaaagggttgcaaaatcctttggagatgactacattgtatacctcgtggatgacaccccaagaaccatagaagaggcatattcatctcctgacgctgactactggaaggaagcagtacgcagtgaaatggactcgatcatgtctaatggtacttgggaagtcgttgagcgtccatatgggtgcaagcccgtaggatgcaaatgggttttcaagaaaaagcttaggcctgatggtacaattgaaaagtacaagacaaggcttgtggccaagggttatacccaaaaggaaggcgaggacttttttgacacatactcaccagttgctcgcttgaccacgattcgagaactacttgttctggcagcctcttatggtcttctcgttcatcagatggacgttaagacagctttcctaaacggagagctggaggaggagatctatatggatcaaccagacagcctcaatgtgattgaggaggtcaaggactatctgtccaagagttttgaaatgaaggatttgggagaggctgatgttattcttaacatcaaactacaaagaggagatgagagtgggattacactt

SEQ ID NO: 13940 - DNA, 651 bp, Oryza sativa
  Clone ID: TFbOSC2953j.C1.o1.fg
atggctgacaacctttttgtagttgagcaggctcatgagatacagactatggctaaggaactcgaactccttaagtgtgtcttacccgacaaatttgtagccgggtgcattattgtgaaactacctccatcttggagaggtttcggtactgcactcaaacacaagatactggaatactccgttgaggggttgatagcgtctcttgatgttgaggagaaagctcgggaaaaggatgccgcgtctaagggcgatggtgggcagtccagtgccaatgttgtgcacaaggcccaaaacaagagcaaaggaaaatacaaagctcagcagaccaccaacttcaagaagaagaatataaacaacaatcctaaccaggataagatgacttgctttgtgtgtggcctacctggtcatctggcgaagaagtgtccacaacgcaaggggatgaaggcacctgcagggcagacttctaagtctacaaatatgactattggcaacactgtagatgaaagcgggtatggtcgcacagggttccaccgtcctaatggagaatgggtcacatgcttctgttcatggtgttggcacggtagatctgaagtttacttcgggaaagatcgtgcagctgaagaacgtacagcatgtccctactatcgatag

SEQ ID NO: 13941 - DNA, 3327 bp, Oryza sativa
  Clone ID: TFbOSC421135j.C1.o6.fg
atgtctgcgcctggagccggcgccgctgctgctgctggaggagatggcggaggtggtgcgccaccaggagctggagctggaggtggtgcgccaggagctggagcctgtgccgcgaacaacaacaccaacggagtcaattctgcctcgcaatccagtggagggccattctcggggtatatccttctcctgttcctgttcccgttgttagcgctttactgctatgttcctgttcctgatattcatgatgtctctagcatgctactgcgttactgctatgttcttgttcctgatattcataatgcgcatgatgccattagtatgctactggttatgttacatgttgtcactagatcaccctacactgtttatgccatgattattgtcttaacattttggattaaaatatgccgatttatgaccatatttctaacaatccaaaaacctgataggttattttcggtagttggctttgctgctgcactgaaaccacatgcttttgatggttctaactataagagatggaaagcacgtgtactattgtggttgacagcgatgcaatgcttctatgtttcacggggcaaacgaagtgaaccacctctttctcctgaggaggaggctaatttcgaggcttcggattgcctgttctgtggagcattgatcagtgtactcgctgacaacatagtggacgtgtatatgcacatgccttctaggaaggacatgtgggatgcacttgaggccaagttcggagtttctgacaccggcagtgagctgtatgtcatggagcagttctatgactacaagatggtcgatgaccgttctgtagtagaacaagctcatgagattcagatgctggctaaggaacttgagaacaacaactgtgagttgccggacaagtttgtggcgggtggcattattgccaaactgccaccttcttggtcggactttgccacttctctaaagcacaagagacaagagttcagtgtttctgatcttattggctctttgggtgttgaggagaaggcgagggcaaaggacgtccggggcaaaaaggttgagggaggttctagtgccaatatggtacagaagaagaaccctcatgcatcccacaacaacaagaaagtcaagtctgatgtcaaacccaaggctgcaaccaactttaagaagaaaggcaagggaaaggcaaagggagactgctttgtgtatggtaagtatgggcattgggccaaggactgtcctgagcgcaaagacaggaagtctgccaacatggtcattagcgagggcggaggaacatcggtgtacggtaaaatattacctacagttctctctatttttcactcacctgattggtgggtggatactggtgctaatattcatgtcgggagaggttcctccttgttaatgggaaacggttcgcttgcggttgttcatggtgttggtacggtcgatctgaagtttacttcgggaaagaccgtgcagctgaagaacgtgcagcatgtcccttcaataaagaagaatcttgttagtggctctctattgtgtagagaaggttttagacttgtgtttgagtccaataaatgtgtcgtatctaaatatgggacttttgttggaaaaggttccaagtgccatacttgtgttcaatcgaaacaccctcgcaagcctcacaagacatctgaggcgaggaatttggcacctctagaacttgttcattctgatttgtgcgaaatgaacggcgtgttgactaaagggggaaagaaatatttcatgacactgatagatgattgcactacattttgttatgtgtatctattgaaaacaaaggatgaagcattgcattactttaagatctataaagctgagtttggaattattcatgagaggacgcctccctattcaccccaatcaaatggggtggtcgaaagaaagaaccgtactctaactgagatggtgaatgccatgttagacactgtagggctttccaaggaatggtggggtgaggcagttttgactgtgtgtcatgtcctgaataaaattccaatgaagcataaggaagtaacaccattcgaggaatgggaaaggaagaaattaaatctctcatacctgcgaacatggggctgtttggccaaggtaaatgtacctatagccaaaaagcagaaacttggaccaaacactgttgattgtgtgttccttggttatgctattcacagtgtaggttatagattcttaatagtaaactctggagtacccgacatgcatattggtacaatttttgagtccagagatgctacattctttgagaatgaatttcccatgaaacatacacctagcacctctagtcaagaaactgtcatgccccatgagcactttgcaccgatagaacacaatgatcaaacgcctgaggaaaatcctgaggaggacaacattgtagatactcgcaagagtaagagacaaagggttgcaaaatcctttggagatgactacattgtatacctcgtggatgacaccccaagaaccatagaagaggcatattcatctcctgacgctgactactggaaggaagcagtacgcagtgaaatggactcgatcatgtctaatggtacttgggaagtcgttgagcgtccatatgggtgcaagcccgtaggatgcaaatgggttttcaagaaaaagcttaggcctgatggtacaattgaaaagtacaagacaaggcttgtggccaagatggacgttaagacagctttcctaaacggagagctggaggaggagatctatatggatcaaccagacagcctcaatgtgattgaggaggtcaaggactatctgtccaagagttttgaaatgaaggatttgggagaggctgatgttattcttaacatcaaactacaaagaggagatgagagtgggattacacttgtgcaatcccactatgtggacaagattttgagttgctttggatatagtgactgcaagccaactcctactccttatgatcccagtgtgctattaaggaaaaaccgaagaatagcaagggatcaactgagatactatcaaatcattggttcattgatgtacttggctagtgcaacgaggcctgacatctcatttgctgtaagcaagctgagccggtttgtctcaaatccgggagatgatcattggcaggctctagaaagagtaattcgctatctaaagggcattatgagctatggaattcactataccgggtatccaaaagtactagaagggtatagtgactcaaactggatatctgatgctgatgagataaaagccacaagtggatatgtgttcacacttggaggtggcgctgtttcctag

SEQ ID NO: 13942 - DNA, 4242 bp, Oryza sativa
  Clone ID: TFbOSC401917j.C1.o9.fg
atgtcgaacactggagacaaggagaaggagactcccgtcaacaccaacggaggcaatactgcctcaaactccagcggaggaccattcttggggtataaccttattacattatttcaattagaagttttactgttaatgttcatcgcaatgtcaacattgtgtcattatgtgattgttgatgcttattcaacgttaagcatgctcatgttgattacattcaccactatcactggatcaaatcctattgtaaatatcatgattattatcttgttattttggattaaaatatgccgaattatgaccaaatttccaacaatccaaaaacctgataggtcattttcggtagttggctttgctgctgcactgaaaccacatgcctttgatggttcaaactataagagatggaaagcacgtgcactattgtggttgacagcgatgcagtgcttctatgtttcacggggcaaacgaagtgaaccacctctttctcctgaggaagaggctaagttcgaggcttcggattgcctgttccgtggagcattgatcagtgtactcgctgacaacatagtggacgtgtacatgcacatgccttctgggaaggacatgtgggatgcacttgaggccaagttcggagtttctgacgccggcagtgagctgtatgttatggagcagttctatgactacaagatggtcgatgaccgttctgtagttgaacaagctcatgagattcagatgctggctaaggaacttgagaacaacaactgtgagttgccggacaagtttgtggcaggtggcattattgccaaactaccatcttcttggtcggactttgccacttctctaaagcacaagagacaagagttcagtgttcctgatctcattggctctttgggtgttgaggagaaggcgagggcaaaggacgtccggggcaaaaaggttgagggaggttctagtgccaatatggtacagaagaagaaccctcatgcatcccacaacaacaagaaagtcaagcctgatgtcaaacccaaggctgcaaccaattttaagaaaaaaagcaagggaaaggcaaagggagactgctttgtgtgtggcaagtctgggcattgggccaaggactatcctgagcgcaaagacaggaagtctgccaacatgatcattagcgagggcggaggaacatcggggtacggtaaaatattacctacagttctctctgtttttcattcacctgattggtgggtggacactggtgctaatattcatgtatgtgctgacatttctctattttcttcttatcaggtcgggagaggttcctccttgttgatgggaaacgggtcgcttgcggctgttcatggtgttggtacggtcgatctgaagtttacttcgggaaagaccgtgcagctgaagaacgtgcagcatgtcccttcaataaagaagaatctagttagcggctctctattgtgtagagaaggttttagacttgtgtttgagtccaataaatgtgtcgtatctaaatatgggacttttgttggaaaaggttatgacagcggaggcttgttccgcttttctttgaatgacatgtgtaataatcataatgctgtgaaccatattagcgagaatgatgagtctaatgtgtggcattcgcgactctgtcatatgaatttcggttgtatgacgcgcttagctaacatgagtttaattccaaaattcactttggtaaaaggttccaagtgccatacttgtgttcaatcgaaacaacctcgcaagcctcacaaggcatctgaggcgaggaatttggcacctctagaacttgttcattccgatttgtgcgaaatgaacggcgtgttgactaaagggggaaagaaatatttcatgacactgatagatgattgcactagattttgctatgtgtatctattgaaaacaaaggatgaggcattgcatttctttaaaatctataaagctgaggtagaaaaccaacttgaaaggaaaatcaaacggttgaggtctgatagaggtggggagtatttttccaataagtttgcatccttttgcgaagagtttagaattattcatgagatgacgcctccctattcaccccaatcaaatggggtggccgaaagaaagaaccgtactctaactgagatggtgaatgccatgttagacactgcggggctttccaaggaatggtggggtgaggcagttttgactgcgtgtcatgtcctgaataaaattccaatgaagcataaggaagtaacaccattcgaggaatgggaaaggaagaaattaaatctctcatacctacgaacatggggctgtttggccaaggtaaatgtacctatagccaaaaagcggaaacttggaccaaaaactgttgattgtgtgtttcttggttatgctatccacagtgtgggttatagattcttaatagtaaactctggagtacccgacatgcatgttggtacaattcttgagtccagagatgctacattctttgagaatgaatttcctatgaaatatacacctagcacttctagtaaagaaactgtcatgccccatgagcactttgcaccgatagaacacaatgatcaaacgcctgaggaaaatcctgaggaggacaacattgtagatactcgcaagagtaagagacaaagggttgcaaaatcctttggagatgactacattgtatacctcgtggatgacaccccaagaaccatagaagaggcatattcatctcctgacgctgactactggaaggaagcagtacgcagtgaaatggactcgattatgtctaatggtacttgggaagtcgttgagcgtccatatgggtgcaagcccgtaggatgcaaatgggttttcaagaaaaagcttaggcctgatggtacaatcgaaaagtacaaggcaaggcttgtggccaagggttatacccaaaaggaaggcgaggacttcttcgacacatactcaccagttgctcgcttgaccacgattcgagtactacttgctctggcagcctctcatggtcttctcgtccatcagatggacgttaagacagctttcctaaacggagagctggaggaggagatctatatggatcaaccagacgggtatgtactagaaggtcaggagggaatggtgtgtaaactattgaaatccttgtatggcctcaagcaagcacctaagcaatggcatgagaagtttgacaccacgcttacatctgcaggctttgttgtgaacgaagctgacaaatgtgtatactatcgctatggtgggggagaaggggtgatcttgtgcttatatgtcgatgacatactgatctttgggaccagccttaatctgattgaggaggtcaaagactatctgtccaagagttttgaaatgaaagatttgggagaggctgatgttattcttaacatcaaactacaaagaggagatgagggtgggattacacttgtgcaatcccactatgtggacaaggttttgagtcgctttggatatagtgactgcaagccagctcctactccttatgatcccagcgtgctattaaggaaaaaccgaagaatagcaagggatcagctgagatactctcaaatcattggttcattgatgtacttggctagcgcaacgaggcctgacatctcatttgctgtaagcaagctgagccggtttgtctcaaatccgggagatgatcattggcaggctctggaaagagtaatgcgctatctaaagggtactatgagctatggaattcactataccgggtatccaaaagtactagaagggtatagtgactcaaactggatatctgatgctgatgagataaaagccacaagtggatatgtgttcacacttggaggtggcgctgtttcctggaagtcttgcaagcagaccatcttaacgaggtcaacaatggaagcagaacttacagcactagatactgcgacagttgaggccgagtggcttcgtgaactcctgatggatttgccggtggttgaaaaaccagtgccagctatcctaatgaactgcgataatcaaacagtgattattaaagtgaacagttcaaaggacaacatgaagtcatctagacacatcaagagaagactgaaatctgtcagaaagcagaaaaactccggagtgatagcattggactatgtccaaacggctagaaatctggcagatcagtttaccaaggggctaccacgtaatgtgatagacagtgcatcgagggaaatgggcttgatacccacctaa

SEQ ID NO: 13943 - DNA, 568 bp, Oryza sativa
  unsure (1)..(568): unsure at all n locations
  Clone ID: TFbOSC13024j.C1.o3.np
natgactggagcttnnnnnnnnnnnnnnnnnnnnnnnnnnnntctcggcgaggaagagatggaatcaaaggcatgcacctattgtggagaaattggacacgttgctagcatgtgtctcacactctgccctcattgtgaagaagaccatccaccaggggagtgtcccacccgcaaggtcacatgttttctgtgcgaaggtacaaaccatgtgcccaaggattgccaacttagtgtgttgttgaccaagaccgcagaaatccaatgaaccaccctacgattgtctcatcagctagtcagctccaacagcaacatcgacgatatcatccatagcaccaatgctcctcctgctgcacctgactctgcaatcaatcatagcaataataccttcagcaccaaccattctctgggccgacagcctcagcaaagaattgtcgtcgatggaagaagttgtgtctctccccgacctactccaggccgagcgaagggcaatcaacctcaggagggcgatacaaagcagaagaccgttatccgcttcaaccagcaatcagaaggaagcttctcctgtgaa

SEQ ID NO: 13944 - DNA, 3465 bp, Oryza sativa
  Clone ID: TFbOSC400479j.C1.o1.fg
atggctggacgaacggcgacgacggcggcgctaggctacatggtgctagggctctaccggcgacgagaggcgaaggcgagggtggcggcaggatttttagggtgttacaaagatgatgggcaccaacggcattgtgctcgcaatggcgagcgtgaggacagatttggaaaactcaaggttaccataccaaaattttgtggtaccaatgatcctgaggagtatctcacttgggaatttaaggttgataagatatttcgtatgcgcaactacacagaagaaacaaagctacacatggcatcacttgaatttgatgagtatgctctgatttggtgggagcaaatgctgaaccaaagggaggaacacgatgaacttgctgttgctacatgggtagagatgaagcatgagatgcgtgcacgatttgttcctagtcactacaagcgtgatctttttgaaagattgcagaatatgaggcaaggaacacgctctgtagaagagtactacaaggagatggagaaagccatgattcgagccaaaatatacaacactattgtgcaattggtgcaccaagctacaaaggcagagcatcaagtgcaagaagatgcaaaggtggcacacaacacctcatttactactcgctctttgtccagtgggggtagaccgaccccaaagtttaacttgagcaagaacttcatctccagcaactctccttctctcaatttagcaagtaagaaagaggagagtacacaaagtgcaagcaagaaatttgttgttcctacaggtagcagcacctcttcggtgggttctacaccaaagagtagcaatattcagtgcttcaaatgccttggacgtggtcacatgcagaaggactgcccaaataataagacaatgctgattttggaggatggtgaatatgaatcaacaagtgaagataaggatgatctagctgctgatttgacgcattttgatgatgctcaagaggaggatgaggaaaatggtgttgtgtattatgactttgaagagggaccttcacttgttgttactccaaaagttttgacggttcagcccaagattgatcatgaacaacgatgcaatttatttcagaccaaggcaaaagttgatggcaaggtatgcaaagtaatcattgatggtggtagttgtcatagcctagctagtaaggagatatgcaacaagcttggtttgaatctggtgcgtcatcctcatccgtatcatgtacaatggtttagtgattgtggggaagtgaagatacaattcatggtgcaagtaacatttcagattggggactattgtgacactgtggagtgtgatgtggtgccaatgacggtgtgtcacttgctgcttggtaggccgtggcaatatgatcgtgcggcgcaacatgatggccgtacaaatcagtacaagttgaggtggaaagaaaaggacatagtgctgcgacctatgactccttcacaaattataaatgagaattgccaaaagctagaagttgttgttcagagtgataaaaaaagagagcaaaagattgttatccacaaatcgaaagatggtacatggcgcatgtgtgttgattgtagagcaattaatagcatttctgttagatatcgccatcctattcctaggcttgatgatatgctagatgaacttagtggtgctgtcatattctctaaaattgatttgcgtagtggttaccatcaaattcgaatgaaagaaggggatgaatggaaaattgcctttaaaacaaagtttggattgtatgagtggttagtaatgccttttggtttgactaatgcaccaagtacattcatgcgtctgatgaatcatgttctaagggctttcattgggaaatttgtggtagtgtactttgatgacattttgatatatagtaaaacaatggaggaacatcttgctcacattcggcaagtgctagagatgcttaggtctgaacgcttgtttgctaactttgaaaagtgcactttttgcagagaaaaggaaggtaagcccattgcatattttagtgagaagcttggtagtgcacaattgaattaccctgtttatgataaagaactctatgctcttgtacgtgctttggaaacttggcaacattatctttggccgaaggagtttgttattcattctaatcatgaagctttgaaatatttaagaggccaagctaatctgaaccgtaggcatgctaagtgggttgagtttattgagtcctttccatacattgtgcgatataagaaaggaaaagagaatgtggttgctgatgctttatctcgcaagagtgtgcttttgactcaattagacgtgaaagtttcaagtttagagagtttgaaagaattgtactctaaggatagtgaattttcagatccatattctaagtgtttggatgggaaaggctgggagaagtatcatgtgcatgatgggtttttatttcgtgctgacaagctatgtgttccagaatcgtctttgaggcatgacgttgagaggtatgtgcaaaggtgtgtcactagtcataaagcaaaatcgaaattgaatccccatggtttgtacactccattacctgttcctaatgcaccttgggaggatattagtatggactttgttctaggattgcctaggacaaggagggggagggattcaatatttgtagctgttgatagattttcaaaaatggcacactttattccctgtaacaaaagcgacgacgcgtcgcatgtagctgacttgtttttcagggaggttgtacgcttgcatggagtacctcgcactattgtatcagatcgtgatgtcaagttcatgagttatttttggaagactttgtgggctaagcttgggactaagttgttgttttcaacgacttgtcactcccaaattgacggacaaatggaggtggtgaatcgaacactttctatgttgctgagaatgatgattaagaagaacttgaaagaatgggaagattgtttgccacatgtggagtttgcatataacagggtggtacattctactactcaactcagtccgtttgaggtcgtgtatggcttcaacccaatcacaccacttgatttgctgcccctgccacttcaagaacgtgccaatatggaagcaacaaagcgtgcagattatgtgaagaaaatgcatgagaagacgaaggagaccattgagaggataattcagtcctatgctgcaaaggcaaacaaagacagaaagaagatgctatttcaacccggtgaattagtttgggtgcaccttcgtaaggatcgttttccggagaagcggaagtccaagcttatgccacatggagatgggccattcagggttttggagaaaatcactgacaatgcttacaagatagatcttcccggtgattacacagttagtaacacattcaatgtggttgatttgtcaccattctttggcacggaagaaacagattcgaggacgatttaa

SEQ ID NO: 13945 - DNA, 3123 bp, Oryza sativa
  Clone ID: TFbOSC401033j.C1.o4.fg
atggctgacaaccgttctgtagtcgaacaggctcatgagatacaaaccatggctaaggaactcgaactccttaagtgtgtcttacccgacaaatttctggccgggtgcattattgcgaaactacctccatcttggagaggtttcggtactgcactcaaacacaagagacaggaatactccgttgaggggtggatagcgtctcttgatattgaggagaaagctcaggaaaaagatgccgcgtctaagggcgatggtgggcagtccacagccaatgttgtgcacaaggcccaaaacaagagcaaggggaaatacaaagctcagcagaccaccaacttcaagaagaagaacaacaacaacaattctaatcaggatgagaggacttgctttgtgtgtgatcaacctgaccatctggccaggaagtgtccacaacgcaagaggatgaaggcacttgcagggcagacctctaagtctgctaatgtgaccattggcaacactggagatggaagcgggtatggtcacacggggttccaccgtcctaatggggaatgggtcacatgcttctgttcatggtgttggcacggtagatctaaagtttacttgggaaagatcgtgcagctgaagaacgtgcagcatgtcccttctatcgacaggaatcttgttagtggctcccgtctgactagagacggatttaagttggttttcgagtctaataaagtagtcatgtctaaacatggatattttattggtaaaggttatgagtgcggaggcctgttccgcttttccctttctgatttctgcaataagtctgtgaaccatatttgtggcagtgtggatgatgaggctaatgtatggcactcacgtttatgtcatattaattttggcttgatgtctcggctttccagcatgtatttaattcctaggttttccattgtcaaaggttctaagtgccatagttgtgtgcaatcaaagcaacctcgcaagcctcacaaggctgctgaggagagaaacttggcacctctagaattcctacactcagatctctgtgaaatgattggggtgttgacgaagggtggaaaacgatatttcatgacgttgattgatgatgctactagattttgctatgtgtacttgttgaaaatgaaagacgaggctctagactattttaaaatttataaggcagaagttgaaaatcaacttgatagaaagataaaaagacttaggtctgatcgtggtggagagtttttctcaaacgagtttgacttattctgtgaggaacatggcattatacatgagagtgcgcctccctattcgcccgagtctaatgggattgctgaaaggaagaaccgcacactgaccaacttggtgaatgccatgttggacaccgcgggattacctaaggcatggtggggggaggcattgttgacctcgaatcatgtgttaaacagagttcctaacagaaataaggacaaaacaccatatgagatatggatagggagaaaatcatcactttcttacttgcgcacatgggggtgcttggcgaaagtcaatgtaccaataacgaagaagcgcaaacttagaccaaagactatggactatgtctttctgggatatgctcaccacagcattgccgatagatttttaatagttaaatctgaggtacctgacatgcatgttggtacaattatggagtctcgtgatcctaccttctttgagagctttttcccaatgaatgatacacatagtagttctagccaaccctctgaaataattcccagttcaatcacaccaccagaacaaactgaatatacacatgaacatgttactgaggaggatgacagtgaagctcctcaaaggagcaaaagacaaaggacgactaagtcttttggtgatgatttcactgtgtacctcgtggatgaaactcctaagtcaatttcagaagcatacgcatctcctgatgcagactactggaaggaggctgtccgtagtgaaatgaattccattatcgctaacgggacttgggaggtgacagagcgaccctatgggtgtaagcctgtggggtgcaagtgggtgttcaagaagaagctcaggcctgacggtactattgaaaagtacaaggctcggcttgtcgctaagggctatactcagaaagaaggcgaagatttctttgacacttactcacctgttgctagattgaccataattcgtgtgctactttccctagcagcctcacatggtcttctcgttcatcaaatggacgttaagacagcttttcttaatggagagctggatgaggagatctatatggatcaacctgatgggtttgtagttgaaggtcaagaaggcaaagtgtgcaaattgttgaagtctttgtatggtctgaaacaagttcctaagcaaaggcatgagaaatttgacaaaacattgacatctgcaggctttacagtcaatgaggcagataaatgtgtgtactatcgccatggtggggatttgggagtagctgatgttatcttaaacattaagctaattagaggtgagaatgtgattacactcttgcagtcccattatgtggagaagatcttgaatcgctttggctacattgatagtactatggaattggggcttcactattctgggtattctgcggtactggagggatatagtgattttaactggatctctgatgtggatgagatcaaagccactagtggatatgtcttcacactaggtggtgctgctgtttcgtggaggtcttgcaaacagactattttgacgaggtcaaccatggaagcagaactgatggcactagatactgctactgttgaggcagaatggctgcgtgatctattaatggatctgcctattgttgaaaaaccggtgccggctatccttatgaactgtgacaatcaaacggtaattgtcaaagtgaatagttctaaggataatatgaaatcgtctagacatgtgaaaagacgattgaagtctgtcaggaaattgagaaactccggagttataacattggattacatccaaacagctagaaacctggcagatcctttcacgaagggactatcacgaaatgtgatagataatgcatcgaaggagatgggtttgagacctatgtga

SEQ ID NO: 13946 - DNA, 2184 bp, Oryza sativa
  Clone ID: TFbOSC420097j.C1.o9.fg
atgtccgacgctcggtctcggcgttcggtcgcctcgagcactcggcgtcagcaggacgccgagctcgccgcagcagaagagcgcaggcgagcaacggctcagaccgctgcagcagcagcgagggcggccagactggcggcagcggagttggcagcagccagggcggaggcggaggcggaggcggcggaagatgcggcacgtgcggcggaggtagaggttgagaccttgcgcagcagcatcaacggctccattgccggcgacatcaccgccgacagggagcttgaggagctggcaagaggaagggcacgggagagagcagagcggtgggcagcagcccacctccacggcggcggcggcggcccaagggaccgcgcgtccgcagacgggaacccagacgggcgcaggcgtgccggcggcagcccggagctcgcacgcggccctcgcaggcagcacggctctctctcccctgatcggcgccatggtcaccacggtgtccagacggtggtcagggactttggtcccggcggtgggtggcctactctcaccaaaaccaactacatcgagtgggccgcggtgatgagggtgaggctccaggtgtggcacatgtgggaggcagtccggtacagtgacgtcgactacgacgaggatcggcgggcactggatgccctcatcgctgcagtcccgcccgagatgcagttctcgctttcccagaagcggactgccaaggaggcctgggacgccatcgctgcggcacgcatcggcagtgaccgcgcccgcaagtccacactgcaggcactccgcaaggagtgggagaacctggccttcaagccaggtgaggatgttgatgactttgctctccgtctcaacactctcttgcagaaaatggtgcagtacggcgacgacacctacgacgaggagagagctgtcgagaagctcttccgctgcgtccctgagaagtacagacagatcgctcgctcgatcgaatctctgctggacctctccacgatgtcgatcgaggaggcgttaggtcgcctcaaggtcgtcgatggtgatgagccacagcctctctcggggcccatcaccatcggcgggaagctccatctcactagggagcagtgggaggcctctcagggtgacgggaggaagggggagtcatcttccccgacaggcggccgtaagccgcgcaaggcgcggggaggtgtccagctacggtgggcgcgaagacgtgccgagggtggcgcccgcagaggcgcccagggcattgccaccggcaaccacaagccggcacgagacgacgcctgccgcaactatggcaagcttggccattgggccaaagactgtcgacagccacgacgcggccaggcccacgtcgcacgggtggaggaggaagagccggctctgctcctggctcacgcaagcatcgagctacctccagcggcaccggccgcagcggctttcctccaccttgatgagccgaaggtactcgtctccctctgcaacggctccagcaacgacaaggctgatgggtggtaccttgacaccggcgccacccatcacatgaccggccgacgggagttcttcaccgagttcgactccagcgtccgaggctccgtcaagttcggggacgcctccggcgtggagatcaagggtgttggctccgtcaccttcaccgccaagtccggtgagcacaggctgctcaccggagtctactacatccccgcgttgaggaattctatcatcagcgtgggacagctggatgagaacggctcacgcgtgttggtcgaggacggactcatgaggatttgggatcgccgtcgtcaccttcttgccaaggtaaccagaggcactaatcgactctacatcctcagcgcgcaggtcgcacaaccagtttgcctcgccgctcgtcgggacgacgaggcgtggcagtggcacgagcgcttcgggcacctccacttcgaggccctgaagcagctcagtgccaaggagatggtgcgaggcatgccgtgccttgatgtcacgcccagaaattcccgaatagaattccaagcagaatgtgcattaaaatccccgtccaggaccagccggggtacacaaacgacaatgttgacattcagatccacgtcttacaaacatcataaaagtcttacaaaaaatgcagcggaaaacaaaagaaactggagctaa

SEQ ID NO: 13947 - DNA, 5370 bp, Oryza sativa
  Clone ID: TFbOSC100146j.C1.o1.fg
atgtcgaacgaggtgaaccatgtagggaaggctcccatgtttaatggcacaaactattccacttggaaaattaaaatgtctactcacctcaaagctatgagcttccatatttggagtattgttgatgtaggttttgctatcaccggcaagcccttgacggagattgatcaccgcaacctccaactcaatgcccaagccatgaatgctttgttcaactctttgagccaagaggagtttgatagagtgagcaaccttgagaccgcatatgagatttggaacaagttggcggagatccatgagggcacgagtgagtataaggatgccaagcttcatttcctcaagatccaatatgagacattctccatgttgcctcatgagagtgtgaatgacatgtatggaaggctcaatgtcattgtgaatgatctcaaggggcttgggacaaactacaccgatcttgaggttgcccaaaagatgcttagggctctaccggagaagtatgagacccttgtcaccatgctcatcaactccgacatgtcaatgatgacacccgcaagcctcttggggaagatcaacaccaatgacatgtacaagttgaagaagaaggagatggaggaagcctcaccttccaagaagtgcattgctctccaagccgaagttgaagataagggcaagggcaaggtgaatgaagccaatgaggacttggaggaagagattgcccttcttgctagaaggttcaatgatctcttgggaaggagaaaggagagaggaaggggctccaactccaataggagaagaaatagaagacccaacaagactctctccaacttgaggtgctttgagtgtggtgagaagggacactttgcttccaagtgcccttccaaggatgatgatggagacaagtcatgcaagaagaagagtggaggctacaagctcatgaagaagctcaagaaggaaggcaagaagattgaggccttcatcggggaatgggactcaaatgaggagagctccgcctcatccgggtccgaggaagaaggtggtgatgatgcaagctccaaaaagaagaagatggccgttgttgccatcaaggaggctctatcactcttcgctccactttgtctcatggcaaagggctcctctaaggtaacatctcttagtgataatgagagtgatgatgattgtgatgatgtttcctatgatgagcttgtgagtatgtttgaggagctccatgcttatagtgagaaggagattgtcaagttcaaggccctaaagaaggatcatgcttctttggaggtcttgtatgaggagctaaagacttctcatgagagactcaccatttctcatgagaagcttaaggaagctcatgacaacctcctttccactactcaacatggagctctcattgatgttggcatatcttgtgatttgcttgatgatagtgctacttgccatattgctcatgttgcatcatctagcatttctatctcttgtgatgatcttgtggatatgtctagctctagctcttgtatttctatctgtgatgcctcacttgttgttgagaacaatgagcttaaggagcaagtggctaagctcaacaagagcttggagaggtgcttcaagggtaagaacactcttgacaagattttgagtgagcaacggtgcatccttaacaaggagggacttggattcattccaaagaagggtaagaaaccttctaaccgtgccactcgttttgtcaagagcaatggaaggctcatgatggtagcattgttgctagatatgtgggttcccctatactcggtggtgaactaccacaccggtgggagccattgggtgcttgatagtggatgcactcaacacatgactggtgatagggctatgttcaccacatttgaagtaggagggaatgaacaagagaaagtgacatttggagacaatagcaaaggaaagtctattgttgccgagcttttcaaaaagtttgcaaaaagggcccaaaatgaatttagttgcactcttgtgaaaattagaagtgacaatggttccgagtttaagaataccaatatcgaggactattgtgatgatcttggcattaaacacgaactttccgctacctactcacctcaacaaaatggtgtagtggagaggaaaaatcgtacattgattgagatggcaaggactatgcttgatgaatatggtgtttccgattcttttggggcggaagccataaacaccgcttgccatgcaaccaataggctttatttgcatattctcttgaaaaagactttctatgagctaattgttggaaggaagccaaatgttgcctattttcaagtttttggttgcaagtgttatatttaccgaaagggtgttagactaaccaaatttgaaagtcggtgtgatgaagggtttcttctaggttatgcctcaaatagcaaggcataccgggtctacaacaagaacaaaggtattgtggaagaaaccgccgatgttcaatttgatgagactaatggctcccaagaggggcacgagaatttggatgatgtaggtgatgaaggcttgatgagaaccatgaagaatatgtcaattggagatgtcaagcctattgaagtggaagacaagccatccacctccactcaagatgagccatctacttccgctatgccaagtcaagctcaagttgaagtggaggaggagaaggtacaagatccacctatgccaccaaggatacacaccgctctttccaaggatcacccaattgaccaagtgttgggtgacattagtaagggtgttcaaactcgatctcgtgtcgcttcgatttgtgaacattactcgtttgtttcttgtcttgagccaaaacatgtagatgaagctctttgtgatccggattggatgaatgctatgcatgaagagctcaacaactttgcaagaaacaaggtgtggactttggttgaaagacctagagaccacaatgtcatagggacaaagtgggtatttaggaacaaacaagatgagaacgggttggtggtgagaaacaaggcaaggttggtggcacaaggtttcacaaaagttgaaggtttggactttggtgaaacttttgcccccgtggcaagacttgaggctattcgcatccttcttgcatttgcatcatgctttgatataaaactatttcaaatggatgtgaaaagtgcttttctaaatggtgaaattgctgaacttgtctttgttgaacaacctcccggttttgaagattctaaatatcctaaccatgtttacaaactctcaaaagctctttatggtttaaaacaagctcctagggcttggtatgaaagattgagatattttcttttgtcaaaggatttcaaaattggaaaagttgacaccaccctttttacaaaaatcattgatgatgatttctttgtgtgccaaatttatgttgatgacatcatattcggttctactaatgaggtattttgcaagaaatttggtgatatgatgtcgagggaatttgagatgtccatgattggagagttgagcttcttccttggacttcaaatcaagcaactcaaggatgggacgttcgtgagccaaaccaagtacatcaaggatctactcaagaggtttggcttggaggatgcgaagcccatcaagacacctatggcaaccaacgggcatctcgaccttgatgagggaggtaaaccggtagatttaaagctttatcgttctatgattggtagcttgctttaccttaccgcatctaggccggatatcatgtttagtgtttgcacgtgtgcacggtttcaagccgctcctaaggagtgtcacttagtggccgtgaaaaggattctaagatatttaaagtattcctctactattggcttgtggtacccaaaaggtgctaaatttaagcttgctggctattccgattcggattatgccggttgcaaagtggatagaaagagcacatccggtagttgccaaatgcttggtagatcccttgtgtcatggtcatccaagaaacaaaactccgtagccctctccaccgccgaggcggaatatgtttcggcagctatgcctccccgcactcgccatggtcgtcgtgagcccatgcccaatcccgtcaatgagaatgaggaatcaagcggagatgagtatgttcaaagtgatgatgacaatatggaaaatgttgagggtgatgagatggaagtaagtgatgatggtgatgacaatgggagtggcaatggtgaagatgatgaggcaagtgatgatgggagtcctctcgattccaccatccaatttgtgtttaatttgaggaatgctcaacaatacactatcctccgtcatcatgatcaattccggaggcctaacgattgtaatgatccaagatttcatacccagttccaaaagtccgtgtatgaacaagtgtatgccaacaaagccttcgccgaacacaagtggatttcttggaggcacattggtgagacaccggagtttgaagatttgcaagagatgttctggaccgttgggattgatagaattgtcaccatgaagcaatcttttgatgaagatctcatccggcaattctatgccaccgtatgggtgtccggcgattgtgatgcaatgaagtggatgtcggggacccttcaatgctctatcaaccgccgtgaattcaaggagctcttgcacattcgcttcaacaatggggatgaccttcatgatgagcacacccacaaccccttccccattgatcacttttctcagatttatgaagacgggggaaggcacacatatggaaaggtggcggtaagggccaccatcctcccaagatgcggcaacaatgatgacatacgcggagttgcttggcatgtcattgatgccattttggatggtcgtcggtttgatgttatcaaccttatgatgaaggagattgccatctcaaaggggactattggacaaggaatctattatgctccctacataatgaggttgattcaaagcaagttgggacaaattggtcacaatttaaaagaacataaggagtacaagcctcgtctccaactctcctcccctaaagctcctcgtgtgcgccaaccaacatttgatcaaggtgcaagctcaagtgcagccccccctcctcctcatgggtctgatccaagtgcttttttccatccacaatatgcctactttggaatgcaacccaatgaattcttcaacccggtccttggggctattaataccctaagtgaaagcattcaacgcttatccaccgggcatgaagcattgcatgaagatgttcgtggcttgcgcaccgatgttggcaacttgaatacttcggtgggaagattgcatactagggtgggtgtattggattcttga

SEQ ID NO: 13948 - DNA, 2166 bp, Oryza sativa
  Clone ID: TFbOSC102011j.C1.o13.fg
atggctctccctcaccggaccggtaccatggtcaccacaggatttaggccgtcatcagggaagtcggccctggcggtgtgtggcctaaaccctaccctcaccaagaccaactacgtcgagtgggccgtggtgatgaggataaggctccaggtgcgacacatgtgggagccagttcggcacggcgacgtcaactacgacgaggatcaacgggcgcccagaagcggactgccaaggaggcctgggacgccatcgctgcggcacgcatcggaagcgaccgcgctcgcaagtccacattgcaggcacttcgcaaggagtgggagaacctggccttcaagccagaagttggtgtcgtatggcgacgacacctacgatgaggagagagccgtcaagaagctcttccgctgcatcccagagaagtacaagcagattgctcgctcgatcgagtctctgttggacctctccacgatgtcgatcgaggaggcgataggaagcttcatctcactcgagagcagtgggaggcctgccagggtgacgggaagaagagggagtcctcttcctcgacaggccgcaagcgcggcaagggacacgtcctgcgaggacgcacccagggtggcgcccgcggaggcgcctaagccggcgcgagatgacgcctgccgcaactatggcaagtttggccattgggccaaagactgccgacagccacgacacggccaggccaacgtcgcacaggtggaggaggaggaagagtcggctctgctcctggcacacgcaagcatcgagctatctccagcggcaccggccgcagcggctttcctccaacttgatgagccgaaggccctgaagcggctcagtgccaaggagatggtgcgaggcctgccgtgccttgaccacgtgaagcagctctgcgacgtctgcgtgttaacaaagcagaggcggctcccctttccccagcagataagcttccgagccaaggagcggctcgagctcgtgcacggggacttgtgtggcccagtgacaccggccacaccaggaggacgacgttacttcatgctgctcgtcgacgacctctcccgcttcatgtgggtaatggttctcggcagcaagggagaggttgcggacgccattaggcgcgcgcaggctgctgcggaggcggactgcggcggcgaattcacggcggctgaattcgcatcgtactgcgctgatgagtgcattcagcaccactacttcgcgccgtacagcccgcagcagtacggcgtcgtcgagcggcacaaccagacggttgtagggatggctcgagcactcctcaagcagagggggatgccggccgttttctggggagaggcggtggtgacggctgtctacatcctcaaccgctcgactaccaaggcccgtacgaggcttggcatgggcgcaagccggcgcccccgagcctccaccgactccagcagcgacacgctctcgagctacgacttcggctgcaatgagttcttcgctgacaccatcacaaccggcgaccccacgcactccagcaccaacagccacccctccgggcacatccactccgacgccaggttgtgtcaagcacagcccggtggagttcgctactccgctctctcacgacgaggagcgcatcgacgcataccacgacacaggaggggatgccttcgcccccgtggtgcgatccccggcaaggagggcaaggtgctcctccttgcgctggctgctcaggaaagctggtgcgttcatcacatgaacgtcaagtcagcgtttctgaacgacgacttgaaggaggaggtctacgtacaccagccgccaggatttgcgatccccgacaaggagggcaaggtgctactcctgcacatggctctctatggcttgtggcaggcaccgagggcgtggaataccaagttggattccacgctcaaggggatgggcttcgagcaaagcccgcacgaggtagccatcaaccggctgggcaatggaggaaatgtcctgctggtgggtgtctacgtcgacaacttggtaattaccggcaccaaggatgcggaggtggcggcgttcaaggaagagatgaaggccaccttccagatgagtgacctagggcctctcttcttctacctagggatcgaggtgcaccaggacgactccgggatcacgtttcgatag

SEQ ID NO: 13949 - DNA, 3875 bp, Oryza sativa
  Clone ID: TFbOSC10931j.C1.o1.fg
ccgaagttgaagacaagggcaagggcaaggtgaatgaagtcaatgagaacttggaagaagagaatgcccttcttgctagaaggttcaatgatttcttgggaaggagaaaggagagaggaaagggctccaactcaaataggagaagaaatagaagacccaacaagactctctccaacttgaggtgctttgagtgtggtgagaagggacactttgcttccaagtgcccttccaaggatgatgatggagacaagtcatccaagaagaagagtggaggctacaagctcatgaagaagctcaagaaggaaggcaagaagattgaggccttcatcgaggaatgggactcaaatgaggagagctcgcctcatccgggctcctctaaggtaacatctcttagtgatagtgagagtgatgatgattgtgatgatgtttcctatgatgagcttgtgagtatgtttgaggagctccatgcttatagtgagaaggagattgtcaagttcaaggccctaaagaaggatcatgcttctttggaggtcttgtatgaggagctaaagacttctcatgagagactcaccatttctcatgagaagcttaaggaagctcatgacaacctcctttccactactcaacatggagctctaattgatgttggcatatcttgtgatttgcttgatgatagtgctactttccatattgcttatgttgcatcatctagcatttctacctcttgtgatgatcttgtggatatgtctagctctagctctagctcttgtgtatctatttgtgatgcctcacttgttgttgagaacaatgagcttaaggagcaagtggctaagctcaacaagaggttggagaggtgcttcaagggtaagaacactcttgacaagattttgagtgagcaacggtgcatccttaacaaggagggacttggattcattccaaagaagggtaagaaaccttctcaccgtgccactcgttttgtcaagagcaatggaaggctcatgatggtagcattgttcctagatatgtgggttcccctatactcggtggtgaactaccacaccggtgggagccattgggtgcttgatagtggatgcactcaacacatgaccggtgatagggctatgttcaccacatttgaggtaggaaggaatgaacaagagaaagtgacatttggagacaatagcaaaggaaaggtaattgggttaggtaaaattgctatctccaatgatttgtcaattgataatgtctctcttgttaaatctctaaatttcaatttgctttcggttgctcaaatttgtgatcttagcttgtcatgtgctttcttcccgcaagaagttattgtttctagccttcttgacaagtcttgtgtgttcaaaggttttagatatggaaatctttatttggttgatttcaattctagtgaagcaaatttgaaaacttgtttagttgcaaaaacttctttgggttggctttggcatagaaggctagcccatgttggcatgaatcaattgagcaaattttcaaaacgtgatctagttatgggcttgaaagatgtgaagtttgagaaagataagctttgtagtgcttgtcaagccggcaagcaagttgcatgttctcatcctactaagagtatcatgtccacatctaaaccattggagctcttgcatatggatttgtttgacccaacaacctataagagcattggtggtaatagtcattgtcttgtgattgttgatgattattctcgctatacttgggtgttctttttgcatgataagtctattgtcgccgaccttttcaaaaagtttgcaaaaagggcccaaaatgaatttagttgcactcttgtgaaaattagaagtaacattggttccgagtttaagaataccaatatcgaggactattgtgatgatcttggtattaaacatgaacttttcgctacctactcacctcaacaaaatggtgtagtggagaggaaaaatcgtacattgattgagatggcaaggactatgcttgatgaatatggtgtttccgattccttttgggcggaagccataaacaccgcttgccatgcaaccaataggctttatttgcatcgtgtcttgaaaaagacttcctatgaggtaattgttgggaggaagcctaatattgcctattttcgagtttttggttgtaaatgttatattcatcgaaagggtgttagactaaccaaatttgaaagtcggtgtgatgaagggtttcttctaggttatgcctcaaaaagcaaggcataccgggtctacaacaagaacaaaggtattgtggaagaaaccgccgatgttcaatttgatgagactaatggctcccaagaggggcacgagaatttggatgatgtaggtgatgaaggcttgatgagagttatgaagaacatgtcaattggagatgtcaagcctattgaagtggaagacaagccatccacctccactcaagatgagccatctacttccgctatgccaagtcaagctcaagttgaagtggaggaggagaaggcacaagaaccacctatgccaccaaggatacacaccgctctttccaaggatcacccaattgaccaagtgttgggtgacattagtaagggtgttcaaactcgatctcgtgtcacttcgatttgtgaacattactcgtttgtttcttgtcttgagcgaaaacatgtagatgaagctctttgtgatccggattggatgaatgctatgcatgaagagctcaaaaactttgcaagaaacaaggtgtggactttggttgaaagacctagagaccacaatgtcatagggacaaagtgggtctttaggaacaaacaagatgagaacgggttggtggtgagaaacaaggcaagattggtggcacaaggtttcacacaagttgaaggtttggactttggtgaaacttttgcccccgtggcaagacttgaggctatttgcatccttcttgcatttgcatcatgctttgatataaaactatttcaaatggatgtgaaaagtgcttttctaaatgatactaaatatcctaaccatgtttacaaactctcaaaagctctttatggtttaagacaagctcctagggcttggtatgaaagattgagagattttcttttgtcaaaggatttcaaaattggaaaagttgacatcactcttttcacaaaaatcattggtgatgatttctttgtgtatcaaatttatgttgatgacatcatattcggttctactaatgaggtattttgcaaggaatttggtgatatgatgtctagggaatttgaaatgtccatgattggagagttgagcttcttccttggacttcaaatcaagcaactcaagaatgggacgttcgtgagccaaaccaagtacatcaaggatctactcaagaggtttggcttggaggatgcgaagcccattaagacacctatggcaaccaacgggcatctcgaccttgatgagggaggtaaaccggtagatttaaagctttatcgttctatgattggtagcttgctttaccttaccgtatctaggccggatatcatgtttagtgtttgcatgtgtgcacggtttcaagccgctcctaaggagtgtcacttagtggccgtgaaaaggattctaagatatttaaagcattcctctactattggcttgtggtacccaaaaggtgctaaatttaagcttgttggctattccgatccggattatgccggttgcaaagtggatagaaagagcacatccagtagttgccaaatgcttggtagatcccttgtgtcatggtcatccaagaaacaaaactccgtagccctcttactgccgagacagaatatgtttcggcgggtagttgttgtgcccaattgctttggatga

SEQ ID NO: 13950 - DNA, 880 bp, Oryza sativa
  Clone ID: TFbOSC17329j.C1.o1.gm
gggcggtcagaccggccacatagtggcggtctcaccggcgtgccctgcccggtgacctctccgagaagattgtggaggaggcccggtgccggctttgcaatcaccggcacgcccttgatggagattgatcaccgcaacctccaactcaatgcccaagccatgaatgctttgttcaactctttgagccaagaggagtttgatagagtgagcaaccttgagaccgcatatgagatttggaacaagttggcggagatccatgagggcacaagtgagtacaaggatgccaagcttcacttcctcaagatccaatatgagacattctctatgttgcctcatgagagtgtgaatgacatgtatgggaggctcaatgtcattgtgaatgatctcaaggggcttggggcaaactacaccgatcttgaggttgcccaaaagatgcttagggctctaccagagaagtatgagacccttgtcaccatgctcatcaactccgacatgtcaaggatgacaccggcaagcctcttggggaagatcaacaccaatgacatgtataagttgaagaaaaaggaaatggaggaagcctcaccttccaagaagttcaatgatttcttgggaaggagaaaggagagaggaaagggctccaactcaaataggagaagaaatagaagacccaacaagactctctccaacttgaggtgctttgagtgtggtgagaagggacactttgcttccaagtgcccttccaaggatgatgatggagacaagtcatccaagaagaagagtggaggctacaagctcatgaagaagctcaagaaggaaggcaagaagattgaggccttcatcgaggaatgggactcaaatgaggagagctcgcctcatccgg

SEQ ID NO: 13951 - DNA, 3423 bp, Oryza sativa
  Clone ID: TFbOSC19010j.C1.o1.fg
atgtcgaacgaggtgaaccatgtagggaaggctcccatgtttaatggcacaaactattccacttggaaaattaaaatgtctactcacctcaaagctatgaggttccatatttggagtattgtggatgtaggttttgctatcaccggcacgcccttgacagagattgatcaccgcaacctccaactcaatgtccaagccataaatgatttgttcaactctttgagccaagaggagtttgatagagtgagcaaccttgagaccgcatatgagatttggaacaagttggcggagatccatgagggcacaagtgagtacaaggatgccaagcttcacttcctaaagatccaatatgagacattctccatgttgcctcatgagagtgtgaatgacatgtatgggaggctcaatgtcattgtgaatgatctcaaggggcttggggcaaactacaccgatcttgaggttgcccaaaagatgcttagggctctaccggagaagtatgagacccttgtcaccatgctcatcaactccgacatgtcaaggatgacaccggcaagcctcttggggaagatcaacaccaatgacatgtacaagttgaagaagaaggagatggaggaagcctcaccttccaagaagtgcattgctctccaagccgaagttgaagacaagggcaagggtaaggtgaatgaagccaatgagaacttggaggaagagattgcccttcttgctagaaggttcaatgatctcttgggaaggagaaaggagagaggaaggggctgtaactctaataggagaagaaatagaagacccaacaagactctctccaacttgaggtgctttgagtgtggtgagaagggacactttgcttccaagtgcccttccaaggatgatgatggagacaagtcatccaagaaaaagagtggaggctacaagctcatgaagaagcttaagaaggaaggcaagaagattgaggccttcatcggggaatgggactcaaatgaggagagctccgcctcatccgggtccgaggaagaagatggtgatgatgcaagctccaagaagatgaccgttgttgccatcaaggaggctccatcactcttcgctccactttgtctcatggcaaagggctcctctaaggtaacatctcttagtgatagtgagagtgatgatgattgtgatgatgtttcctatgatgagcttgtgagtatgtttgaggagcttcatgcttatagtgagaaggagattgtcaagttcaaggccctaaagaaggatcatgcttctttggaggtcttgtatgaggagctaaagacttatcatgcgagactcaccatttctcatgagaagcttaaggaagctcatgacaacctcctttccactactcaacatggagctctcattgatgttggcatatcttgtgatttgcttgatgatagtgctacttgctatattgctcatgttgcatcatctagcatttctacctcttgtgatgatcttgtggatatgtctagctctagctctagctcctgtgtttctatttgtgatgcctcacttgttgttgagaacaatgagcttaaggagcaagtggctaagctcaacaagagcttggagaggtgcttcaagggtaagaacactcttgacaagattttgagtgagcaacggtgcatccttaataaggagggacttggattcattccaaagaagggtaagaaaccttctcaccgtgccactcgttttgtcaagagcaatggaaggctcatgatggtagcattgttgctagatatgtgggttcccttatactcggtggtgaactaccacaccggtgggagccattgggtgcttgatagtggatgcactcaacacatgaccggtgatagggctatgttcaccacatttgaagtaggagggaatgaacaagagaaagtgacatttggagacaatagcaaaggaaagtctattgttgccgagcttttcaaaaagtttgcaaaaagggccaaaaatgaatttagttgcactcttgtgaaaattagaagtgacaatggttccgagtttaagaataccaatatcgaggactattgtgatgatcttggtattaaacacgaactttccgctacctactcatctcaacaaaatggtgtagtggagaggaaaaatcgtacattgattgagatggcaaggactatgcttgatgaatatggtgtttctgattccttttgggcggaagccataaacaccgcttgccatgcaaccaatatactttatttgcatcctctcttgaaaaagacttcctatgagctaattgttgggaggaagcctaatgttgcctattttcgagtttttggttgcaagtgttatatttaccaaaagggtgttagactaaccaaatttaaaagtcagtgtgatgaagggtttcttctaggttatgcctcaaatagcaagacataccgggtctacaacaagaacaaaggtattgtggaagaaaccgccgttgttcaatttgatgaaactaatggctcccaagaggggcacgagaatttggatgatgtaggtgatgaaggcttgatgagagctatgaagaacatgtctattggagatgtcaagcctattgaagtggaagacaagccatccacctccactcaagatgagccatctacttccgctacgccaagtcaagctcaagttgaagtggaggaggagaaggcacaagatccacctatgccaccaaggatacacaccgctctttccaaggatcacccaattgatcaagtgttgggtgacattagtaagggtgttcaaactcgatctcgtgtcgtttcgatttgtgaacattactcgtttgtttcttgtcttgagccaaaacatgtagatgaagcactttgtgatccggaatggatgaaggctatgcacgaagagctcaacaactttgcaagaaacaaggtgtggactttggttgaaagacctagagaccacaatgtcatagggacaaagtgggtctttaggaacaaacaagatgagaacgggttggtggtgagaaacaaggcaaggttggtggcacaaggtttcacacaagttgaaggtttggactttggtgaaacttttgcccccgtggcaagacttgaggctgttctcatccttcttgcatttgcatcatgctttgacataaaactatttcaaatggatgtgaaaagtacttttttaaatggtgaaattgccgaacttgtctttgttgaacaacctcccgattttgaagatcctaaaaatcctaaccatgtttacaaactctcaaaagctctttatggtttaaaacaagctcctagggattggtatgtgtcggtgatatgggaccgggagtatcatgaccagaggcttgaggcagacgcaatcgcccacgtggcctggcaccttcggggacgtcgggcccgagggtga

SEQ ID NO: 13952 - DNA, 3231 bp, Oryza sativa
  Clone ID: TFbOSC27261j.C1.o6.gm
atggagcggggcgggccctgcgacggcctctgtcgcttccggattcacctaggcaccagaggggactgcccgttgcccgctagggacgggggctttgctatcaccggcacgtccttgacggagattgataaccgcaacctccaactcaatgcccaagccatgaatgctttgttcaactctttgagccaagaggagtttgatagagtgagcaaccttgagaccgcatatgagatttggaacaagttggcggagatccatgaggacacaagtgagtacaaggatgccaagcttcatttcctcaagatccaatatgagacattctccatgttgcctcatgagagtgtgaatgacatgtatgggaggctcaatgtcattgtgaatgatctcaaggggcttggggtaaactacaccgatcttgaggttgcccaaaagatgcttagggctctaccagagaagtatgagacccttgtcaccatgctcatcaattccgatatgtcaaggatgacacccgcaagcctcttggggaagatcaacaccaatgacatgtacaagttgaagaagaaggagatggaggaagcctcaccttccaagaagtgtattgctctccaagccgaagttgaagacaagggcaagggtaaggtgaatgaagccaatgaggacttggaggaagagattgcccttcttgctagaaggttcaatgatctcttgggaaggagaaaggagagaggaaggggctccaactccaataggagaagaaatagaagacccaacaagactctctccaacttgaggtgctttgagtgtggtgagaagggacactttgcttccaagtgcccttccaaggatgatgatggggacaagtcatccaagaagaagagtggaggctacaagctcatgaagaagctcaagaaggaaggcaagaagattgaggccttcatcggggaatgggactcaaatgaggagagctccgcctcatccgggtccgaggaagaaggtggtgatgatgcaagctccaagaagaagaagatggccgttgttgccatcaagattgtcaagttcaaggccctaaagaaggatcatgcttctttggaggtcttgtatgaggagctaaagacttctcatgagagactcaccatttctcatgagaagcttaaggaagctcatgacaacctcatttccactactcaacttggagctctcattgatgttggcatatcttgtgatttgcttgatgatagtgctactcgccatattgctcatgttgcatcatctagcatttctacctcttgtgatgatcttgtggatatgtctagctctagctctagctcttgtgtttctatttgtgatgcctcacttgttgttgagaagaatgagcttaaggagcaaatggctaagctcaacaagagcttggagaggtgcttcaagggtaagaacactcttgacaagattttgagtgagcaacggtgcatccttaacaaggagggacttggattcattccaaagaagggttatgcctcaaaaagcaaggcataccgggtctacaacaagaacaaaggtattgtggaagaaaccgccgatgttcaatttgatgagactaatggctcccaagaagggtacgagaatttggatgatgtatgtgatgaaggcttgatgagagctatgaagaacatgtctattggagatgtcaagcctattgaagtggaagacaagccatccacctccactcaagatgagccatctacttccgctacgccaagtcaagctcaagttgaagtggaggaggagaaggcacaagatccacctatgcctccaaggatacacaccgctctttccaaggatcacccaattgaccaagtgttgggtgacattagtaaggatgaagctctttgtgatccggattggatgaatgctatgcatgaagagctcaacaactttgcaagaaacaaggtgtggactttggttgaaagacctagagaccacaatgtcatagggacaaagtgggtctttaggaacaaacacgatgagaacgggttggtggtgagaaacaaggcaagggaatttgagatgtccatgattggagagttgagcttcttccttggacttcaaattaagcaactcaaggatgggacgttcgtgagcaaaaccaagtacatcaaggatctactcaagaggtttggcttggaggatgcgaagcccatcaagacacctatggcaaccaacgggtatcttgaccttgatgagggagtgatgcctccccgcacttgtcatgatcgtcgtgcgcccactccggatcccgtgagtgagcctggggaatcgagcggagaggattacgctcaaagtgatgaagaggttgaggcaaatgttgagggggctagtgaggaggcaagtggagatgatgacagtggaagtggagaggatgaggatgaaggaaggaaagcttttgcagagcataagtggatttcttggagagacatcaatgagactccagagtttgagggcttgcaggatctcttcaagactgttggcattgatcggattatgactctcaagcaagactacaatgaagatctgatccggcagttttatgctacagtgtgggtggctggggactatagtgagatgaagtggatgtccgacaccctccagtgttctatctctaggaggcaattctggcggctcctcaatattcgcttggactttggagatgacttgcatgaggagcacacccataatccgctctccatagactacctctctcagttttatgaagatggagtgcggtacacacatgggaaggttgccggcttgaggaccatccccagtgtggttaacaggattgtgagagctaccatcctccctcgccttggcaacaatgatgacattaggggggtggcttggcacgtcatcgatgcgatcattcagggtcgtcagttcgacattgtgtctctcatgatgcaagagattgccatctctaaggggaccttcactcagggaatctattatgccccttacatcatgaggttgattcaagacaagcttggggctgctgggcaaaatttgaagaagcataagcagtacaagccccgccttcagcttggaactccccgtgctcctagagcggcgccctcctctcatcctggagctagctcaagctcagcacctcctcctcctcctcatgggtatgttccaaatgctttcttccatcctcagtatgcctactttggaatgtag

SEQ ID NO: 13953 - DNA, 961 bp, Oryza sativa
  Clone ID: TFbOSC31820j.C1.o1.fg
atggagttgggctcgcctcaacagggagtaggaaaccagcgagtttccgaacctcggctttgctatctcaccggcacgcccttgacggagattgatcacagcaacctcctactcaatgctcaagtcatgaatgctttgttcaactctttgagccaagaggagttcgatagagtgagcaaccttaagatcgcatatgagatttggaacaagttggcggagatccatgagggcacaagtgagtacaaggatgccaagcttcatttcctcaagatccaatatgagacattctcaatgttgcctcatgagagtgtgaatgacatgtatgggaggctcaatgtcattgtgaatgatctcaaggggcttggggcaacctacaccgatcttgaggttgcccaaaagatgcttagtgctctaccggagaagtatgagaccctaatcgccatgctcatcaactccgacatgtcaaggatgacacccgcaagcctcttggggaagatcaacaccaatgacatgtacaagttgaagaagaaggagatggaggaagcctcaccatctaagaagtgcattgctctccaagccgaagttgaagacaagtggaagagcaaggtgaatgaagccaatgatgacttggaggaagagattgcccttcttgctaaaaggttcaatgatctcttgggaagaagaaaggagagaggaaggggctccaactccaataggagaagaaatataatacctaacaagactctctccaacttgaggtgctttgagtgtggtgagaagggacactttgcttccaagtgcccttccaaggctaatgatggagacaagtcatccaagaagaagagtggaggctacaagctcatgaagaagctcaagaaggaagggaagaagattgaggccttcattgggcaatgggactcaaatgaggagagctccacctcatccgggtccgaagaagaag

SEQ ID NO: 13954 - DNA, 5592 bp, Oryza sativa
  Clone ID: TFbOSC400192j.C1.o40.np
agatttgtcattaatcaccgaaaccaaattaaggcacttgaacttacacccgccgctcaactccttagcgtccgaggcggatgtggtggccacggcggcggatggtggtcgatgcggagtcgggagcactgcggtgggcggcggcggacggatccgcctttcccgacggtgggagcggagggggtggtgggagtggacggcgcgacagctagtgtggcacttgatcatctccacgccgggtcatcgcttgttactcttggaggttgccgcctcctagacggcttgtggaggagttgcccggtgacctctccgagaagattgtggaggaggcccggtgccggctttgctatcactggcaagcccttgacggagattgatcaccgcaacctccaactcaatgcccaagccatgaatgctttgttcaactctttgagccaagaggagttcgatagagtgagtaaccttgagaccgcatatgagatttggaacaagttggcggagatccatgagggcacaagcgagtacaaggatgccaagcttcatttcctcaagatccaatatgagacattctccatgttgcctcatgagagtgtgaatgacatgtatgggaggctcaatgtcattgtgaatgatctcaaggggcttggggcaaactacaccgatcttgagattgcccaaaagatgcttagggctctaccggagaagtatgagacccttgtcaccatgctcatcaactccgacatgtcaaggatgacacccgcaagcctcttggggaagatcaacaccaatgacatgtacaagttgaagaagaaggagatggaggaagcctcaccttccaagaagtgcattgctctccaaaccgaagttgaagacaagggtaagggcaaggagagaggaaggggctccaactccaataggagaagaaatagaagacccaacaagactctctccaacttgaggtgctttgagtgtggtgagaagggacactttgcttccaagtgcccttccaaggatgatgatggagacaagtcatccaagaagaagagtggaggctacaagctcatgaagaagctcaagaaggaagggaagaagattgaggccttcatcggggaatgggactcaaataaggagagctccgcctcatctgggtccgaggaagaaggtggtgatgatgcaagctccaagaagaagaagatggccgttgttgccatcaaggaggctccatcactcttcgctccactttgtctcatggcaaaaggctcctctaaggttacatctcttagtgatagtgagagtgatgatgattgtgatgatgtttcctatgatgagtttgtgagtatgtttgaggagctccatgcttatagtgagaaggagattgtcaagttcaaggccctaaagaagaatcatgcttctttgaaggtcttgtatgaggagctaaagacctctcatgagagactcaccatttctcatgagaagcttaaggaaactcatgacaacctcctttccactactcaacatggagctcacattgatattggcatatcttgtgatttgcttaatgatagtgctacttgccatattgctcatgttgcatcatctagcatttctacctcttgtgatgatcttgtggatatgcctagctctagctctagctcttgtgtttctatttgtgatgtctcacttgttgttgagaacaatgagcttaaggagcaagtggccaagctcaacaagagtttggagaggtgtttcaagggaaggctcatgattgtagtattgttgctagatatgtgggttccactatacttagtggtgaactaccacaccgatgggagccattgggtgcttgatagtggatgcactcaacacatgaccggtaatagggctatgttcaccacatttgaagtaggagggaaagaacaagagaaagtgacatttggaggcaatagcaaaggaaaggtaattgggttagttgcaaaaacttcattgggttggctttggcatatgaggctagcccatgttggcatgaatcaattgagcaaactttcaaaacgtgatctagttgtgggcttgaaagatgtgaagtttgagaaagataagctttgtagtgcttgtcaagccggcaagcaagttgcatgttctcatcctactaagagtatcatgtccacatctagaccattggagctcttgcatatatggatttgtttggcccaacaacctataagagcattggtgtggagaggaaaaatcgtacattgattgagatggcaatgactatgcttgatgaatatggtgtttccgattccttttgggcggaagccataaacaccgcttgctatgcaactaataggctttatttgcatcgtctcttgaaaaagacttcctatgtgctaattgttgggaggaagccaaatgttgcctattttcgagtttttggttgcaagtgttatatttaccgaaagggtgttagactaaccaaatttgaaagtcggtgttgtgatgaagggtttcttctaggttatgcctcaaatagcaaggcataccaggtctacaacaagaacaaaggtattgtggaagaaaccgccgatgttcaatttgatgagactaatggctcccaagaggggcacgagaatttggatgatgtagatgatgaaggcttgatgagagatatgaagaacatgtctattggggatgtcaagcctattgaagtggaagacaagccatccacctctactcaagatgagccatctacttccgcttcgccaagtcaagcttaaattgaagtggaggaggagaaggcacaagatccacctatgccaccaaggatacacaccgctctttccaaggatcacccaattgaccaagtgttgggtgatattagtaagggtgttcaaactcgatctcgtgtcgcttcgatttgtgaacactactcgtttgtttcttgtcttgagccaaaacatgtagatgaagctctttgtgatccggattggatgaatgctatgcatgaatagctcaacaactttgcaagaaacaaggtgtggactttgattgaaagacctagagaccacaatgccatagggacaaagtgggtctttaggaacaatcaagatgagaacagattggtggtgagaaacaaggcaagattggtgacgcaaggtttcacacaagttgaaggtttggactttggtgaaacttttgcccccgtggcaagactagaggctattcgcatccttcttggatttgcatcatgctttgatataaaactatttcaaatggatgtgaaaagtgcttttctaaatggtgaaattgccgaacttgtctttgttgaacaacctcccggttttgaagatcctaaaaattctaaccatgtttgtaaactctcaaaaggtctttatggtttaaaacaagctcctagggcttggtatgaaagattgagagattttcttttgtcaaaggatttcaaaattggaaaagttgacaccaccctttttacaaagatcattggtgatgatttctttgtgtgtcaaatttatgttgatgatatcatattcggttctactaatgaggtattttgcaaggaatttggtgatatgatgtctagggaatttgagatgtccatgattggagagttgagcttcttccttagacttcaaatcaagcaactcaaggatgggacgttcttgagccaaacaaagtacatcaaggatctactcaagaggtttggcttggaggatgcaaagcccatcaagacacctatggtaaccaatgggcatctcgaccttgatgagggaggtaaaccggtagatttaaagctttatcattctatgattggtagcttgctttaccttaccgcatctaggccggatatcatgtttagtgtttgcatgtgtgcacggtttcaagtcgctcctaaggagtgtcacttagtggccgtgaaaaggattctaagatatttaaagcattcctcaattattggcttgtggtacccaaaaggtgctaagtttaagctagttggctattccgattcggattatgccggttgcaaagtggatagaaagagcacatccggtagttgccaaatgcttggtagatcccttgtatcatggtcatccaagaaacaaaactccgtagccctctctactgccgaagcggaatatgtttcagcggaaactagattcttagttttggccaaaatgagatttatccccaaaataagattgagaaggaatttgagaaaagtttcaaaacaaagttgaggtggtctgaccgggtaccagccgccggtttgaccgcgctcggccgtcggtctgaccgacatatggacggcggtctgaccggttgttggccctcggctatgcctccccgcactcgccgtggtcgtcgtgagcccacgcttgatcccgtcagtgagaatgaggaatcaaacggagatgagtatgttcaaagtgatgatgaagttatggaaaatattgagggggatgaggtggaagtaagtggtgataatggcagtggcgatggtgaggatgatgaggcaagtgatgatgggagtcctctcgatcccaccatccaatttgtgctcaatttgaggaatgcctagcaatacactatcctccgtcatcacgatcaattccggaggcctaatgattgcaatgatctgagattccatacacggtatcaaaagtccgtggtgtccggcgattgtgatgccatgaagtggatgtcggggacccttcgatgctctatcaactgccgtgcattcaaggagctcttgcacattcacttcaacaacagggatgacctccatgatgagcaaaaccacaaccccttccccattgatcacttttctcagttttatgaagaagggaggaggcacacctatggaaaggtggtgagtttgagggctatcccaagtctgatcaaccgcatagtgagggccaccattctcccaagatgtggcaacaatgatgacatttgcggcgttgcatggcatgtcattgaagccatcatggatggtcgtcggtttggtgtcatcaaccttatgatgaaggagatagccatttccaaggggactattggacaaggagtttactatgccccctacataatgagattgattcaaagcaagttgagacaaattggtaacaacttaaaagaacacaaagactacaagcctcatctccaactctccactcctagagctcctcgtgtgcgccaaccaacatttgatcaaggtgcaagctcaagtgcagcccccctcctcctcatgggtatgatccaagtgccttcttccatccacaatatgcatactttggaatgcaacccaacgaatacttcaatccggtgcttggggctattaataccctaagtgaaagcattcaacgcttatccaccgggcattaagcattgcatgaggatgttcatggcttacgcaccgatgttggagatttgaatgcttccgtgggaagattgcacactagggtgggtgtattggattcttgagtccaaatgttggagagcacccaagcttttgtatatcatcgccgccgtgatgctcctcatccttcatctttggcacgtcctccttctcctccacaa

SEQ ID NO: 13955 - DNA, 5370 bp, Oryza sativa
  Clone ID: TFbOSC400703j.C1.o6.np
gagctagtgtggcacttgattgatcatctccacgccgggtcattgcttgttactcttggaggttgccgcctcctagacggcttgtggaggagttgcctggtgatctctccgagaagattgtggaggaggcccggcgccggctttgctatcaccggcacacccttgacggagattgatcaccgcaacctccaactcaatgcccaagcatgaatgccttgttcaactctttgagccaagaggagtttgatagagtgagcaaccttgagaccgcatatgagatttggaacaagttggcggagatccatgagggcacaagcgagtacaagaatgccaagcttcattttctcaagatctaatatgagacattctccatgttgcctcatgagagcgtgaatgacatgtatgggaggctcaatgttattgtgaatgatctcaaggggcttggggcaaactacaccgattttgaggttgcccaaaagatgcttagggctctaccggagaattatgagacccttttcaccatgctcatcaactccgacatgtcaaggatgacacccgcaagcctcttggggaagatcaacaccaatgacatgtacaagttgaagaagaaggagatggaggaagcctcaccttccaagaagtgcattgctctccaagccgaagttgaagacaagggcaagggcaaggagagaggaaggggctccaactcaaataggagaagaaatagaagacccaacaagactttctccaacttgaggtgctttgagtgtggtgagaagggacactttgcttccaagtgcccttccaaggatgatgatggagacaagtcatccaagaagaagagtggaggctacaagctcatgaagaagctcaagaaggaaggcaagaagattgaggccttcatcggggaatgggactcaaatgaggagagctccgcctcatccgggtccgaggaagaaggtggtgatgatgtaaagctccaagaagaagaagatggccgttgttgccatcaaggaggctccacactctttgctcaagggctcctctaaggtaacatctcttagtgatagtgagggtgatgatgattgtgatgatgtttcctatgatgagtttgtgagtatgtttgaggagctccaagcttataatgagaaggagattgtcaagttcaaggctctaaagaaggatcatgcttctttggatgtcttgtatgaggagctaaagacctctcatgagagactcaccatttctcatgagaagcttaaggaagctcatgacaacctcctttccactactcaacatggagctcacattgatgttggcatatcttgtgatttgcttgatgatagtgctacttgccatattgctcatgttgcatcatctagcattcctacctcttgtgatgatcttgtggatatgcctagctctagctctagctcttgtgtttctatttgcgatgcctcacttgttgttgagaataatgagcttaaggagcaagtggctaatgagacaagagtttggagaggtgcttcaagggaaggctcatgatggtagcattgttgctagatatgtgggttcccctatactcagtggtgaactaccgcaccggtgggagccattgggtgcttgatagtggatgcactcaacacatgaccggtgatagggctatgttcaccacatttgaagtaggagggaatgaacaagagaaagtgacttttggagacaatagcaaaggaaaggtaattgggttagttgtaaaaacttcattgggttggctttggcataggaggctagctcatgttagcatgaatcaattgagtaaactttcaaaacgtgatctagttgtgggcttgaaagatgtgaagtttgagaaagataagctttgtagtgcttgtcaagccggcaagcaagttgcatgttctcatcctactaagagtatcatgtccacatctagaccattggagcttttgcatatggatttgtttggcccaacaacctataagagcattggtgtggagaggaaaaatcgtacattgattgagatggcaaggactatgcttgatgaatatggtgtttccgattccttttgggcggaagccataaacaccgcttgctatgcaaccaataggctttatttgcatcatctcttgaaaaagacttcctatgagctaattgttgggaggaagccaaatgttgcctattttcgagtttttggttgcaagtgttatatttatcgaaagggtgttagactaaccaaatttgcaagtcggtgtgatgaagggtttcttctaggttatgcctcaaatagtaaggcataccgggtctacaacaagaacaaaggtattgtggaagaaaccgccaatgttcattttgatgagactaatggctcccaagaggggcacgagaatttggatgatgtaggtgatgaaggcttgatgagagctatgaagaacatgtctattagagatgtcaagcctattaaagtggaagacaaaccatccaccttcactcaagatgagccatctacttccgctacgccaagtcaagctcaagttgaagtggaggaggagaaggcacaagatccacctatgccacaaaggatacacaccgctctttccaaggatcacccaattgaccaagtgttgggtgacattagtaagggtgttcaaactcgatctcgtgtcgcttcgatttgtgaatattactcgtttgtttcttgccttgagccaaaacatgtagatgaagctctttgtgattcggattggataaatgctatgcatgaagagctcaacaactttgcaagaaacaaggtgtggacattggttaaaagacctagagatcacaatgtcatagggagaaagtgggtctttaggaacaaacaagatgagaacgggttggtggtgtgaaacaatgcaaggttggtggcacaaggtttcacacaagttgaaggtttggacttcggtgaaacttttgcccccgtggcaagacttgaggctattcgcatccttcttgcatttgcatcatgctttgatataaaactatttcaaatggatgtgaaaagtgcttttctaaatggtgaaattgccgaacttgtctttgttgaacaacctcccggttttgaagatcctaaaaatcctaaccatgtttataaactctcaaaagctctttatggtttaaaacaagctcctagggcttggtatgaaagattgaaagattttcttttgtcaaaggatttcaaaattggaaaagttgacaccacccttttcacaaaaatcattggtgatgatttctttgtgtgtcaaatttatgttgatgacatcatatttggttttactaatgaggtattttgcaagtaatttggtgatttgatgtctaggggatttgagatgtccatgattggagagttgagcttcttccttggacttcaaatcaagcaactcaaggatgggacgttcgtgagccaaaccaagtacatcaaggatctactcaagaggtttggcttggaggatgcgaaacccatcaagacacctatggcaaccaacgggcatctcgaccttgatgagggaggtaaaccggtagatttaaagctttatcgttccatgattggtagcttgctttaccttaccgcatctaggccggatatcatgtttagtgtttgcatgtgtgcacggtttcaagccgctcctaaggagtgtcacttagtggccgtgaaaaggattctaagatatttaaagcatttctctactattggcttgtggtacccaaaaggtgctaaatttaagcttgttggctattccgactcggattatgccggttgcaaagtggatagaaagagcacatccgttagttgccaaatgcttggtatatcccttgtgtcatggtcatccaagaaacaaaactccgttgccctctctaccgccgaggcggaatatgtttcggcggaaactagattcttagttttggccaaaatgagatttatccccaaaatgagattgagaaggaatttgagaaaattttcaaaacaaagttgggggcctggcagtctgaccggcgctatatgcgcggtctgaccggccaggtgcggcggtctgaccggccacatagggccggtctgaccggccgaggtgggcccatgatgcctccccgcactcgccatggttgtcgtgcgcccactctggatcccatgagtgagcctgaggaatcgagcggagaggattacgctcaaagtgatgaagaggttgaggccaatgttgagggggctagtgaggaggcaagtggagatgatgtcagtggaagtggagaggatgaggatgaacaaagtgatgagatgaacattgatccctccatccagtttgtggtgaacatgaggaatccatcgcagtataccatcttaaggcatcatgatcagttcttgaggcctcgggacaccccggatccccattttcacaccgctttccagaagatgtgggtggctggagactagagtgagatgaagtggatgtccgacaccctccagtgttctatctctcgaaggcaattccggcagctcctcaacattcgcttggactttggagatgatttgcatgaggagcacactcacaatccgctctccatagactatctctctcagttctatgaagatggagtgcggtacacacatgggaaggttgccggcttgaggactatccccagtgtggttaaaaggattatgagagccactatcctccctcgccttggcaacaatgatgacattaggggggtggcttggcacgtcatcgatgcaatcattcagggccgtcagttcgacattgtgtctctcatgatgcaagagattgctatcttcaagaggacattcactcagggaatctattatgccccttacatcatgaggttgattcaagacaagcttggggctgctgggcaaaatttgaagaagcacaagcagtacaagccccgccttcagcctagagctccccgtgctcctaggacggtgccctcttctcaccctggagctagctcaagcccagcacctcctcctcctcatgggtatgatccaaatgcttctttcatcctcactatgcttactttggaatgcaacccaatgaatacttcaacccggtacttggggctattaataccttaagtgaaagcattcaacgcttgtctaccaggcatgaagcattgcatgaggatgttcgtggcttgcgcaccgatgttggagacttgaatgcttccatggggagattgcacactagagtgggtgcattggattctcgagtccaaatgttggagagcacccaagcttttgtatatcatcgtcgtcgtgatactcctaatccttcctctttggcgcttcctccttctcctccacaa

SEQ ID NO: 13956 - DNA, 4884 bp, Oryza sativa
  Clone ID: TFbOSC400718j.C1.o73.fg
atgtcgaacgaggtgaaccatgtagggaaggctcccatgttcaatggcacaaactactccacttggaaaattaaaatgtctactcacctcaaagctatgagcttccatatttggagtattgtggatgtaggctttgctatcaccggcacacccttgacggagattgatcactgcaacctccaactcaatgcccaagccatgaatgctttgttcaactccttcagccaagaggagttcgatagagtgagcaaccttgagaccgcatatgagatttggaacaagttggcggagatccatgagggtacaagtgagtacaaggatgccaagcttcatttcctcaagatccaatatgagacattctccatgttgcctcatgagagcgtgaatgacatgtatgggaggctcaatgtcattgtgaatgatctcaaggggcttggggcaacctacaccgatcttgaggttgcccaaaagatgcttagggctctaccgaagaagtatgagacccttgtcaccatgctcatcaactccgacatgtcaaggatgacacccgcaagcctcttggggaagatcaacaccaatgacatgtacaagttgaagaagaaggagatggaggaagcctcaccatccaagaagtgcattgctctccaagccgaagttgaagacaagggcaagagcaaggtgaatgaagccaatgatgacttgaaggaagagattgcccttcttgctagaaggttcaatgatctcttgggaagaagaaaggagagagtaagaggctccaactccaataggagaagaaataggagacccaacaagactctctccaacttgaggtgctttgagtgtggtgagaagggacactttgcttccaagtgcccttccaaggatgatgatggagacaagtcatccaagaagaagagtggaggctacaagctcatgaagaagctcaagaaggaagggaagaagattgaggccttcatcggagaatgggactcaaatgaggagagctccgcctcatctgggtccgaggaagaaggtggtgatgatgcaagctccaagaagaagaagatggctgttgttgtcatcaaggaggctccaacactcttcgctccactttgtctcatggcaaagggctcttctaaggtaacatctcttagtgatagtgagagtgatgatgattgtgatgatgtttcctatgatgagcttgtgagtatgtttgaggagctccatgcttatagtgagaaggagattgttaagttcaaggccctaaaaatggatcatgcttctttggaggtcttgtatgaggagctaaagacctctcatgagagactcaccatttctcataagaagcttaactctagctctagctcttgtgtttcaatttgtgatgcctcacttgttgttgagaacaacgagcttaaggagcaagtggctaagctcaacaagagtttggagagatgcttcaacggcaagaacactcttgacaagattttgagtgagcaacggtgcatccttaacaaggagggacttggattcattccaaagaagagtaagaaaccttctcaccgtgccactcgttttgtcaagagcaacggtaagcattgctccaagtattgtgaggttgggcatttggtgaactaccgcaccggtgggagccattgggtgcttgatactggatgtcacgcccagaaattcactagctgtgacaatggatgcactcaacacacgaccggtgatagggctatgttcaccacatttgaagtaggagggaaagaacaagagaaagtgacatttggagacaatagcaaaggaaaggtaattggattagttgcaaaaacttcattgggttggctttggcataggaggctagcccatgttggcatgaatcaattgagcaaactttcaaaacgtgatctagttgttggcttgaaagatgtgaagtttgagaaggataagctttgtagtgcttgtcaagccggcaagcaagttgcatgttctcatcctactaagagtatcatgtctacacctagaccaatggagctcttgcatatagatttgtttggcccaacaacctataagagcattggtggtaatagtcattgtcttgtgattattgatgattattctcgctatacttgggtgttctttttgcatgataagtctattgttgccgagcttttcaaaaagtttgcaaacagggcccaaaatgaatttagttgcactcttgtgaaaattagaagtgacaatggttccgagtttaagaataccaatatcgaggactattgtgatgatcttggtattaaacacgaactttccgctacctactcaccacaacaaaatggtgtagtggagaggaaaaatcgtacattgattgagatggcaaggactatgcttgatgaatatggttatgcctcaaatagcaaggcataccgggtctacaacaagaacaaaggtattgtggaagaaaccgccgacgttcaatttaatgagactaatggctcccaagaggggcacgagaatctggatgatgtaggtgacgaaggcttgatgagagctatgaagaacatgtctattggagatgtcaagcctattgaagtggaagacaagccatccacctccactcaagatgagccatctacttccgcttcgccaagtcaacctcaagttgaagtggaggaggagaaggcacaagattcacctatgccaccaaggatacacaccgttctttccaagcatcacccaattgaccagtttttgggtgacattagtaagggtgttcaaactcgatctcgtgtcgcttcgatttgtgaacattactcatttgtttcttgtcttgagccaaaacatgtagatgaagctctttgtgatccggattggatgaatgctatgcatgaagagctcaacaactttgcaagaaataaggtgtggaccttggttgaaagacctagagaccacaatgtcatagggacaaagtgggtctttaggaacaaacaagatgagattgggttggtggtgagaaacaagccaaggttggtggcacaaggtttcacacaagatgaaggtttggacttcggtgaaacttttgcccccgtggcaagacttgaggctattcgcatccttcttgcatttgcatcatgctttgatataaaactatttcaaatggatgtgaaaagtgcttttctaaatggtgaaattgccgaacttgtctttgttgaacaacctctcggttttgaagatccaaaaaatcctaaccatgtttataaactctcaaaagctctttatggtttaaaacaagctcctagagcttggtatgaaagattgagagattttcttttgtcaaagtatttcaaaattggaaaagttgacaccacccttttcacaaaaatcattggtgatgatttctttgtgtgtcaaatttatgttgatgatatcatattcggttcaactaatgaggtattttgcaaggaatttggtaatatgatgtctagggaatttgagatgtccatgattggagagttgagcttcttccttggagttcaaatcaagcaactcaaggatgggacgttcgtgagccaaaccaagtacatcaaggatctactcaagaggtttggcttggaggatgcgaagtccatcaagacacctatagcaaccaacggccatctcgaccttgatgagggaggtaaaccggtagatttaaagctttatcgttccatgattggtagcttacttttccttaccgcatctaggccggatatcatatttagtgtttgcatgtgtgcacgatttcaagccgctccaaaggagtgtcacttagtggccgtgaaaaggattctaagatatttaaagcattcctcaactattggcttgtggtacccaaaaggtgaagcacgaggtgttcttcgttttgcaccaatagagggtagtttcttgctatgcctccccgcactcgtcatggtcgtcgtgagcccacgccggagccaagtgcgcatgaggaatcaagcggataggagtatgctcaaaggggatgaggtggaagtaagtggtgatgacactggcagtggcgatggtgaggatgatgaggcaagtgatgatgggagtcctctcgatcccaccatccaatttgtgctcaatttaaggaatgcccagcaatacactatcctccgtcatcacgatcaattccggaggcctaatgattgtaatgattcaaggttccatacacggtatcaaaaggccgtgtatgagcaagtatacgcaaacaaagccttcaccgaacacaagtggatttcttggaggcacattggtgagacaccggagtttgtggatttgcaggggttgttcaaggccgttggcattgataggattatcaccatgaagcaaccctttgatgaagacctcatctggcaattctatgccaccttttatgaagaaggggggaggcacacctatggaaaggtggcgggtttgagggtcatccctagtgtgatcaaccgcatagtgaaggccaccattctcccaagatgtggcaacaatgatgacattcgcggcgttgcatggcatgtcattgatgccatcatggatggtcgtcggtttcatttcatcaaccttatgatgaaggagatagccatttccaaggggacaattggacaaggaatttactatgctccctacataatgaggttgattcaaagcaagttgggacaagttggtaacaacttaaaagaacacaaggagtacaagcctcgtctccaactctccactcctagagctcctcgtgtgcgccaaccaacatttgatcaaggcgcaagctcaagtgcaaccccgcctcctcctcatgggtatgataccaatgctttcttccatccacaatatgcttactttggaatgtaa

SEQ ID NO: 13957 - DNA, 5304 bp, Oryza sativa
  Clone ID: TFbOSC401716j.C1.o99.fg
atgtcgaacgaggtgaaccatgtagggaaggcttccatgtttaatggcacaaactactccacttggaaaattaaaatgtctactcacctcaaagctatgagcttccatatttggagtattgtggatgtaggctttgatatcaccggcacacccttgacggagagtgatcaccgtaacctccaactcaatgcccaagccatgaatgccttgttcaactctttgagccaagaggagttcgatagagtgagcaaccttgagaccgcatatgagatttggaacaagttggcggagatccatgagggtacaagtgagtacaaggatgccaagcttcatttcctcaagatccaatatgagacattctccatgttgcctcatgagagtgtgaatgacatgtatgggaggctcaatgtcattgtgaatgatctcaaggggcttggggcaaactacaccgatcttgaggttgcccaaaagatgcttagagccctaccggagaagtatgagacccttgtcaccatgctcatcaactccgacatgtcaagaatgacacccgcaagcctcttggggaagatcaacaccaatgacatgtacaagttgaagaaggagatggaggaagcctcaccctccaagaagtgcgttgctctccaagccaaagttgaagacaagagcaagagcaaggtgaatgaagtcaatgaggacttgagaaaggagagaggaaggggctccaactcaaataggagaagaaatagaagacccaacaagactctctccaacttgaggtgttttgagtgtggtgagaagggacactttgcttccaagtgcccttccaaggatgatgatggagacaagtcatccaagaagaagactggaggctacaagctcatgaagaagcttaagaaggaagggaagaagattgaggctttcatcggggaatgggactcaaatgaggagagctccgtctcatccgggtccgaggaagaaggtggtgatgatgcaagctccaagaagaagaagatggccgttgttcccatcaaggaggctccatcactcttcgctccactttgtctcatggcaaagggctcctctaaggtaacatcccttagtgatagtgagagtgatgatgattgtgatgatgtttcctatgatgagcttgtgagtatgtttgaggagctccatgcttatagtgagaaggagattgtcaagttcaaggccctaaagaaggatcatgtttctttggaggtcttgtatgaggagttaaagacctctcatgagagactcaccatttctcatgagaagcttaaggaagctcatgacaacctcctttccactactcaacatggagctcacattgatgttggcatatcttgtgatttgcttgatgatagtgctacttgccatattgctcatattgcatcatctagcatttctacctcttgggatgatcttatggatatgcctagccctagctctagctctagctcttgtgtttctatttgtgatgcctcacttattgttgagaacaatgagcttaaggagcaagtggctaagctcaacaagagtttggagagatgcttcaagggtaagaacactcttgacaagattttgagtgagcaacggtgcatccttaacaaggagggacttggattcactccaaagaagggtaagaaaccttctcaccatgccactcgttttgtcaagagcaatggtaagtattgctccaagtgttgtgaggttgggcatttggtgaactaccgcaccggtgggagccattgggtgcttgatagtggatacactcaacacatgaccggtgatagggctatgttcaccacatttgaagtaggagagaatgaacaagagaaagtgacatttggagacaatagcaaaggaaaggtaattgggttaggtaaaattgttatctccaatgatttgtcaaatgaaaatgtctctcttgttaaatctctaaattttaatttgctttcggttgctcaaatttgtgatcttggcttgtcatgtgccttcttcccacaagaagttattgtttctagccttcttgacaagtcttgtgtgttcaaaggttttagatatggaaatctttatttggttgatttcaattctagtgaagcaaatttgaaaacttgtttagttgcaaaaacttcattgggttggctttggcataggaggctagctcatgttggcatgaatcaattgagcaaactttcaaaacgtgatctagttgtgggcttgaaagatctgaagtttgagaaagataagctttgtagtgcttgtcaagccggcaagcaagttgcaggttctcattctactaagagtatcatgtccacatctagaccattggagctcttgcatatgaatttgtttggcccaacaacctataagagcattggtggtaatagtcattgtcttgtgattgttgatgattattctcgctatacttgggtgttctttttgcatgataagtctattgttgccgagtttttcaaaaagtttgcaaaaagggcccaaaatgaatttagttgcactcttgtgaaaattagaagtgacaatggttccgaatttaagaataccaatatcgaggactattgtgatgatcttcatatcaaacacgaactttccgctacctactcacctcaacaaaatggtgtagtggaaaggaaaaatcgtacattgattgagatggcaagaactatgctagatgaatatggtgtttccgattctttttgggcggaagccataaacaccgcttgccatgcaaccaatagactttatttgcatcgtctcttgaaaaagactttctatgagctaattgttgggaggaagccaaatgtcgcctattttcgagtttttggttgcaagtgttatatttaccgaaatggtgttagactaaccaaatttgaaagtcggtgtgatgaagggtttcttctaggttatgcctcaaatagcaaggcataccgggtctacaacaagaacaaaggtattgtggaagaaaccgccgatgttcaatttgatgagactaatggctcccaagaggggcacgagaatttggatgttgtaggtgatgaaggcttgatgagagctatgaagaacatgtctattagagatgtcaagtctattgaagtggaagacaagccatccacctccactcaagatgagccatctacttccgcttcgccaagtcaagctcaagttgaagtggaggaggagaaggcacaagatccacctatgcctccaagaatacacaccgctctttccaaggatcacccaattgaccaagtgttgggtgacattagtaagggtgttcaaactcgatctcgtgtcgcttcgatttgtgaacattactcgtttgtttcttgtcttgagccaaaacatgtagatgaagctctttgtgatccggattggatgaatgctatgcatgaagagctcaacaactttgcaagaaacaaggtgtggactttggttgaaagacctagagaccacaatgtcatagggacaaagtggatatttaggaacaaagtggattggtgggaatttgagatgtccatgattggagagttgagcttcttccttggacttcaaatcaagcaactcaaggatgggacgttcgtgagccaaaccaagtacatcaaggatctactcaagaggtttggtttggaggatgcgaagcccatcaagacacctatggcaaccaacggacatctcgaccttgatgagggagattatgccggttgcaaagtggatagaaagagcacatccggtagttgccaaatgcttggtagatcccttgtgtcatggtcatccaagaaacaaaactccgtagccctctctaccgccgaggcggaatatgtttcggcgggtagttgttgtgcccaattgctttggatgaaacaaaccttgttggactatggcatatccttcaccaaaaccccactcctatgtgacaatgatagtgccataaaaatagccaataacccggtccaacattctagaaccaagcatattgacattcgccatcacttcctaagagaccatgttgccaagtgtgacatagtcattagccacataagaaccgaggaccaactagccgacatctttaccaagcctcttgatgaaacccgcttttccatgcctccccgcactcgccatggtcgtcgtgagcccacgcccgatcccgtcagtgagaatgaggaatcaagcggagatgagtatgttcaaagtgatgatgacaatatggaaaatgttgagggtgatgagatggaagtaagtgatgatggtgatgacaatgggagtggaaatggtgaagatgatgaggcaagtgatgatgggagtcctctcgattcctccatccaatttgtgcttaatttgaggaatgctcaacaatacactatcctccgtcatcatgatcaattccggaggcctaacgattgtaatgatccaagatttcatacacggttccaaaagtccgtgtatgcacaagtgtatgccaacaaagccttcgccgagcacaagtggatttcttggaggcacattggtgagacaccggagtttgagaatttgcaagagatgttccggaccgttgggattgatagaattgtcaccatgaagcaaccttttgatgaagatctcatccggcaattctatgccaccgtatgggtgtccggcgattgtgatgcaatgaagtggatgtcggggaccctccgatgctctatcaaccgccatgaattcaaggagctcttgcacattcgcttcaacaacggggatgaccttcatgatgagcacacccacaaccccttccccattgatcacttttctcagttttatgaagaagggagaaggcacacatatggcaaggtggcgggtttgagggctctcccaagtgtgatcaaccgcatagtaagggccaccatcctcccaagaggcggcaacaatgatgacatacgcggagttgcttggcatgttattgatgccattatggatggtcgtcggtttgatgttatcaaccttatgatgaaggagattgccatctcaaaggggactcttggacaaggaatctattatgctccctacataatgaggttgattcaaagcaagttgggacaaattggtcacaatttaaaagaacataaggagtacaagcctcgtctcaaactctcctcccctagagctcctcgtgtgcgccaaccaacattcgatcaaggtgcaagctcaagtgcagcccccctcctcctcaagggtatgatccaagtgtttttttttccatccacaatatgcctactttggaatgcaacccaatga

SEQ ID NO: 13958 - DNA, 4428 bp, Oryza sativa
  Clone ID: TFbOSC405965j.C1.o6.fg
atgtcgaacgaggtgaaccatgtagggaaggctcccatgtttaatggcacaaactactccacttggaaaattaaaatgtctactcacctcaaagctatgagcttctatatttggagtattgtggatgtaggctttgctatcaccggcacacccttgacggagattgatcaccgcaacctccaactcaatgcccaagccatgaatgccttgttcaactctttgagccaagaggagttcgatagagtgagcaaccttgagaccgcatatgagatttggaacaagttggcggagatccatgagggtacaagtgagtacaaggatgccaagcttcattttctcaagatccaatatgagacattctccatgttgcctcatgagagtgtgaatgacatgtatgggaggctcaatgtcattgtgaatgatctcaaggggcttggggcaaactacaccgatcttgaggttgcccaaaagatgcttagagccctatcagagaagtatgagacccttgtcaccatgctcatcaactccgacatgtcaagaatgacacccgcaagcctcttggggaagatcaacaccaatgacatgtacaagttgaagaagaaggagatgaaggaagcctcaccctccaagaagtgcattgctctccaagccgaagttgaagacaagagcaagagcaaggtgaatgaagtcaatgaggacttggaggaagagatggtccttcttgctagaaagttcaatgatctcttgggaaggagaaaggagagaggaaggggctccaactcaaataggagaagaaatagaagacccaacaagactctctccaacttaaggtgttttgagtgtggtgagaagggacactttgcttccaagtgcccttccaaggatgatgatggagacaagtcatccaagaagaagagtggaggctacaagctcatgaagaagcttaagaaggaagggaagaagattgaggctttcatcggggaatgggactcaaatgaggagagctccgcctcatccgggttcgaggaacaatgtagtgatgatgcaagctccaagaagaagaagatggctgttgttgccatcaaggaggctccatcactcttcgctccactttgtctcatggcaaagggctcctctaaagtaacatcccttagtgatagtgagagtgatgatgattgtgatgatgtttcctatgatgagcttgtgagtatgtttgaggagctccatgcttatagtgagaaggagattgtcaagttcaaggccctaaagaaggatcatgcttctttggaggtcttgtatgaggagttaaagacctctcatgagagactcaccatttctcatgagaagcttaaggaagctcatgacaacctcctttccactactcaacatggagctcacattgatattggcatatcttgtaatttgcttgatgatagtgctacttgccatattgctcatgttgcatcatctagcatttctacctcttgtgatgatcttatggatatgcctagccctagctctagctctagctcttgtgtttctatttgtgatgcctcacttattgttgagaacaatgagcttaagagggacttagattcattccaaagaagggtaagaaaccttctcaccatgccactcgttttgtcaagagcaatggtgaactaccgcaccggtgggagccattgggtgcttgatagtggatgcactcaacacatgaccggtgatagggctatgttcaccatatttgaagtaggagggcatgaacaagagaaagtgacatttggagacaatagcaaaggaaagcttttcaaaaagtttgcaaaaagggcccaaaatgaatttagttgcactcttgtgaaaattagaagtgacaatggttccgaatttaagaataccaatatcgaggactattgtgatgatcttggtatcaaacacgaactttccgctacctactcacctcaacaaaatggtgtagtggaaaggctttatttgcatcgtctcttgaaaaagacttcctatgagctaattgttgggaggaagccaaatgttgcctattttcgagtttttggttgcaagtgttatatttaccgaaagggtgttagactaaccaaatttgaaagtcggtgtgatgaagggtttcttctaggttatgcctcaaatagcaaggcataccgggtctacaacaagaacaaaggtattgtggaagaaaccgccgatgttcaatttgatgagactaatggctcccaagaggggcacgagaatttggatgatgtaggtgatgaaggcttgatgagagctatgaagaacatgcctattggagatgtcaagcctattgaagtggaagacaagtcatccacctccactcaagatgagccatctacttccgcttcgccaagtcaagctcaagttgaagtggaggaggagaaggcacaagatccacctatgcctccaagaatacacaccgctctttccaaggatcactcaattgaccaagtgttgggtgacattaatgaagctctttgtaatccggattggatgaatgctatgcatgaagagctcaacaactttgcaagaaacaaggtgtggactttggttgaaagacctagagaccacaatgtcatagggacaaagtggatctttaggaacaaacaagatgagaacggattggtggtgagaaacaaggcaaggttggtggcgcaaggtttcacacaagttgaaggtttggactttggtgaaacttttgcccccgtggcaagacttgaggctattcgcattcttcttgcatttacatcatgctttgatataaaactatttcaaatggatgtgaaaagtgcttttctaaatggtgaaattgccgaacttgtctttgttgaacaacctcccggttttgaagatcctaaaaatcctaaccatgtttacaaactctcaaaagctctttatggtttaaaacaagctcctagggcttggtatgaaatattgagagattttcttttgtcaaaggatttcaaaattggaaaagttgacaccactcttttcacaaaaatcattggtgatgatttctttgtgtgtcaaatttatgttgatgacatcatattcggttctactaatgaggtattttgcaaggaatttggtgatatgatgtctagggaatttgagatgtccatgattggagagttgagcttcttccttggacttcaaatcaagcaactcaaggatgggacgttcgtgagccaaaccaagtacatcaaggatctactcaagaggtttggcttggaagatgcgaagcccatcaagacacctatggcaaccaacgggcatcttgaccttgatgagggagctatgcctccccgtactcgccatagtcgtcgtgagcccacgcccgatcccgtcagtgagaatgaggattcaagcggagatgagtatgttcaaagtgatgatgacaatatggaaaatgttgagggtgatgagatagaatccgtgtatgcacaagtgtatgccaacaaagccttcgccgaacacaagtggatttcttggaggcacattggtgagacaccggagtttgagaatttgcaagagatgttccagaccgttgggattgatagaattgtcaccatgaagcaaccttttgatgaagatctcatccagcaattctatgccaccgtatgggtgtccggcaattgtgatgcaatgaagtggatgtcggggagcctccgatgctctatcaaccgccgtgaattcaaggagctcttgcacattcgcttcaacaacggggatgaccttcatgatgagcacacccacaaccccttccccattgatcacttttctcagttttatgaagaagggggaaggcacacattggaaaggtggcgggagattgccatctcaaagggaactattggacaaggaatctattatgctccctacataatgaggttgattcaaagcaagttgggacaaattggtcacaatttaaaagaacataaggagtacaagcctcgtctccaactctcctcccctagagctcctcgtgtgcgccaaccaacttttgatcaaggtgcaagctcaagtgtagtccctcctcctcctcctcatgggtatgatccaagtgcgtttttccatccacaatatgcttactttggaatgcaacccaacgagtacttcaacccggtacttggggctattaataccctaagtgaaagcattcaacgcttatccaccgggcatgaagcattacatgaggatgttcgtggcttgcgcaccgatgttggcaacttaaatacttcggtgggaagattgcatgctagggtgggtgtattggattctcgagtccaaaccttggagagtacccaagcttttgtctatcatcgccgccatgatgcttctcatccttccacttcggcgcgtcctccttctcctccacaagagtga

SEQ ID NO: 13959 - DNA, 1728 bp, Oryza sativa
  Clone ID: TFbOSC408741j.C1.o7.gm
atggggccctctgacaaggctacaacggctagttttatagccgttgcagagtaccacggtctaaccggccacacacctccgatccaatatgagatattctccttgttgcttcatgagagtgtgaatgacatgtatgggaggctcaatgtcattgtgaatgatctaaaggggcttggggaaatctacaccgaccttgaggttgctcaaaagatgcttagagctctaacggagaagtatgagaccctagtcaccatgctcatcaactccgacatgtcaaggatgacacccgcaagactcttggggaagatcaacaccaatgacatatacaagttgaagaagaaggagatggaggaagcctcaccatccaagaagtgcattgctctccaagccgaagttgaagacaagggggaagagcaagaaaggagaggaaggggctccaactcaaatagaagaagaaatagaagacccaataagattctctccaacttgagatgctttgagtgtggtgagaagggacactttgcatccaagtgcccttccaaggatgataatggagacaagtcatccaagaagaagagtgggggctacaagcttatgaagaagctcaagaaggaagggaagaagattgaggccttcattgggcagtgggactcaaatgaggagagctccgcctcatccgggtccgaagaagaaggtgatgatgatgcaaactctaagaagaagaagatggccgtggttgctatcaaggaggctccatcactctttgctccactttgtcttatggcaaagggctcttttaaggtaacatctcttactgatggtgagagtgatgatgattgtgatgatatttcctatgatgagtttgttagtatgtttgaggatctcaatacttatagtgagaaggagattgtcaagtttaaggccctaaagaaggatcatgcttctttggaagtcttgtatgaggagctaaagacctctcgtgagagactcaccatttctcatgagaagcttaaggaagctcatgacaacctcctttccactactcaacatggagctcacattgatgttgacatatcttgtgacttgcttgatgatagtgcttcttgtcatattccccatgttgcatcatctagcatttctaccgcttgtgatgatgtcacgcccggaatttctatccaaaattccaaacgcttacatcggctagggttcgcggtggaccgggtggacggcggcggttcacgagattggacggccgagatccatccatcaaaaacggacgaccaagatccatcggtccacgaccgggccacggggaacgacgacgatgacatcacctccggcggcggctcgggcgtgcatgcttgccggcgaacgacggcgcgacgacgcgaacggagggcacctacgggtagcggacggcacagcgaactcaccggtgaccaaaacggcggcggaagatcaacggacggcgacggcgtcgaggaaaaggcggcggcactcttcggcttgacgacggcgacggtgctccggcggttgacagcaacgatggaggggcggacgaggacggcgacgcgacggcgaccacgacggcggtcttcccgagcgacggcgacgactagagcgacggcggcgcacagctggagcgacggcgacgacggcggcgcgaggtctcacggggctagggcgctacggacgacggcgggcaaaggcgagggtggagatgggtag

SEQ ID NO: 13960 - DNA, 4620 bp, Oryza sativa
  Clone ID: TFbOSC413734j.C1.o11.fg
atgtcgaacgaggtgaaccacgtagggaaggctcccatgtttaatggcacaaactattccacttggaaaattaaaatgtctactcacctcaaagctatgagcttccatatttggagtattgtggatgtaggctttgcaatcaccggcacgcccttgacggagattgatcaccgcaacctccaactcaatgcccaagccatgaatgctttgttcaactctttgagccaagaagagtttgatagagtgagcaaccttgagaccgcatatgagatttggaacaagttggcgaagatccatgagggcacaagtgagtacaaggatgccaagcttcacttcctcaagatccaatatgagacattctccatgttgcctcatgagagtgtgaatgacatgtatgggaggctcaatgtcattgtgaatgatctcaaggggcttggggcaaactacaccgatcttgaggttgccaaaaagatgcttagggctctaccggagaagtatgagacccttgtcaccatgctcatcaactctgacatgtcaaggatgacaccggcaagcctcttggggaagatcaacaccaatgacatgtataagttgaagaagaaggaaatggaggaagcctcaccttccaagaagtgcattgctctccaagctgaagttgaagacaagggcaaggtgaatgacgtcaataagaacttggaagaagagattgcacttcttgctagaaggttcaatgatttcttgggaaggagaaaggagagaggaaagggctccaactcaaataggagaagaaataaaagacccaataagactctctccaacttgaggtgctttgagtgtggtgagaagggacactttgcttccaagtgcccttccaaggatgatgatggagacaagtcatcaaaaaaaaagagtggaggctacaagcttatgaagaagctcaagaaggaaggcaagaagattgaggccttcatcggggaatgggactcaaatgaggagagctccgcctcttccgggtccaaggaagaagatggtgatgatgcaagctccaagaagaagaagatggccgttgttgccatcaaggaggccccatcactcttcgctccactttgtctcatggcaaagggctcctctaaggtaacatctcttagtgatagtgagagtgatgatgattgtgatgatatttcctatgatgagcttgtgagtatgtttgaggagctccatgcttatagtgagaaggagattgtcaagttcaaggccctaaagaaggatcatgcttctttggaggttttgtatgaggagctaaagacttctcatgagagactcaccatttctcatgagaagcttaaggaagctcatgacaacctcctttccactactcaacatggagctctcattgatgttggcatatcttgtgatttgcttgatgatactctagctctagctcttgtgtatctatttgtgatgcctcacttgttgttgagaacaatgagcttaagtagcaagtggctaagctcaacaagagcttggagaggtgcttcaagggtgaactaccacaccggtgggagccattgggtgcttgatagtggatgcactcaacacatgaccggtgatagggctatgttcactacatttgaagtaggagggaatgaacaagagaaagtgacatttgtagacaatagcaaaagaaaggtaattgggttaggtaaaattgctatctccaatgatttgtcaattgataatgtctcttttgttaaatctctaaatttcaatttgctttcggttgctcaaatttgtgatcttggcttgtcatgtgctttcttcccgcaagaagttattgtttctagccttcttgacaagtcttgtgtgttcaaaggttttagatatggaaatctttactttgttgatttcaattctagtgaagcaaatttgaaaacttgtttagttgcaaaaacttctttgggttggctttggcatagaaggctagcccatgttggcatgaatcaattgagcaaactttcaaaacgtgatctagttgtgggcttgaaagatgtgaagtttgagaaagataagctttgtagtgcttgtcaagccggcaagcaagttgcatgttctcatcctactaagagtatcatgtccacatctagaccattagagctcttgcatatggatttgtttggcccaacaacctataagagcattggtggtaatagtcattgtcttgtgattgttgatgattattctcgctatacttgggtgttctttttgcatgataagtctattgttgccgagcttttcaaaaaaattgcaaaaagggcccaaaatgaatttagttgcactcttgtgaaaattagaagtgacaatggttccgagtttaagaataccaatatcgaggactattgtgatgatcttggtattaaacatgaactttccgctacctactcacctcaacaaaatggtgtagtggagaggaaaaatcgtacattgattgagatggcaaggactatgcttgatgaatatggtgtttccgattccttttgggcggaagccataaacaccgcttgccatgcaaccaataggttttatttgcatcgtctcttgaaaaatacttcctatgagctaattgttgggaggaagcctaatgttgcctattttcgagtttttggttgcaagtgttatatttaccgaaagggtgttagactaaccaaatttgaaagtcggtgtgatgaagggtttcttcttggttatgcctcaaatagcaaggcataccgggtctacaacaagaacaaaggtactgtggaagaaaccgccgatgttcaatttgatgagactaatggctcccaagaggggcacgagaatttggatgatgtaggtgatgaaggcttgataagagctatgaagaacatgtcatttggagatgtcaagcctattgaagtggaagacaagccatccacctccactcaagatgagccatctactttcgctacgccaagtcaagctcaagttgaagtggaggaggagaaggcacaagatccacctataccaccaaggatacacaccactctttccaaggatcacccaattgaccaagtgttgggtgacattagtaagggtgttcaaactctatctcgtgtcgcttcgatttgtgaacattactcgtttgtttcttgtcttgagccaaaacatgtagatgaagctctttgtgatccggattggatgaatgctatgcatgaagagctcaacaactttgcaagaaacaaggtgtggactttggttgaaagacctagagaccacaatgtcatagggacaaagtgggtctttagaaacaaacaagatgagaacgggttggtggtgagaaacaaggcaaggttggtggcacaaggtttcacacaagttgaaggtttggattttggtgaaacttttgcccccgtggcaagacttgaggctatttgcatccttcttgcatttgcatcatggtttgatataaaactatttcaaatggatgtgaaaagtgcttttctaaatggtgaaattgccgaacttgtctttgttgaacaacctcccggttttgaagatcctaaatatcctaaccatgatttcaaaattggaaaagttgacaccactcttttcacaaaaatcattggtgatgatttctttgtatgccaaatttatgttgatgacatcatattcggttctactaatgaggtattttgcaaggaatttggtgatatgatgtctagggaatttgagatgtccatgattggagagttgagctttttccttggacttcaaatcaagcaactcaaggatgggacgttcgtgagtcaaaccaagtacatcaaagatctactcaagaggtttggcttggaggatgcgaagcccatcaagacacctatggcaaccaacgggcatctcgaccttgatgagggaggtaaaccggtagatttaaagctttatcgttctatgattggtagcttgctttaccttaccgcatctaggccggatatcatgtttagtgtttgtatgtgtgcatggtttcaagccgctcctaaggagtgtcacttagtggccgtgaaaaggattctaagatatttaaagtattcctctactattggcttgtggtacccaaaaggtgctaaatttaagcttgttggctattccgattcggattatgccggttgcaaagtggatagaaatagtacatccggtagttgccaaatgcttggtagatcccttgtgtcatggtcatcgaagaaacaaaactccgtagccctctctaccgccgaggcggaatatgtttcggcgggtagttgttgtgcccaattgctttggatgaaacaaacattgttggactatggcatatccttcaccaaaaccccactcctatgtgacaatgatagtgccataaagatagccaataacccggtccaacattctagaaccaagcatattgacatacgccatcacttcctaagagaccatgttgccaagtgtgacatagtcattagccacataagaaccgaggatcaactagccgacatctttaccaagcctcttgatgaaacccgcttttgcaagttgaggaatgagttaaatgtcatagacttctctaatgtggcttga

SEQ ID NO: 13961 - DNA, 1440 bp, Oryza sativa
  Clone ID: TFbOSC415632j.C1.o3.gm
atgttgcctcatgagagtgtgaatgacatgtatgggaggctcaatgtcattgtgaatggtctcaaggggtttggggcaaactacaccgatcttgaggttgcccaaaagatgcttagggctctaccggagaaatatgagacccttgtcaccatgctcatcaactccgatatgtcaaggatgacacccgcaagcctcttggggaagatcaacaccaatgacatgtacaagttgaagaagaaggagatggaggaagcctcaccttccaagaagtgcattgctctccaagccgaagttgaagataagggcaagggcaaggtgaatgaagtcaatgaggacttggaggaagagatttcccttcttgctagaaggttcaatgatctcttgggaaggagaaaggagagagaaagtggctccaactcaaataggagaagaaatagaagacccaacaagactctctccaacttgaggtgctttgagtgtggtgagaagggacactttgcttccaagtgcccttccaaggatgatgatggagacaagtcatccaagaagaagagtggaggctacaagctcatgaagaagcttaagaaagaaggcaagaagattgaggcattcatcggggaatgggactcaaatgaggagagctccgcctcatccgggtctgaggaagaaggtggtgatgatgcaagctccaagaagaagaagatggccgttgttgccatcaaggaggctccatcactcttctctccactttgtctcatggcaaagggctcctctaaggtaacatctcttagtgatagtgagagtgatgatgattgtgatgatgtttcctatgatgagcttgtgagtatgtttgaggagctctatgcttatagtgagaaggagattgtcaagttcaaggccctaaagaaggatcatgcttcttttgaggctttggaatttgagatgtctgagttgagcttcttccttggacttcaaataaagcaactcaaggacgggacgttcgtgagccaaaccaagtatatcaaggatgtactcaataggtttggcttagaggatgcgaagcccatcaagacacctatggcaaccaacgggcatctcgaccttgatgagggagtgatgcctccccgcactcgccatggtcgtcgtgcacccactccggatcccgtgagtgagcctgaggaatcgagcggagatgagtacgctcaaagtgatgaagaggttgaggccaatgttgaaggggctagtgaggaggctagtggagatgatgacagtggaagtggagaggatgaggatgaaggaagtgatgatatgcacattgatctctccatccagtttgttgtgaacatgaggaatctatcgcagtacaccatcttgaggcaccatgatcagttttttagtcctcgggacaccccggatccccgttttcacaccgctttctag

SEQ ID NO: 13962 - DNA, 4125 bp, Oryza sativa
  Clone ID: TFbOSC421293j.C1.o7.fg
atgtcgaacgaggtgaaccatgtagggaaggctcccatgtttaatggcacaaactattccacttggaaaattaaaatgtctactcacctcaaagctatgagcttccatatttggagtattgtggatgtaggctttgctatcaccggcacgcccttgacggagattgatcactgcatcctccaactcaatgcccaagccatgaatgctttgttcaactctttgagccaagaggagtttgatagagtgagcaaccttgagaccgcatatgagatttggaacaagttggcggagatccatgagggcacaagtgagtacaaggatgccaagcttcatttcctcaagatccaatatgagacattctccatgttgcctcatgagagtgtgaatgacatgtatgggaggctcaatgtcattatgaatgatctcaaggggcttggggcaaactacaccgatcttaaggttgcccaaaagatgcttagggctctaccagagaagtatgagacccttgtcaccatgctcatcaactccgacatgtcaagcatgacaccggcaagcctcttggggaagatcaacaccaatgacatgtacaagttgaagaagaaggagatggaggaagcctcaccttccaagaagtgcattgctctccaagccgaagttgaagacaagggcaagggcaaggtgaatgaagccaatgaggacttggaggaagatattgcccttcttgctagaaggttcaatgatctcttgggaaggagaaaggagagaagaaggggctccaactcaaataggagaagaaatagaagacccaacaagactctctccaacttgaggtgctttgagtgtggtgagaagggacactttgcttccaagtgcccttccaaggatgatgatggagacaagtcatccaagaagaagagtggaggctacaaactcatgaagaagctcaagaaggaaggcaagaagattgaagccttcatcggggaatgggactcaaatgaggagagctccgcctcatccgggtccaaggaagaaggtggtgatgatgcaagctccaagaagaagaagatggctattgttgccatcaaggaggctccatcactcttcgctccactttgtctcatggcaaagggctactctaaggtaacatctcttagtgatagtgagagtgatgatgattgtgatgatgtttcctatgatgagcttgtgagtatgtttgaggagctccatgcttataatgagaaggagattgtcaagttcaaggccctaaagaaggatcatgcttctttgaatgtcttctctagctttagctcttgtgtttctatttgtgatgcctcacttgttgttgagaacaatgagcttaaggagcaagtggccaagctcaacaagagcttggagaggtgcttcaagggtaagaacactcttgacaagattttgagtgagcaacggtgcattcttaacaaggagggacttggattcattccaaagaagggtaagaaaccttctcaccgtgccactcgttttgtcaagagtaatggaaggctcatgatggtagcattgttcctagatatgtgggttcccctatactcggtggtgaactaccgcaccggtgggagccattgggtgcttgatagtggatgcactcaacacatgaccggtgatagggctatgttcaccacatttgaagtaggagggaatgaacaagagaaagtgacatttggagacaatagcaaaggaaagcttttcaaaaagtttgtaaaaagggtccaaaatgaatttaattgcactcttgtgaaaataagaagtgacaatggttccgagtttaagaataccaatatcgaggactattgtgatgatcttggtattaaacacaaactttccgctacctactcacctcaacaaaatggtgtagtggagaggaaaaattgtacattgattgagatggcaaggactatgcttgatgaatatggtgtttctgattccttttgggcggaaaccataaacaccgcttgccatgcaaccaataggctttatttgtatcgtctcttgaaaaagacttcctatgagctaattgttgggaggaagcctaatgttgcctattttcgagtttttggttgcaagtgttatatttaccgaaagggtgctagactaaccaaatttgaaagtcggtgtgatgaagggtttcttctaggttatgcctcaaatagcaaggcataccaggtctacaacaagaacaaaggtattgtggaagaaaccgccgatgttcaatttgatgaaactaatggctcccaagaggggcacaagaatttggatgatgtaggtgatgaaggcttgatgagagctatgaagaacatgtctattggagatgtcaagcctattgaagtggaagacaagccatccacctccactcaagatgagccatctacttccgctacgccaagtcaagctcaagttgaagtggaggaggagaaggcacaggaaccacctatgccaccaaggatacacaccgctctttccaaggatcatccaattgaccaagtgttgggtgacattagtaagggtgttcaaactcgatctcgtgtcgcttcgatttgtgaacattactcgtttgtttcttgtcttgagccaaaacatatgaatgctatgcatgaagagctcaacaactttgcaagaaacaaggtgtggactttggttgaaagacctagagaccacaatgtcatagggacaaagtgggtctttaggaacaaacaagatgagaacgggttagtggtgagaaacaaggcaaggttggtggcacaaggtttcacacatgttgaaggtttggactttggtgaaacttttgcccccgtggcaagacttgaggctattcgcatccttcttgcatttgcatcatgctttgacataaaactatttcaaatggatgtgaaaagtgcttttctaaatggtgaaattgccgaacttgtctttgttgaacaaccccccggttttgaagatactaaaaatcctaaccatgtttataaactctcaaaagctctttatgctttaaaacaagctcctagggcttggtatgaaagattgagagattttcttttgtcaaaggatttcaaaattgaaaaagttgacaccacccttttcacaaaaatcattggtgatgatttctttgtgtgtcaaatttatgttgatgacatcatattcggttctactaatgaggtattttgcaaggaatttggtgatatgatatctagggaatttgagatgtccatgattggagagttgagcttctttcttggacttcaaatcaagcaactcaaggatgggacgttcgtgagccaaaccaaatacatcaaagatctactcaagaggtttggcttggaggatgcgaagcccatcaagacacctatggcaaccaacgggcatctcgaccttgatgacggaggtaaaccggtagatttaaagctttatcgttctatgattggtagcttgctttaccttacagcatctaggccggatatcatgattagtgtttgcatgtgtgcacggtttcaagccgctcctaaggagtgtcacttagtggccgtgaaaaggattctaagatatttaaatcattcctctactattggcttgtggtacccaaaaggtgctaaatttaagcttgttggcaattccgactcggattatgccggttgcaaagtggatagaaagagcacatctggtagtttccaaatgcttggtagatcccttgtgtcatggtcatccaagaaacaaaactccgtagccctctctaccgccggggcggaatatgtttcggcgggtagttgttgtgcccaattgctttggatgaaacaaacattgttggactatggcatatccttcaccaaaaccccactcctatgtgacaatgatagtgccataaagatagccaataacccggtccaacactctagaaccaagcatattgacattcgccatcacttcctaagagaccatgttgccaagtgtgacatagtcattagccacataagaaccgagaatcaactagccgatatctttaccaagcctcttgatgaaacccgcttttgcaagttgaggaatgagttaaatgtcatagacttctctaatgtggcttga

SEQ ID NO: 13963 - DNA, 588 bp, Oryza sativa
  Clone ID: TFbOSC421503j.C1.o11.fg
atggcgcgacgtggggagggcggcacaacgctgaagcggcgagcacggggagggttgggtggagcgggcggaaacagcagcgtggagatggcggcgtggggagggcggcacaggggctacaccgatcttgaggttgcccaaaagatgcttaggactctaccagagaagtatgagaccctagtcaccatgctcatcaactccgacatgtcaaggatgacacctgcaagcctcttggggaagatcaacaccaatgacatgtacaagttgaagaagaaggagatggaggaagcctcaccatccaagaagtgcattgctctccaagccgaagtggaagacaagggtaagagcaaggtgaatgaagccaatgatgacttagaggaacatactgcccttctagctagaaggttcaatgatctcttgggaagaagaaagcagagaggaagggactccaactcaaatagaagaagaaatagaagacccaacaagactctttccaacttgaggtgctttgagtgtggtgagaagggacattttgcttccaagtgcccttccaaggatgatgatggagacaagtcatccaagaagtag

SEQ ID NO: 13964 - DNA, 546 bp, Oryza sativa
  Clone ID: TFbOSC4271j.C1.o1.fg
atggaggaagcctcaccttccaagaagtgcattgctctccaagctgaagttgaagacaagggcaaggtgaatgacgtcaataagaacttggaagaagagattgcacttcttgctagaaggttcaatgatttcttgggaaggagaaaggagagaggaaagggctccaactcaaataggagaagaaataaaagacccaataagactctctccaacttgaggtgctttgagtgtggtgagaagggacactttgcttccaagtgcccttccaaggatgatgatggagacaagtcatcaaaaaaaaagagtggaggctacaagcttatgaagaagctcaagaaggaaggcaagaagattgaggccttcatcggggaatgggactcaaatgaggagagctccgcctcttccgggtccaaggaagaagatggtgatgatgcaagctccaagaagaagaagatggccgttgttgccatcaaggaggccccatcactcttcgctccactttgtctcatggcaaagggctcctctaagcatttctacctcttgtga

SEQ ID NO: 13965 - DNA, 3061 bp, Oryza sativa
  Clone ID: TFbOSC5481j.C1.o1.fg
atgtcgaacgaggtgaaccatgtagggaaggcttccatgtttaatggcacaaactactccacttggaaaattaaaatgtctactcacctcaaagctatgagcttccatatttggagtattgtggatgtaggctttgatatcaccggcacacccttgacggagagtgatcaccgtaacctccaactcaatgcccaagccatgaatgccttgttcaactctttgagccaagaggagttcgatagagtgagcaaccttgagaccgcatatgagatttggaacaagttggcggagatccatgagggtacaagtgagtacaaggatgccaagcttcatttcctcaagatccaatatgagacattctccatgttgcctcatgagagtgtgaatgacatgtatgggaggctcaatgtcattgtgaatgatctcaaggggcttggggcaaactacaccgatcttgaggttgcccaaaagatgcttagagccctaccggagaagtatgagacccttgtcaccatgctcatcaactccgacatgtcaagaatgacacccgcaagcctcttggggaagatcaacaccaatgacatgtacaagttgaagaaggagatggaggaagcctcaccctccaagaagtgcgttgctctccaagccaaagttgaagacaagagcaagagcaaggtgaatgaagtcaatgaggacttgagaaaggagagaggaaggggctccaactcaaataggagaagaaatagaagacccaacaagactctctccaacttgaggtgttttgagtgtggtgagaagggacactttgcttccaagtgcccttccaaggatgatgatggagacaagtcatccaagaagaagactggaggctacaagctcatgaagaagcttaagaaggaagggaagaagattgaggctttcatcggggaatgggactcaaatgaggagagctccgtctcatccgggtccgaggaagaaggtggtgatgatgcaagctccaagaagaagaagatggccgttgttcccatcaaggaggctccatcactcttcgctccactttgtctcatggcaaagggctcctctaaggtaacatcccttagtgatagtgagagtgatgatgattgtgatgatgtttcctatgatgagcttgtgagtatgtttgaggagctccatgcttatagtgagaaggagattgtcaagttcaaggccctaaagaaggatcatgtttctttggaggtcttgtatgaggagttaaagacctctcatgagagactcaccatttctcatgagaagcttaaggaagctcatgacaacctcctttccactactcaacatggagctcacattgatgttggcatatcttgtgatttgcttgatgatagtgctacttgccatattgctcatattgcatcatctagcatttctacctcttgggatgatcttatggatatgcctagccctagctctagctctagctcttgtgtttctatttgtgatgcctcacttattgttgagaacaatgagcttaaggagcaagtggctaagctcaacaagagtttggagagatgcttcaagggtaagaacactcttgacaagattttgagtgagcaacggtgcatccttaacaaggagggacttggattcactccaaagaagggtaagaaaccttctcaccatgccactcgttttgtcaagagcaatggtaagtattgctccaagtgttgtgaggttgggcatttggtgaactaccgcaccggtgggagccattgggtgcttgatagtggatacactcaacacatgaccggtgatagggctatgttcaccacatttgaagtaggagagaatgaacaagagaaagtgacatttggagacaatagcaaaggaaaggtaattgggttagttgcaaaaacttcattgggttggctttggcataggaggctagctcatgttggcatgaatcaattgagcaaactttcaaaacgtgatctagttgtgggcttgaaagatctgaagtttgagaaagataagctttgtagtgcttgtcaagccggcaagcaagttgcaggttctcattctactaagagtatcatgtccacatctagaccattggagctcttgcatatgaatttgtttggcccaacaacctataagagcattggtggtaatagtcattgtcttgtgattgttgatgattattctcgctatacttgggtgttctttttgcatgataagtctattgttgccgagtttttcaaaaagtttgcaaaaagggcccaaaatgaatttagttgcactcttgtgaaaattagaagtgacaatggttccgaatttaagaataccaatatcgaggactattgtgatgatcttcatatcaaacacgaactttccgctacctactcacctcaacaaaatggtgtagtggaaaggaaaaatcgtacattgattgagatggcaagaactatgctagatgaatatggtgtttccgattctttttgggcggaagccataaacaccgcttgccatgcaaccaatagactttatttgcatcgtctcttgaaaaagactttctatgagctaattgttgggaggaagccaaatgtcgcctattttcgagtttttggttgcaagtgttatatttaccgaaatggtgttagactaaccaaatttgaaagtcggtgtgatgaagggtttcttctaggttatgcctcaaatagcaaggcataccgggtctacaacaagaacaaaggtattgtggaagaaaccgccgatgttcaatttgatgagactaatggctcccaagaggggcacgagaatttggatgttgtaggtgatgaaggcttgatgagagctatgaagaacatgtctattagagatgtcaagtctattgaagtggaagacaagccatccacctccactcaagatgagccatctacttccgcttcgccaagtcaagctcaagttgaagtggaggaggagaaggcacaagatccacctatgcctccaagaatacacaccgctctttccaaggatcacccaattgaccaagtgttgggtgacatta

SEQ ID NO: 13966 - DNA, 1580 bp, Oryza sativa
  Clone ID: TFbOSC6365j.C1.o1.np
agctagtgtggcacttgatcatctccgagccaggtcatcacttgttactcttggaggttgccgcctcctagacggcttgtggaggagttgcccggtgacctctccgagaagattgtggaggaggcccggcgctggctttgctatcaccggcacgctcttgatggagattgatcaccgcaacctccaactcaatgcccaagctatgaatgctttgttcaactctttgagccaagaggagttcgatagagtgagcaaccttgagactgcatatgagatttggaacaagttggcggagatccatgagggcataagcgagtacaaggatgccaagcttcatttcctcaagatccaatatgagacattctccatgttgcctcatgagagtgtgaatgacatgtatgggaggctcaatgtcattgtaaatgatctcaagggacttggggcaaactataccgatcttgaggttgcccaaaagatgcttagggctctaccagagaagtatgagacccttgtcaccatgctcatcaactctgacatgtcaaggatgacacccgcaagcctcttggggaagatcaacaccaatgacatgtacaagttgaagaagaaggagatggaggaagtctcacattccaagaagtgcattgttctacaagccgaagttaaagacaagggcaagggcaaggagagaggaagggactccaactccaataggagaagaaatagaagacccaacaagactcttcccaacttgaggtgctttgagtgtggtgagaagggacactttgcttccaagtgcccttccaaggatgatgatggagacaagtcatccaagaagaagagtggaggctacaagctcatgaagaagctcaagaaggaaggcaagaatattgaggcctttatcggggaatgggactcaaatgaggagagctccgcctcatccgggtccgaagaagaaggtggtgatgatgcaagctccaagaagaagaagatggccgttgttgccatcaaggaggctccatcactcttcgctccactttgtctcatggcaaaggactcctctaaggtagcatttcttagtgatagtgagagtgatgatgattgtgatgatgtttcctatgatgagcttgtgagtatgtttaaggagctctatgcttatagtgagaaggagattgtcaagttcaaggcccgaaagaaggatcatgcttctttggaggtcttgtatgaggagctaaagacctctcatgagagactcaccatttctcatgagaagcttaaggaagctcatgacaacctcctttccactactcaacatggagttctcattgatgttggcatatcttgtgatttgcttgatgatagtgctatttgccatattgctcatgttgtatcatctagcatttctacctcttgtgatgatcttgtggatatgcctagctctagctctagcacttgtgtttctatttgtgatgcctcacttgttgttgagaacaatgagcttaaggagcaagtggttaagctcaacagagtttggagatgtgcttcaagggtaaggacactcttgacaagattttgagtgagca

SEQ ID NO: 13967 - DNA, 3036 bp, Oryza sativa
  Clone ID: TFbOSC900219j.C1.o12.gm
atgaacagatcaaatatgcgcaacatattgaacacgtaccgaggtgacggaaagaccggttgcgtgaagacggcaaatccggcgggctcccacgaccggcggctgcctgggggaggcggcaacggcagtggtggtggctgttgcgccctcccctccgccagatccggcaagaggggattcggcgggctcccgcggccagcagctgaccggcggaggcagcagcggcggcggtggccgcaccctctccacctggccggtctgaccggctggcatcgccggtctgaccgccatgtcaaggccggctttgctatcaccggcacacccttgacggagattgatcaccgcaacctccaactcaatgcccacgccatgaatgccttgttcaactctttgtgccaagaggagttcgatagagtgagcagccttgagaccgcatatgagatttggaacaagttggtggagatccatgagggtacaagtgagtacaaggatgccaagcttcatttcctcaagatccaatatgagacattctccatgttgcctcatgagagtgtgaatgacatgtatgggaggctcaatgtcattgtaaatgatctcaaggggcttggggcaaactacaccgatcttgaggttgcccaaaagatgcttagagctctaccggagaagtatgagacccttgtcaccatgctcatcaactctgacatgtcaaggatgacacccgcaagcctcttggggaagatcaacaccaatgacatgtacaagttgaagaagaaggagatggaggaagcctcaccttccaagaagtgcattgctttccaagccgaagttgaagacaagggcaaggtcaaggtgaatgaagccaataaggacttagaggaagagattgcccttcttgctaggaggttcaatgatctcttgggaaggagaaaggagagaggaagggggtctaactccaataggcgaagaaatagaagacccaacaagactctctccaacttgaggtgctttgagtgtggtgagaaggggcactttgcttccaagtgcccttccaaggatgatgacggagacaagtcttccaagaagaagagtggaggctacaagctcatgaagaagctcaagaaggaaggcaagaagattgaggccttcatcggggaatgggactcaaatgaggagagctccgtctcatccgggtccgaggaagaaggtggtgatgatgcaagctccaagaagaagaagatggccgttgttgccatcaaggaggctccatcactcttcgctccactttgtctcatggcaaagggctcctctaaggtaacatctcttagtgatagtgagagtgatgatgattgtgatgatatttcctatgatgagcttgtgagtatgtttgaggagctccatgcttatagtgagaaggatattgtcaagttcaaggctctaaagaaggatcatgcttctttggaggtcttgtatgaggagctaaagacctcttatgagagactcaccatttctcatgagaagcttaaggaagctcatgacaacctcctttccactactcaacatggagctcacattgatgttggcatatcttgtgatttgcttgattatagtgctacttgccatattgctcatgttgcatcatctagcatttctacctcttgtgatgatcttgtggatatgcctagctctagctcttgtgtttctatttgtgatgcctcacttgttgttgagaacaatgagcttaaggagcaagtggccaagctcaacaatagtttggagaagtgcttcaagggtaagaacactcttgacaagattttgagtgagcaatggtgcatccttaacaaggagggacttggattcattccaaagaagggtaagaaaccttctcaccgtgccactcattttgtcaagagcaatggaaggctcatgatggtagcattgttgctagatttgtgggttcccctatacttggtggtgaactaccgcaccggtgggagccattgggtgcttgatagtggatgcactcaacacatgaccgggtttcttctaagttatgcctcaaatagcaaggcatactgggtctacaacaagaacaaaggtattgtagaagaaaccgccgatgttcaatttgatgagactaatggctcccaagaggggcacgagaatttggatgatgtaggtgatgaaggcttgatgatagctatgaagaacatgtctgttagagatgtcaagcctattgaagtggaacacaagccatccacctccactcaaggtgagccatctacttctgcttcgccaagtcaagctcaagttgaaatggaggaggagaaggcacaagatccacctatgccaccaaggatacacaccgctctttccaaggatcacccaattaaccaagtgttgggtgacattagtaaggatgaagctctttgtgatccggattggatgaatgctatgcatgaagagctcaacaactttacaagaaacaaggtgtggactttggttgaaagacctagagaccacaacgtcatagggacaaagtgggtctttaggaacaaacaggatgagaacgagttggtgcaactcaaggatgggacgttcgtgagccaaaccaagtacatcaaggatctactcaagaggtttggcttggaggatgcaaagcccatcaagacacctatggcaaccaacaggtatctcgaccttgatgagggagtcggctggggcaggcggtctgaccggccatataggctcggtctgaccggcctggagctggcgccggaaatgacctctgacaagcagtacacatgcctcctgctccgctcgtcagctctcccggtggacgcccgtttcatccttcattcaatggccagcgattttcttgccacgcttgcgctgaagcctggaatggatttgaccgggactgacataccaactccaggagtcagcacgccagcttcggctagagacgagagccaggaagctctcatcattctgacgggatggggcgaggcgtgtgacaggccgcctgttgccacctaa

SEQ ID NO: 13968 - DNA, 4947 bp, Oryza sativa
  Clone ID: TFbOSC401828j.C1.o6.fg
atgtccgacgctcggtctcggcgttcggacgcctcgagcactcggcgtcagcaggacgccgagctcgccgcagcagaagagcgcaggcgagcaacagctcagaccgctgcagcagcagcgagggcagccagactggcggcagcggagttggcagcagccagggcggaggcggaggcggaggcggcggaagatgcggcatgtgcggcggaggtagaggttgagaccttgcgcagcagcatcaacggctccatcgccggcgacatcaccgccgacagggagcttgaggagctggcaagaggaagggcacgggagcgggcagagcggtgggcagcagcccacctccacggcggtggcggcggtccaagggaccacgggcccgccaacgggaacccagatgggcgcgggcgtgccggcggcagcccggagcccgcacgcggccctcgcaggcagcgcggctctttctcccctgaccggcgccatggtcaccacggcgtccagacggtggtcagggactttggtcctggcggtgggtggcctaccctcaccaaaaccaactacatcgagtgggccgcagtgatgagggtgaggctccaggtgcggcacatgtgggaggcagtccggtacggcgacgtcgactacgacgaggatcggcgagcactggatgccctcatcgctgcagtcccgcccgagatgcagttctcgctttcccagaagcggactgccaaggaggcctgggacgccatcgctgcggcacgcatcggcagcgaccgcgcccgcaagtccacactgcaggcactccgcaaggagtgggagaacctagccttcaagccaggtgaggatgttgatgactttgctctccgtctcaacactctcttgcagaaaatggtgcagtacggcgacgacacctatgacgaggagagagctgtcgagaagctcttccgctgcgtccctgagaagtacaggcagatcgctcgctcgattgaatctctgctggacctctccacgatgtcgatcgaggaggcgttaggtcgcctcaaggtcgtcgatggtgatgagccacagcctctctcggggcccatcaccatcggcgggaagctccatctcactcgggagcagtgggaggcctctcagggtgacgggaggaagggggagtcatcttccccgacaggcggccgtaagccgcgcaaggcgcggggaggtgtccagctacggtgggcgcgaagacgtgccgagggtggcgcccgcagaggcgcccagggcgttgccactggcaaccacaagccggcacgagacgacgcctgccgcaactgtgtcaagcttggccattgggccaaagactgtcgacagccacgacgcggccaggcccacgtcgcacgggtggaggaggaagagccggctctgctcctagctcacgcaagcatcgagctacctccagcggcaccggccgcagcggctttcctccaccttgatgagccgaaggtactcgtctccctctgcgacggctccagcaacgacaaggctgatgggtggtacctcgacaccggcgccacccatcacatgaccggccgacgggagttcttcaccgagttcgactccagcgtccgaggctccgtcaagttcggggacgcctccggcgtggagatcaagggtgttggctccgtgaccttcaccgccaagtccggtgagcacaggctgctcaccggagtctactacatccccgcgttgaggaattctatcatcagcgtgggacagctggatgagaacggctcatgcgtgttggtcgaggacggactcatgaggatttgggatcgccgtcgtcgccttcttgccaaggtaaccagaggcactaatcgactctacatcctcagcgcgcaggtcgcacaaccagtttgcctcgccgctcgtcgggacgacgaggcatggcagtggcacgagcgcttcgggcatctccacttcgaggccctgaagcgcctcagtgccaaggagatggtgcgaggcatgccgtgccttgaccacgtggagcagctctgcgacgtctgcgtggtgacgaagcagcggcggctcccctttccccagcagacgagcttccgagccaaggagcggctcgagctcgtgcacggggacttgtgtggcccagtgacaccggccacaccaggaggacgacgctactttctactgctcgtcgacgacctctctcgctacatgtgggtgatggtcctcggcagcaagggagaggctgcggatgccatcaggcgcgcgcaggccgctgcagaggcggagtgcggccgcaagctgcgcgtgctgcgcaccgacaacggcggcgaattcacggcggctgaattcgcgtcgtactgcgctgatgagggcattcagcgccactacaccgcgccgtacagcccacagcagaacggcgtcgtcgagcggcgcaaccagacggttgtggggatggctcgggctcttctcaagcagagggggatgccggccatcttctggggggaggcggtggtgacagccgtctacatcctcaatcgctcgcctaccaaggccctcgatggcaggacaccgtacgaggcctggcatgggcacaagccggcggtctcccacctacgggtcttcggctgcctcgcgttcgccaaggagctcggccacatcggtaagctcgacgacaggagcaccccaggggtgttcatcggctacgcggagggctcgaaggcctaccgcatcctcgacccggagacacagcgtgtgcgcactgcgcgcgatgttgtgttcgacgaagggcgagggtgggtatgggacaaggcggtggacgatggttcgactccgacgtacgacgacttcaccatcgagtacgtccacttcgagggagctgggggagtaggcagcttttcatctagcgtgtctaccccagcccccgaatctccaccgactccgacaccaacacaccctcgggccacgacttcgactacgacgagctcttcgtcgacaccaccccagccagtgactccacatgctccagctccaacagccactcctccaagcacgtctactccgacgccagctcgtgttgagcgcagcccggtggagttcgctactccgctctcccacgacggggagcgcatcgacgcgtaccacgacggcgagcagctacggtaccgtacgatggaggatcttctcggcgaccagccggtgccgggactggtgcctcgcgacttagaggcgcagttgcaccttgcgtgcgacgacggtgagcctcggtcttttgcagaggccgagaaacacgcggcatggcgtgccgcgatgcagtcggagatggacgcggttcaggagaaccgcacctgggagcttgctgacctccctcgtggtcaccgcgcaatcacccttaagtgggtgttcaagctgaagagggatgaagccggagccatcgtcaagcacaaggctcgcttggtggcacgcggtttcgtgcagcaggaggggatcgactacgacgatgccttcgctcccgtggcacggatggagtccgtgcgactcctttttgcgctggctgctcaggaaggctggggcgtccatcacatggacgtcaagtcggcgtttctaaacggcgacttgaaggaggaggtctacgtgcaccagccgccgggatttgtgatccccggcaaggagggcaaggtgctacgcctgcacaaggccctctacggcttgcggcaggcaccgagggcgtggaatgccaagttggattccacgctcaaggggatgggcttcgagcaaagcccgcacgaggtggccatctaccggcggggcattggaggaaatgccttgctggtgggtgtctacgtcgacgacttggtgatcaccggcaccaaggatgcggaggtcgcggcgttcaaggaggagatgaaggccactttccagatgagtgatctggggcctctctccttctacctggggatcgaagtgcaccaggacaactccgggatcacgcttcgacagaccgcctatgccaagcgcgtcgttgagctggctgggctcaccgattgcaacccagctctcactccgatggaggagagactgaagctgagccgcgacagcacggcggaggaggtggatgctacacagtaccgacgtcttgtggggagccttcgctacctcacccacacacggccggacttggccttcttcgtcggctacgtcagtcggtttatgcagcgaccgacgacggagcaccagcaggccgtgaagaggatcatccgctacgttgcggggactctcgaccacggtctctactacccgaggtgtcctggcaaggcacacttcgtcgggtacagcgacagcgaccacgccggcgacattgacaccagcaagagcacaagcgggattctcttcttcctcggcgagtgcctcgttagctggcagtcaatcaagcagcaggtggtggccctgtccagctgcgaggccgagtacatggcggcatccgccgcttcgacccaggcgctctggcttgctcgactacttagtgatctcctcggcagagatactggagcggtggagctcagggtggatagcaagtccgctctggccctggcaaagaaccccgtttttcacgaacggagcaagcacatccgggtgagttgctgcctcgtgtgcgaccacgatggcgacgggcacccagatggggctggtgagcagagcgatgggccccaggaagttgagcgcgacgacggcgccgataagcgtgagcccggtcaggagcaggagctcggcgccggaggcgacgagcgtgaggaagccgacaacttgggtggagctgggcgcgtgagtttgcactttgcacccgccggagcagcatcgtcgacgacgagtttggcgccgtgggcgcgtacccatggcgctacggtgccggaccgtgcgcgtgctgctgctgatatgccattctcgcggttgacctag

SEQ ID NO: 13969 - DNA, 4331 bp, Oryza sativa
  Clone ID: TFbOSC10374j.C1.o1.fg
atggttgttcagaatgattgggcctatgcaacaggatgccgcgctacaagcctgagtacttgtttggtgttgagggatttgtccaggagttgcgtacgatgtcctttgtcataggatttgggactgcccctttttacgcccagattcctcatgatcgtcacgaagaaaagtgccgagtcaaagtcaccttgaacagtaatagtgaagatatcccctcagtgatgttcgaagctagaggaagaaactacatccatgcatgtcaggaggtggcaaggatcgccataggagagctccgcgatcgctacagtgatcagttggccgacactgagtatcgctaccatcctcgccaaccacagggaagtgatcgtggcagctaccttgagactgagggaattgagaatgatgctaccacaaggcatttggttgagatgctgcgggctatggatgaaacccgtgcggaggttgtgctagcagctcaagatcgtgaagatcggaatcgtggtaagatttgcaagctagaagacaaggtggatcgtttggagaaggaactagccgcgttaaagggagaagcaccaccgcagaaggccaggattcgtcttaccgcaaggaagagagctctatttgtccctcgctaccaattggcgccaaaggtccgtgtggtggaaaaagaagttaccccagccctagcggatcctccggtcgtcaacatggtgctcactcgcagcaacgggaatggccctaacaacaacaataacaacaacaacaatggagagaatcccacacttgcccaggtcctggctcaacaggcacagcttatgaacatgatgatgcagcaactccagaaccagcagaaccagggaaataaccatgcacctccccagaacaagttagcagaatttcttcgtgtgaggccgcctactttctctagcaccaccaatcctgttgaagctggtgattggctgcatgacatagagaagaagttggatttgcttcagtgcaccgatcaggagaaggtctcatttgcatcacaccagctgcatggccctgcctctgaatggtgggatcacttccgcttgaacaggactactgctgaacctatcacttggcttgaattcaccgctgctttccggaagacgcatataccatcgggagtggtgtctctcaagaaggagttcaggtcgctcacccagggatctcgctctgttacggagtatctgcacgagttcaatcgtctggctcgttatgctccggaagatgtgcgcactgatgaagagcgtcaggagaagttcttggaaggacttaatgatgagctttcttacccactcatgactggggattatcatgatttccagaagttagtggataaggctattcgccaggaggacaagtacaatcgcatggagcaaaagaaacgccggattgctcaattcaaggcacaacaggggaatagtcaaaggccgcgtcttactttaggaccccagtctatgccacagggaggttcttcgtctgttgttcgtccgcatcgtcagttcttcaaccacaatgctggcaacaacatccgcaatcaagctccacgccctgttgcagcttcgacacagcaacaacctgccaagaaggagcaaggcagcaagcccggggtgtgcttcaactgtggagacctaggacattatgctgacaagtgtccgaagccccgacgcgtgaaggttgtccctacccagagcaactctaccgcaccagcatcaaaggcccgtgtcaatcatgttgctgctgcagaagctcaaggtgctccagatgtgattttgggtacgtttcttgttaacttagttcctgcaacagtgcttttcgattctggtgcttcacattcattcttatctatgagttttgcgggaaatcatgggatggaagtagaagatcttagacgtcctttgatggttagtaccccaagtaatcaagcactctctttgcaacgtagcccctctgtcagaatagaaattcaaggagtaccatttctggccaatcttatcttgttagaatccaaagaccttgatgtcatcctagggatggactggttagccagatataaaggtgtgatagactgtgctaacagaaaagtaactctcaccagtaatgatggtcgagttgtaactgttcatgcattgtcttctgagtctttaaggtcaagactgaaccaaataactttggatgagattcctgtagtccgggagtatcctgatgtgttcccagacaatttacctggtatgccgcccaaaagggatatagagttcagaatagatttggtaccaggaacaactccgatccataagagaccttatagaatggcagccaatgagttggcagaagtcaagaggcaagtagacgatttgcttcagaaaggatacatcagaccgagttcgtctccatggggagctccgatagatcttcgatcagggtatcaccagttgagaatcaacgaggaagatatacctaagacagcttttaccactaggtatgaattgttcgaatgtactggtatgtcttttggacttaccaatgcccctgctttcttcatgaacttgatgaataaggtgtttatggaatacctagacaagtttgtggtggtctttattgatgacattcttatctactcccgaaccaaagaagagcatgaagaacatcttcgccttgcactagagaagctacgagaacatcagttgtatgccaagtttagcaagtgtgaattttggttgtctgaagtgaagttccttggtcacgtcatctcagcaggaggagttgccgtcgatcctagtaatgtggaatccgtaaccaactggaaacaaccaaagacagtttcagagattcgcagtttcctaggccttgcaggatattatcagaggttcatagagaatttttccaagattgctaagccaatgacacgattacttcaaaaggatgtgaagtacaagtggtcagaagaatgtgagcagagttttcaagagttgaagaatcgcttaatatcagctcctattttgattttacctgatccaaagaagggttttcaagtgtattgcgatgcatccaaacttggattaggctgtgttctgatgcaagatgggaaggtggttgcctatgcatctcgtcagttacgtccgcatgagaagaactaccctactcatgatcttgagttagctgcagtagttcatgcgttgaagatttggcgtcattatcttttcggtactcgtacagaggatgagcaaggaactgtatggttgggtgagagaatctgcgtccccgacaacaaagatttaaaagatgcaattctgaaagaagctcatgatactttatactccattcaccctggtagtaccaaaatgtaccaggatctcaaggaaagattttggtgggcaagtatgaagcgtgaaatcgcagaatacgtagcagtatgtgatgtttgtcagcgagtcaaggcagaacatcagaaacccgccggtttgctgcagcctttgaagattcctgaatggaagtgggaggaaatcggtatggatttcatcactggtctacccagaacgtcatcaggccatgactctatttgggtgatagtcgacagacttaccaaagtggctcatttcatcccagtaaagacaacttattctggaagtcggttggcggaattgtatatggccaggattgtgtgtttgcatggcgtccctaagaagatagtgtctgatcgaggcagtcagtttacttcaaagttttggaagaagcttcaggaagagatgggttctaagctgaactttagtactgcttatcatccgcagacagacggacaaaccgaaaggacttatgcggaattctcgtacaacaacagttatcaagctagtcttcagatggctccttacgaagcactgtatggttggaagtgccgcactccgcttttgtgggatcaaacgggagaacgtcaggttttcgggacggatatcctgagggaagcagaagaaaaggtgaaaaccattcaagaaagattgcgtgtggcccagtctcgtcataagagttatgccgacaatcgccgcagagatttgagttttgacgaaggagattatgtgtatcttcgtgtcacgcctcttcaaggagttcatcgttttcacaccaaaggaaaattggcaccgcgttttgtgggaccttataagattgtcagtagaagaggagaggttgcttatcagttgaagttacctcaatctttggcaggagtccataatgtgttccatgtgtcgcaattgaagatgtgtttaagagtacctaccgaagaaactaatcttgaacagatagaagtctaa

SEQ ID NO: 13970 - DNA, 1221 bp, Oryza sativa
  Clone ID: TFbOSC400044j.C1.o80.fg
atgctgctgcgtcttccgtgcgcgcgcggccccgcgccggcggccgccgcccggtggagacccccggggcgggcggcgcggacggcaccacgtctcggccgagggcacgccgccgcttcgtccgccgacggcagcggcgctccgagctctccgctttttgttctctgccattcccaagctctgaccctggcgttgccgccgcagtccctccactacgactacgatcctttggccgacctccttggaccagacgtcgacccgacctcatcccaaagatctttcaatgccggcgtcatcttggtgacttggctaatttggaaagagcacaatgagtctttgaggggcgtgcagtctctccggaatactgctccagttgcagagaaggggaagctgaggtcctgggttggtccaaatgggcaatactatcgtgagctgccttgccctagctgtcgaggtagaggatacactccttgcaaacagtgtgggatagacagatccagtttggactgccctatgtgcaatggcaagggcattagggagtgtgtgcaatgtgctggagagtgtgttatatggcaagaatctattgatgagcaaccatgggagaaagttcgttccagttctcccttgaaagtaaaagaggatgatgaagtcgacaaactggagataaagattaacacatcaaaaagatcaaggcgtacttacccatctccatcccctgaagttgccctgaagattagcagatctttaagaagtctgaatgctaaaacaggactgtttactaagcatatgaagattatacaccaagaccccaaattgcatgcacaaagggttgctgcaatcaaaaaaacaaaaggtactgctgctgcaagaaagcatgcatctgaaactcaaaaggcattcttcagcaatcccgagaatcggcttaagagaagcattgccatgaaaggggtgaaattcttctgcagcaaatgtgggcaagaaggtcataggagcttctattgcccaacagtgagagaaatttcaggcagagcgcatttcagatgccgattatgtgggggaaagggtcataatagccgaacatgtggaaagccaaagtcagagaatgagtgtcaacgacaacctcggcactgcagccaatgtggtgaaagggggcacaaccgtcgtaactgtcccagatccaccaccgttgaggttgaggatgtcaagatttactcagagtaa

SEQ ID NO: 13971 - DNA, 5194 bp, Oryza sativa
  Clone ID: TFbOSC401692j.C1.o10.np
attccaacgttcccggagagtccgaatttgcaggagaatattttgaggaatttcaaggccagcaaggcaactcctggtttggaatagtatattcctggtttggagatagaactgtgcagccgggattggttgttcagaatggttgggcctatgcaacaggattaggcgtagccctggtcaagctgcctatggagtggagtcatttgttcaggagttgcgtacgatgtccttcctcataggatttgagactgcccctttgtatgcccagattcctcatgatcgtgatgaagagaagtgtcgtgtcaaagtcaccttgaacagtaatcgtgaagatatcccatcggtgatgttcgaggctggagagggaagctacaatcatgcttgttaggaggtggcaaggatcgccataggagagctccgcgaaagctacaatgatcggttggccgacaccgagtaccgctaccatcctcgtcaaccccagggaagtgaccgtggcagttaccttgaacctgcagggattgagaatgatgctaccacaaggcatttggttgagatgctgtgggccatggatgagacccgcgctaaaattgtgatagcagctcaagatcgtgaagaccggaatcgcggaaagatttgcaagctggaggacaaggtggatcgtttggagaaggagctagccgcattaaaaggagaagcgccaccgcagaaggccagggttcgtcttaccgcaaggaagagagctctatttgtccctcgctaccagttggcgccaaagatggtgcttactcgcagcaacgggaatggccccaaccccaacaacaacaacaacaatgcagagaatcccacgcttgctcaagtcctggctcaacaggcacagcttatgaatctgatgatgcagcaactccagaaccagcagaaccagggaaacaaccatgcacctcccccgaataagctggcagaatttcttcgcgtgaggccgcctactttctctagcaccaccaatcctgttgaagctggtgattgcctgcacgccatagagaagaagttggacctgcttcagtgcacagatcaagagaaggtttcttttgcttcacaccagctgcatggccctgcctctgagtggtgggatcacttccgtctcaacaggactactgctgaacctatctcttggcttgagttcaccgctgctttccggaagacgcacataccatcgggagtggtgtctctcaagaagaaggagttcagggcgctcattcagggatctcgctctgtcaccgaatacttgcatgaattcaatcgtctggcccgttgtgctccagaagatgtgcgcactgatgaagagcgtcaggagaagttcttcgaaggtctgaatgatgagctttcttacccattaatgactggggattatcatgatttccagaagttagtggataaggctattcgccaggaggacaagtacaactgcatggagcagaagaaacgccgaattgctcacttcaaggctcagcaggggaatagtcagagacagcgtcttgctatgggacctcagtcaatgctagagggaggttcttagtctgttgttcgtccgcagcgtcagttcttcaacaacaatgctggcaacaacaaccgcaaccaagctccacgtcctgttgcagctctgacatagaatcagctagccaagagggagcaaggcagcaagcccggagtgtgcttcaattgtggtgacctaggacattacgctgacaagtgtccgaagccccgccgcgcgaaggttgtccctgctcagaacaactcctccgcaccagcgacaaaggctcgtgtcaatcatgttgctgctgcagaagctcaaggtgctccagatgtgattttgggtacattccctgttaactcagttcctacaacagtgcttttcgattctggtgctacgcattcctttttatctttgagttttgcgggaaatcatgggatggaagtagaagatcttagacgtcctttgatggttagtactccgagtaaccaagcactctcatcacaacgtagcccctctgtcagaacagagattcaaggagtaccatttctggccaaccttattctgttagaatccaaagatcttgatgtcatcctaggaatggactggttagccagatataaaggtgtgatagattgtgccaatagaaaagtaactctcaccagcaatgatggtcaagttgtaactgttcatgcattgccctctgaacttttaaggtcgagtctgaaccaaataactttggaagagattcctatagtacgggagtaccccgatgtgttccctgatgatttacctggtatgccgcctaaaagggatatagaattcagaatagatctggtaccaggaacaactccgatccataagagaccttatagaatggcagccaatgaattagcagaagtcaagaggcaagtagatgatttgcttcagaaaggatacatcagaccgagttcgtctccatggggagctccagtcatctttgtggaaaagaaagatcatacccagaggatgtgtgtggactatcgtgcactaaatgatgtcactatcaagaataagtacccgctgcccagaattgatgatttatttgatcagcttaaaggtgccaccgttttctccaagatcgatcttcgatcagggtatcatcagttgaggattaaagaggaggatatacctaagacggcttttaccactaagtatgggttgtttgaatgtactgttatgtcttttggacttaccaatgcccccgctttcttcatgaacttgatgaacaaggtgtttatagaatacctagacaagttcgtggtcgtctttattgatgatattctcatctattcccgaaccaatgaagagcatgaagaacatcttcgtcttgcactagagaagctgcgagaacatcagttgtatgccaaatttagcaaatgtgaattttggttgtctgaagtgaagttccttggtcacatcatctcagccggaggagttgccgttgatcctagtaatgtggaatccgtaaccaactggaaacaaccgaagacagtttcagagattcgtagttttctgggtctcgcaggttattaccggaggttcatagagaatttttccaagattgccaagcccatgacacgactgcttcagaaagatgtgaagtacaagtggtcagaagagtgcgagcagagttttcaagagttgaaaagtcgcttaatatcagctcccattttgattttgcatgatcctaagaagggtttccaagtgtattgtgatgcatctaagcttgggttaggttgtgttctgatgcaagatgggaaggtggttgcctatgcatctcgttagttacgtccgcatgagaagaactaccctactcatgatcttgagttagctgcagtggttcatgcgttgaagatttggcgtcactatctttttggtactcgtacggaggtgtacactgatcacaaaagtttgaagtatatttttatctagtcggatctaaacatgagacaacagagatggttggaactgattaaggactatgatatgggaattcattatcacccaggaaaggccaatgttgtagcagatgctctcagcaggaaaggctattgcaatgctacggaaggacgacagttgccattgaagttatgcaaggaatttgaaagattaaatttggaaattgtcagtagaggtttcgttgcagccttagaagcgaagcccactctcattgatcaagttagagaagcccaaattaatgatcctgatattcatgagatcaagaagaatatgagaagaggaaaagctatcggtttcttggaagatgagcaaggaactgtatggttgggtgagagaatctgtgtcccagacaacaaagatttgaaagatgcaatactgaaggaagctcatgatactttatactccattcaccctggtagtactaagatgtaccaagacctcaaggaaagattttggtgggcaagtatgaagcgtgagatagcagagtatgtagctgtgtgtgatgtctgttagtgagtcgaggcagaacatcagaaacccgtaggtttgttgcagcctttgaagataccagaatggaagtgggaggaaatcggcatggatttcatcactggtctacccagaacatcatcgggccatcactctatttgggtgatagtcgacaaacttaccaaaatggctcatttcatcctggtgaggacaacatattctggaagccgtttggcggaattgtatatggcaaggattgtgtgtttgcatggtgttcctaagaaaatagtatccgatcgaagtagccagtttacttcaaagttttggaagaaactttaggaagagatgggttccaagttgaacttcagtaccgcttaccatccgcagacagacggacaaactgaaagggtaaatcagattttggaagacatgttgagagcttgtgctttagacttcggtggatgttgggataagaatctgctttacgcggaattctcgtacaacaacagttatcaagctagtcttcaaatggctccttatgaagcactgtatggtcggaagtgccgcactccgcttttgtgggatcaaatgggagaacgtcaggtttttgggactgatatcctaagggaagcagaagagaaggtaaagatcattcaagaaagattgcgtgtggctcattctcgtcataagagttatgccaacaatcgccgcagagatttaagttttgaggaaggagatcatgtgtaccttcgtgtcacgcctcttcaaggggttcatcgttttcacactaaaggaaaattggcaccgcgttttgtgggaccttataagattgtcagtagaagaggagaggtcgcttatcagttggagttacctcaatccttggcaggtgtccataatgttttccatgtgtcacagttgaaaaagtgtttaagggtacccaccgaagaagctaatctggaacagatagtggtccaagaggatctgacatatattgagaaaccaatccgtatcttagagacagatgagagaagaaccaagaatcgagttatccgtttctataaggttcaatggagtaatcactcagaggaagaatctacttgggaacgagaagatgaattaaagtcagctcatccgcatcttttcgctagttcttccaaatctcgaggacgagattctgtt

SEQ ID NO: 13972 - DNA, 5198 bp, Oryza sativa
  Clone ID: TFbOSC422791j.C1.o7.np
agattccgacgtttccggagagtccgtttttgcaggagaagaatttgaagagttccaaggccagcaaggcatctcctggtttggaatggtatattcctggtttggagatagaactgtgcagccgggatggttgttcaggatggttgggcctgtgcagcatgatgccgcgcttcaagcctgagtacttgtttggtgttgagggatttgtccaggagttgcgtacgatgtcctttgccataggatttgggactgcccctttgtatgcccagattcctcatgatcgtgatgaagagaagtgccgagtcaaagtcaccttgaacagtaatagtgaagatatcccatcagtgatgttcgaagctggaggaggaaactacattcatgcatgtcaggaggtggcaaggatcgccataggagagctccgcgatcgctacagtgatcagttggccgacactgagtatcgctaccatcctcgccaaccccaaggaagagaccgtggcagctaccttgagactgaggggattgagaatgatgctaccacaaggcatttggttgagatgctgtgggctatggatgagacccgcgcggagactgtgttagcagctcaagatcgtgaagactggaatcgtggtaagatttgcaagctagaggacaaggtggatcatttggagaaggaactagccgcattgaagggagaagcaccaccgcagaaggccagggttcgtcttaccgcaaggaagagagctctattcgtccctcgctaccaattggcgccaaagatggtgttcactcgcagcaacgggaatggccccaacatcaacaataacaacaacaacaatgggaagaatcccacacttgcccaagtcctggctcaacaggcacagcttatgaacatgatgatgcagcaacttcagaaccagcagaaccagggaaataaccatgcacctccccagaacaagttagcagaatttcttcgtgtgaggctacccactttctctagcaccactaatcctgttgaagctggtgattggctgcacgccatagagaagaagttggatttgcttcagtgcactgatcaggagaaggtctcatttgcatcacaccaactgcatggccctgcctctgagtggtgggatcacttccgccttaacaggactactgctgaacctatcacttggcttgaattcaccgctgctttccggaagacgcatataccatcgggagtggtgtctctcaagaagaaggaattcaggtcgctcacccagggatctcacacggtcaccgagtatctgcacgagttcaatcgtctggctcgctatgctccggaagatgtgcgcactgatgaagagcgccaggagaggttcttggaaggacttaatgatgagctttcttacccactaatgactggggattatcatgatttccagaagttagtggataaggctattcgccaggaggacaagtacaaccgcatggagcagaagaaacgccggattgctcacttcaaggcacaacaagggaatagtcagaggccgcatcttactttaggaccccagtccatgccacagggaggttcttcgtctgttgttcgtccgcagcgtcagttcttcaacaacaatgctggcaacaacatccgcaatcaagctccacgccctgttgcagctccaacacagcaacagcctgccaagagggagcaaggcagcaagcccggggtgtgcttcaactgtggagacctaggacattacgctgacaagtgtccgaagccccgacgcgtgaaggttgtccctgcccagagcaactctaccgcaccagcatcaaaggctcgtgtcaatcatgttgctgctgcagaagctcaaggtgctccagatgtgattttgggtacgttccttgttaactcagttcctgcaacagtgcttttcgattctggtgctacacattcatttttatctatgggttttgcgggaaatcatgggatggaagtagaagatcttagacgtcctttgatggttagtaccccgagtaatcaagcactctctttgcaacgtagcccctctgttagaatagaaattcaaggagtaccatttctggccaatcttatcctgttagaatccaaagaccttgatgtcatcctagggatggactggttagccagatataaaggtgtgatagactgtgccaacagaaaagtaactctcaccaacaatgatggtcgagttgtaactgttcatgcattatcttctgaatctttaaggtcaagtctgaaccaaatagctttggaagagattcccatagaacaggaatacccggacgtgttcccggacgatttacctggtatgccgcctaaaagagatattgaattcagaatagatctggtaccaggaacaaccccgatccataagagaccttatagaatggcagccaatgaattagcagaagtcaagaggcaagtagatgatttgcttcagaaaggatacatcagaccaagttcgtctccatggggagctccagttatttttgtggaaaagaaagaccatacccagaggatgtgtgtggactatcgtgcactaaatgatgtgactatcaagaataagtacccactgcccagaattgatgatttgtttgatcagcttaaaggtgccaccgttttctccaagatagatcctcgatcagggtatcaccagttgaggattaaagaagaagatatacctaagacggcttttaccactaggtatggattgttcgaatgtactgttatgtcttttggacttaccaatgcccccgctttcttcatgaacttgatgaataaggtgtttatggaatacctagacaagttcgaggtggtctttattgatgacattcttatctactcccgaacaaaagaagagcatgaagaacatctttgccttgcactagagaagctacgagaacatcaactgtatgccaagtttagcaagtgtgaattttggttgtctgaagtgaagttccttggtcacgtcatctcagccggaggagttgccgttgatcctagtaatgtggaatccgtaaccaactggaaacaaccgaagacagtttcagagattcgcagtttcctaggcctcgcaggatattatcggaggtttatagagaatttttccaagattgctaagcccatgacacgattacttcaaaaggatgtaaagtacaagtggtcagaagaatgtgagcagagttttcaagagttgaagaatcgcttaatatcagctcctattttgatttgacctgatccaaagaagggtttccaagtgtattgcgatgcatccaaacttgggttaggttgtgttctgatgcaagatgggaaggtggttgcctatgcatctcgtcagttacgtccgcatgagaagaactaccctactcatgatcttgagttagctgccgtggttcatgcgttgaagatttggcgtcattatcttttcggtactcgtacagaggtgtacactgatcacaagagtttaaagtatatttttactcagccagatctgaacatgagacaacggagatggttggaattaattaaggattatgacatgggaattcattatcacccgggaaaggttaatgttgtagcagatgctcttagcaggaaaggctattgcaatgctacggaaggacgacagttgccattggagttatgcaaggaatttgaaagattaaatttgggaattgtcagtagaggtttcgttgcagccttagaagcaaagcccactctaattgatcaagttagagaagctcaaattaatgaccctgatattcaagaaattaagaagaatatgagaagaggaaaagctatcggtttcttggaggatgagcaaggaactgtatggttgggtgagagaatctgtgtcccagacaacaaagatttgaaagacgcaattctaaaggaagcccataatactttatactccattcaccctggtagtaccaagatgtaccaggatctcaaggaaagattttggtgggcaagtatgaagcgtgagatagcggaatatgaagctgtgtgtgatgtttgccagcaggtcaaggcagaacatcagaaacccgccgggttgttgcagcctttgaagataccagaatggaagtgggaggaaatcggtatggatttcatcactggtctacccagaacgtcatcaggccatgactctatttgggtgatagtcgacagacttaccaaagtggctcatttcatcccagtaaagacaacatattccggaagtcggttggcggaattgtatatggcaaggattgtgtgtttgcatggcgtccctaagaaaatagtgtctgatcgaggtagtcagtttacttcaaagttttggaagaagcttcaagaagagatgggttctaagctgaacttcagtactgcttatcatccgcagacagacggacaaaccgaaagggtaaatcagattttggaagacatgttgagagcttgtgctttagacttcggtggaagttgggataagaatttgccttacgccggattctcgtacaacaacagttatcaagctagtctccaaatggctccttacgaagcactgtatggtcggaagtgccacactccgcttttgtgggatcaaacgggagaacgtcaggttttcgggactgatatcctgagggaagcagaagaaaaggtgaaaatcattcaagaaggattgcgtatggctcagtctcgccataagtgttatgccgacaatcgccgcagagatttgagttttgaagaaggagattatgtgtaccttcgtgtcacgcctcttcgaggggttcatcgcttccacactaaaggaaaattggcaccgcgttttgtgggaccttataagattgtcagtagaagaggagaggttgcttatcagttggagttacctcaatctttggcaggagtccataatgtgttccatgtgtcgcaattgaaaaagtgttttagggtatctatcgaagaagctaatcttgaacagatagaagtccaagaggatctgacctatgttgagaaaccaatccttatcttggaaacagatgagagaagaaccagaaatcgagttatccgtttttgtaaagttcagtggagtaatcactcggaagaagaatcaacttgggaacgagaagatgaattgcagtcagctcatccgcatctgttcgccagttctcccgaatctcgaggacgagattctgtt

SEQ ID NO: 13973 - DNA, 1518 bp, Oryza sativa
  Clone ID: TFbOSC15750j.C1.o3.gm
atggaggcagaagattggctatgcatcatagagaagaaactgacccttgtccggatgcgcgaagccgacaaagtgatcttcacagtaaaccaactggagggaccagctggcgattggtgggatacttacaaggaagctcgggaagaagatgctggagaacccacttgggatgaattcactgcagcttttcatgagaacttcgtgcctgctgcggtgatgcgtatgaagaagaacgagttcagaaggccgcgacaaggaaacacaacggtgcaagaatatctaaaccggttcactcagttgacccgctacgcaatcggagacctcgcagatgaagaggaaaagatcgacaagttcatagaagggctgaatgatgagttgcgtgggcctatgattgggcaagatcatgagagtttccagagtttgatcaataaggtcgttaggctggaaaacgaccggaaggttgtggagcacaatcgtaagaggaggcttgccatgaaccgcccacctcaggtggcaactcagcatcctaaaggagctgcctcatcaggatggaaaccaacggtggtaacaacgaaccgtcctaccgcacatagcaacttccacaggccggttaccactcagaaccgagctcctgcaccgaatcaggccgctactggagtaatgaggccaggaagctgtttcaattgtggagagtatgggcattttgccaacaaatgtcctcatctaaacaagacacccattcgcaccggagctaatgcaatggctattcacggggctgctacccctgctggtggacgaggagttagaaagcctatgatagtacactcgcctgggggtgagacccttgatatcatattgggcatggattggttaacaaagaacaaaggaattatcgactgtagacgtagagaggttaccctgaccacgccctggggatcggatatgagagcaactatggatcaagatcctagattgactgaacgtgccggaggcatattcaccatgctacctatgaaaggaatgcccgtagtgcagcgattccccgatgtatttccagaagatttacctggaatgccaccagatcgtgacatagagttcattattgacctgatacccggaactgcccccatatcgaagagaccatatcggatgtcagtcaatgagttggaggaacttaaaaagcaaatcagagagttgcaagagaagggatttgtacgccccagttcgtcaccttggggagccccagtgttattcgtcaaaaagaaggatggtagcatgagaatgtgtgtggactaccgctcactgaacgaagtaactatcaagaacaagtatctgctaccacggattgatgaccttttcgatcaacttaaaggagctaaggtgttctctaagattgaccttcgatcaggataccaccaactgaagattaggatcggagacatacccaagaccgcgttcttaacacgctatggattgtacgagttcacagtaatgtcgtttggtttgaccaacgccccg

SEQ ID NO: 13974 - DNA, 4408 bp, Oryza sativa
  Clone ID: TFbOSC17805j.C1.o1.np
atggcaagccgtcgtcgggcaacaaccagcaacgacgaaactcagacacctgacctaaccactctggctggggttatggccacccaaactcaacttctgcaagctatcgcgaacaaccaaggcaaccgcggggggtcaagctttggagagttcatgaggaccaagccacccacattcgccacagctgaagaacctatggatgctgaagattggttgagggtcattgagaagaagctaactcttgttcgagtacgtgaggccgataaagtgatctttgcggcaaaccaattggaaggaccagccggagactggtgggacacgtacaaagaagcccgggaagaagatgctggagaaccaaactgggaggaatttaccacagccttccgtgacaacttcgtgcctgccgcggtgatgaggatgaagaagaatgagttcaagagattacggcaagggaataccacagtgcaagagtacttgaaccgtttcactcagctggcgcgctacgcaactggagatcttgccgacgaagaggaaaagattgacaaattcattgaaggcttgaatgacgagttacgcgggcccatgattggacaagaccacgatagtttccagagtttaatcaataaggtcgttaggttggagaacgaccggaaggtcatggagcacaatcgtaaaaggaggcttgccatgaaccgcccgcctcagaccgcaccccagcgtcctaaagggacaacctccttggcatggagaccaacagtggtgacaaccagtcgacctgccgcctccagcaatttccacaggccggttaccattcagaaccgcgctcctgcaccgaatcaggccgccacaggatcagtaaggccaggaagctgtttcaactgtggagagtatgggcatttcgccaataaatgtcctcatccaaacaagacacccattcgcaccggagctaatgcgacggctattcacgggaccgccacccctgctactggacgaggtctattcaggaccccgcagactaacaggaccgctaccggctttggacgcgggcaagtgaaccacgttcgagctgaagaggcccaggaagatcaaggcgtactgatgggtatgttttcactcaactccactccagttaaagttctcttcgattcaggagcatcgcattcatttatatctttgaaagcaagtcaacaacacaatttaaccagagttaaattaagacaaccaatgttagtacattcacctgggggtgagatagcggtggatacagcttgcattgacgtacccatccgccttaggatgtggtatttccctccaatcttatggtactaataccccaaactcttgatgtcattttgggtatggattggttagcaaagcatagaggagtaattgactgtggacgtagagaagttaccctgaccacaccctggggatcggatatgcgagcaaccatggatcaagatcctaggctaaccgaacgtgccggaggtatatttaccatgctacccctaaagggaatgcccgtagtgcagcgatttcctgacgtgtttccagaagatttacctggaatgccaccagatcgtgacatagagtttattattgacctgatacccggaactgcccccatatccaagagaccatatcggatgccggtcaatgagttagaagaacttaaaaagcaaatcagggagttgcaagaaaagggatttgtacgcccagttcgtcaccttggggagctccagtgctattcgtcaagaagaaggatggtagcatgagaatgtgtgtggactaccgatcattgaatgaagtaactattaagaacaagtacccactaccaaggattgatgatcttttcgatcaactcaagggagctaaggtgttttcaaagatcgaccttcgatcaggataccaccaactgaagattagaaccgaagatatccccaagacagcgttttcaacacgctatggattgtatgagttcacagtgatgtcgtttggtctaaccaatgccccagcctacttcatgaatcttatgaacaaagtattcatggattatttagataagtttgtggtagtattcattgatgacattctagtctactccaaagacgaggaagaacatgcggaacacttacgattggtgctccagaaactccgaaagcacaagttatacgcaaaattcagcaagtgcgaattttggttgaaggaagtcgcttttctgggtcacgtaatctcagccggtggagtagcagtggaccctgcaaaagtagaggccgttacagaatggaaagcacccaagtcggtgaccgaaattcggagtttcctaggcttggccggatactaccgaaggttcattgaagggttctctaagatagcccgaccaatgacacaactacttaagaaggaaaagaagtttgtatggtcagaacagtgtcaggaaagctttgagcagctcaaagaaaaactgacctcggcacctattttagttcttcccgacatcaggaaagactttgttatatattgtgatgcgtcaaggcaaggactaggaggagtactgatgcaggagggaaaagttgtggcctatgcgtcgcgacaattgcgaccatatgaagaaaactaccctacccatgacctagaactcgcaactgtggttcatacgctaaagatttggagacattatctaattggaaaccattgcgatatctacactgaccacaagagtctaaagtatatcttcacccagtcagatctcaacttgaggcaaagacgatggttagaattaatcaaggactatgatttagaggttcactatcacccaggcaaagcaaacgttgtagccgacgctctgagtcgaaagagccattgcaatcatctgagaatggaagggatggtccctgagcttaggaaggaaatagctcagctgaacctacatatagtgcctcatggacagataaacaccctggacattcaacctcttttgagagcccaaatagaagaagcccagaaggacaacgaggaggtccgagaggtgaaggaacgcttagctgcaggacgtgcaaaagaattttcaaccgacggaaaagacgttctatggtataaaaagagaatttacatacccgaacagggtggactgaggggattaattttaaaggaagctcacgagtcggcatactcattacaccccggaagtaccaaaatgtaccaggatttgaaggtgggctactggtggcccaacatgaagagagacgtggccgaatacgtagcactttgcgacgtatgccaaaaggtgaaggctgaacaccagaggccggcaggtttgttgcaacctctcaggattcccgaatggaaatgggatgagataggcatggattttattgttggattgcccaaaaccgcaacaggatatgattccatttgggtaatcgtggatcgactcaccaagacggcaagattcatccccgtcaagacaaactatagcagtgcaaaactcgccgagttgtacatgaccaggatagtgtgtcttcatggtatacctaagaagattatatctgatcgaggcacacaatttacctcacatttctgggagaaagtccatgaagccctgggaagttacctcgcatttagcaccgcttatcatccacagacagatggccagacggagagaaccaaccaggtcctggaggacatgctgagggcttgtgctctggattttagcaaggactgggagaggtgtttgccctacgccgaattctcttacaacaacagctttcaagcaagcctaaagatgtcacccaatgaggcattgtttggtcgacgatgtcgtaccccgctaatgtggtccgagactggagaacgggcggtatttggacctgacattattcaagaagccgaagaaaagattcgcttggtccgtgatcgtctaaaagtagcacaatcacgacaaaagagttacgccgatactcgaagaagaaacctggaatttaaggaaggagattacatttatctaaaggtttctccgatgaggggaacaaaaaggtttaaggttaaaggaaaactggcaccaagatatgtggggccattccagatcatcgccaggcgaggagaagtcgcatatcagttacagctaccagaatatatcgccgatgtgcaccccgtcttccatgtgtcccaattaaagaaatgcttacgagtgtctgaagaacaagctccgctggaagagattcacattagcaatgatctcacatatccagaacacccgatccggatattggatgaagcagaaaggaggactaggagcaaagtgtggcgtatgtacaaggtacaatggagtaatcacaccgaggatgaagccacctgggaaggcgaagaattcttgaggacggagtacccgcatctattcggcaattgg

SEQ ID NO: 13975 - DNA, 4209 bp, Oryza sativa
  Clone ID: TFbOSC20335j.C1.o2.fg
atggcaagccgacgttgggcaacaaccagcaatgacgaaactcagacacccgacttaaccactctggccggagttatggccacccaaactcaacttctgcaagctatcgcgaacaaccaaggcaaccgcggagggtcaagctttggagagtttatgaggaccaagccacccacattcgccacagctgaagaacctatggatgctgaagattggttaaggatcattgagaagaagctaactcttgttcgagtacctgaggccgataaagtgatctttgcggcaaaccaattggaaggaccagccggagattggtgggacatgtacaaagaagcccgagaagaagatgctggagaaccaaactgggaggaatttaccatagccttccgtgacaacttcgtgcctgccgcggtgatgcggatgaagaagaatgagttcaggagactacggcaagggaataccacagtacaagagtacctgaaccgtttcactcagctggcacgctacgcgactagagatcttgccgacgaggaggaaaagatcgacaaattcattgaaggcttgaatgacgagttacgcgggcccatgattggacaagaccacgatagtttccagagtttaatcaataaggtcgttaggctggagaacgaccggaaggtcgtggagcacaatcgtaaaaggaggcttgccatgaaccgcccgcctcagaccgcaccccagcgtcctaaagggacaaccccctcggcatggagaccaacagtggtgacaaccagtcgacctgccgcctccagcaatttccactggccggttaccattcagaatcgctctcctgcgccaaatcaggccgccactggatcagtaaggccaggaagctgtttcaactgtggagagtatgggcattttgccaataaatgtcctcatccaaacaagacacccattcgcaccggagctaatgcaacggctattcacgggactgctacccctgttgctggacgaggtctattcaggactccgcagactaacaggaccgctaccggatttggacgcgggcaagtgaaccacgttcgagctgaagaggcccaggaagatcaaggcgtactgatgggtatgttttcactcaactccactccagttaaagttctcttcgattcaggagcatcgcattcatttatatctttgaaagcaagtcaacaacacaatttaaccagagttaaactaagacaaccaatgttagtacattcacctgggggtgagatagcagtggatacagcttgcattgacgtacccatccgccttagggatgtggtatttccctccaatcttatggtgctaataccccaaactcttgatgtcattctgggtatggattggttagcaaagcatagaggaataattgactatagacgtagagaagttaccctgaccacaccctggggatcggatatgagagcaaccatggatcaagatcctaggctaaccgaacgtgttggaggtatatttaccatgctacccctaaagggaatgcccgtagtgcagcgatttcctgatgtgttcccagaggatttacctggaatgccaccagatcgtgacatagagttcattattgacctgatacccggaactgccctcatatccaagagaccatatcggatgccggtcaatgagttagaagaacttaagaagcaaattagggagctgcaagaaaagggatttgtacgccccagttcgtcaccttggggagccccagtgctattcgtcaagaagaaagatggtagcataagaatgtgtgtggactaccgctcactgaacgaagtaactatcaaaaacaagtatccactaccacggattgatgatctttttgatcaactcaaaggagctaaggtgttctctaagattgaccttcggtcaggataccaccaattgaaaattagaaccagggacatacccaaaaccgcgttctcaacacgttatggattatatgagttcactgtaatgtcgtttggtttaaccaacgctccggcatactttatgaatcttatgaacaaagtgttcatggactacttggacaaatttgtggtggtattcatcgatgatattctaatctactccaaagatgaggaagaacatgcagagcacttgcaattggtactcgagaaacttcggaagcataagttatatgcaaaattcagcaagtgtgagttctggttaaaagaagtcgcttttctaggccacgtaatctcggccggtggagtagcagtggatcctgctaaagtggaggctgtcacggaatggaaagcacccaaatctgtgactgaaattcggagttttctaggcttggctggatactaccgacggttcattaaagggttctctaagatagcccgaccaatgacacaactactcaagaaggaaaagaagtttgtgtggcaaggactaggaggagtactgatgcaggacggaaaagttgtggcctatgcgtcgcgacaattgcgaccacatgaggaaaactaccctacccatgacctagaactcgcagctgtggttcatgcgctaaagatttggagacattatctaattggaaaccattgcgatatctacactgaccacaagagtctaaagtatatcttcacccagtcagatctcaacttgaggcaaagacgatggttagaattaatcaaggactatgatttagaggttcactatcacccaggcaaagcaaacgtcgtggccgacgctctgagtcgtaagagccattgcaatcatctgagaatggaagggatggtccctgagcttagggaagaaatagctcagctgaacttacatatagtaccccgtggacagataaacaccctggacattcaacctcttttgagaacccaaatagaagaagcccagaaggacaacgaggaaatccgagaggtgaaggaacgcttagctgcaggacgtgcaaaggaattttcaaccgacgaaaatgatgttctatggtataaaaagagaatttacgtacccgaacagggtggactgaggggattaattttaaaggaagctcacgaatcggcttattcattacaccccggaagtaccgaaatgtaccaggatttgaaggagggctactggtggcccaacatgaagagagatgtggccgaatacgtagcactctgcgacgtatgccagaaggtgaaggctgaacaccagaggccggcagtatgtcttcatggtgtacctaagaaaattatatctgatcggggcacactgtttacctcacatttctgggagaaagtccatgaagccgtaggaagttacctcgcatttagcaccgcttatcatccacagacagatggccagacggagagaaccaaccaggtcctggaggacatgctgagggcttgtgctatggattttagcaaggactgggagagatgtttgccctacaccgaattctcctacaacaacagctttcaagcaagcctaaagatgtcacccaatgaggcattgtttggtcgaagatgtcgtaccccgctaatgtggtccgagactagagaacgggcggtatttggacctggcattattcaagaagccgaagaaaaggttcgcttgatccgtgaccgtctaaaagtggcacaatcacgacagaagatttacgccgacacccgaagaagaatcctggagtttaaggaagcagattacgtttatctaaaggtttctccgatgaggggaacaaaaaggtttaaggtcaaaggaaaactggcaccaaaatatgtgggaccattccagatcatcgccaggcgaggagaagttgcatatcagttacagttaccagagaatatcgcggatgtgcacccagtcttccatgtgtctcagctaaagaaatgtttacgaatgccggaagagcaagctccgctggaagagattcacattagcaatgatctcacatatccagaacacccgatccggatattggatgaagccgaaaagaggactaggagcaaagtgtggcgtatgtacaaggtacaatggagcaatcatactgaggatgaagccacctgggaaagtgaagaatttttgaggacggaatacccgcatctattcgaaaactggtatgaaatctcgggacgagcattatttaaggggaagcgggagatgaagcctcggaggatccctatgcctactaccaggagggagatgaagacgatggcgttcagtaggtcttag

SEQ ID NO: 13976 - DNA, 3666 bp, Oryza sativa
  Clone ID: TFbOSC20639j.C1.o2.fg
atggcaagccgacgtcgggcaacaaccagcaatgacgaaactcagacacccgacttaaccactcttgctggagttatggccacccaaactcaacttctgcaagctatcgcgaacaaccaaggcaaccgcggaaggtcaagctttggagagtttatgaggaccaagccacccacattcgccacagctgaagaacctatggatgctgaagattggttaaggatcattgagaagaagctaactcttgttcgagtacgtgaggccgataaagtgatctttgcggcaaaccaattggaaggaccagccggagattggtgggacacgtacaaagaagcccgagaagaagatgctgtagaaccaaactgggaggaatttaccacagccttccgtgacaacttcgtgcctgccgcagtgatgcggatgaagaacaatgagttcaggagactacagcaagggaataccacagtacaagagtacctgaaccgtttcactcagctggcgcgctacgcgactagagatcttgccgacgaggaggaaaagatcgacaaattcattgaaggcttgaatgacgagttacgcgggcccatgattggacaagaccacgatagtttccagagtttaatcaataaggtcgttaggttggagaacgaccggaaggtcgtggagcacaatcgtaaaaggaggcttgccatgaaccgctcgcctcagaccgcaccccagcgtcctaaagggacaacctcctcggcatggagaccaacagtggtgacaaccagtcgacctgccgcctccagcaatttccacaggccggttaccattcagaaccgcgctcctgcaccgaatcaggccgccactggatcagtaaggcctggaagctgtttcaactgtggagagtatgggcatttcgccaataaatgtcctcatccaaacaagacacccatttgcaccggagctaatgcaacggctattcacgggactgctacccctgccgttggacgaggtctattcaggactccgcagactaacaggaccgctaccggatttggacgcgggcaagtgaaccacgttcgagctgaagaggcccaggaagaccaaggcgtactgatggaagatttacctggaatgccaccagatcgtgacatagagttcattattgacctgatacccggaactgcccccatatccaagagaccatatcggatgccggtcaatgagttagaagaacttaaaaagcaaattagggagttgcaagaaaagggatttgtacgccccagttcgtcaccttggggagccccagtgctattcgtcaagaagaaagatggtagcatgagaatgtgtgtggactaccgctcactgaacgaagtaactatcaaaaacaagtatccactaccacggattgatgatctcttcgatcaacttaagggagctaaggtgttttcaaagattgaccttcggtcaggataccaccaattgaaaattagaaccggggacatacccaaaaccgcgttctcaacacgctatgggttatatgagttcaccgtaatgtcgtttggtttaaccaacgctccggcatactttatgaatcttatgaacaaagtgttcatggactacttggacaaatttgtggtggtattcatcgatgatattttaatctactccaaagatgaggaagaacatgcggaacacttgcgattggtactcgagaaacttcggaagcataagttatatgcaaaattcagcaagtgtgagttctggttaaaagaagtcgcttttctaggccacgtaatctcggccggtggagtagcagtggatcctgctaaagtggaggctgtcacggaatggaaagcacccaaatctgtgactgaaattcggagttttctaggcttggctagatactaccgaaggttcattgaagggttctctaagatagcccgaccaatgacacaactactcaagaaggaaaagaagtttgtgtggtcagagcagtgtcaggaaagctttgagcagctcaaagaaaagctgacctcggcgcctattttagttcttcccgacatcaggaaagactttgttatatattgtgatgcttcaaggcaaggactaggaggagtactgatgcaggacggaaaagttgtggcctatgcgtcgcgacaattgcgaccacatgaggaaaactaccctacccatgacctagaactcgcagctgtggttcatgcgctaaagatttggagacattatctgattggaaaccattgcgatatctacactgaccacaagagtctgaagtatatcttcacccagtcagatctcaacttgaggcaaaggcgatggttagaattaatcaaggactatgatctagaggttcactatcacccaggcaaagcaaacgttgtggccgacgctctgagtcgtaagagccattgcaattatctgagaatggaagggatggtccctgagcttagggaggaaatagctcagctgaacctacctcgtgggcagataaacaccctggacattcaatctcttttgagaacccaaatagaagaagcccagaaggacaacgaggaaatccgagaggtgaaggaacgcttagctgcaggacgtgcaaaggaattttcaaccgacgaaaaagatgtcctatggtataaaaagaggatttacgtacccgaacagggtggactgaggggattaattttaaaggaagctcacgaatcggcatattcattgcaccccggaagtacgaagatgtaccaagatctgaaggaaggatactggtggcccaacatgaagagagatgtggcggaatacgtagcactctgtgatgtgtgccaaaaggtgaaggctgagcatcagcgaccggcaggcttgctgcaaccccttaggattcccgaatggaaatgggatgagacagatggccagacggagagaaccaaccaggtcctagaagacatgctgagggcttgtgctctggattttagcaaggactgggagagatgtttgccctacgccgaattctcctacaacaacagctttcaagcaagcctaaaaatgtcacccaatgaggcattgtttggtcgacgatgtcgtaccccgctaatgtggtccgagactggagaacaggcggtatttgggcctgacattattcaagaagccgaagaaaaggttcgcttgatccgtgaccgtctaaaagtagcacaatcacgccaaaagagttatgccgacacccgaagaagaaacctggaatttaaggagggagattacgtttatctaaaggtttccccgatgaggggaacaaaaaggtttaaggtcaaaggaaaactggcaccaagatatgtggggccattccagatcatcgccaggcgaggagaagttgcatatcagttacagttaccagagaatatcgcggatgtgcacccagtcttccatgtgtctcagctgaagaaatgtttacgagtgccggaagagcaagccccgctggaagagattcacattagcaatgatctcacatatccagaacacccgatccggatattggatgaagccgaaaagaggactaggagcaaagtgtggcgtatgtacaaggtacaatggagcaatcacactgaggatgaagccacatgggaaagcgaagaattcttgaggacggagtacccacatctattcgaaaactggtaa

SEQ ID NO: 13977 - DNA, 3894 bp, Oryza sativa
  Clone ID: TFbOSC400179j.C1.o9.fg
atggcaagccgacgtcgggcaacaaccagcaatgacgaaactcagacacccgacttagccactctggccggagttatggccacccaaactcaacttctgcaagctatcgcgaacaaccaaggcaaccgcggagggccaagctttggagagtttatgaggaccaagccacccacattcgccacagctgaagaacctatggatgctgaagattggttaaggatcattgagaagaagctaactcttattcgagtacgtgaggccgataaagtgatctttgcggcaaaccaattggaaggaccagccggagactggtgggacacgtacaaagaatcccgagaagaagatgctggagaaccaaactgggaggaatttaccacagccttccgtgacaacttcgtgcctgccgcagtgatgcggatgaagaagaatgagttcaggagactacggcaagggaataccacagtacaagagtacctgaaccatttcactcagctggcgcgctacgcgactagagatcttgccaacgaggaggaaaagatcgacaaattcattgaaggcttgaatgacgagttacgcgggcccatgattggacaagaccacgatagtttccagagtttaatcaataaggtcgttaggttggagaacgaccggaaggtcgtggagcacaatcgtaaaaggaggcttgccatgaaccgcccgcctcagaccgcaccccagcgtcctaaagggacaacctcctcggcatggagaccaacagtggtgacaaccagtcgacctgccgcctccagtaatttccacaggccggttaccattcagaaccgcgctcctgcaccgaatcaggccgccactggatcagtaaggccaggaagttgtttcaactgtggagagtatgggcatttcgccaataaatgtcctcatccgaacaagacacccattcgcaccggagctaatgcaacggctattcacgggactgctacccctgctgctggacgaggtctattcaggactccgcagactaacaggaccgctaccgaatttggacgcgggcaagtgaaccacgttcgagctgaagaggcccaggaagaccaaggcgtactgatgggagcatcgcattcatttatatctttgaaagcaagtcaacaacacaatttaatcagagttaaactaagacaaccaatgttagtacattcacctgggggtgagatagcagtggatacagcttgcattgacgtacccatccgccttcgggatgtggtatttccctccaatcttatggtgctaataccccaaactcttgatgtcattctgggtatggattggttagcaaagcatagagggataattgactgtagacgtagagaagttaccctgaccacaccctggggatcggatatgagagcaaccatggatcaagatcctaggctaaccgaacgtgccggaggtatatttaccatgctacccctaaagggaatgcccgtagtgcagcgatttcctgatgtgttcccagaagatttacctggaatgccaccagatcgagacacagagttcattattgacctgatacccggaactgcccccatatccaagagaccatatcggatgccggtcaatgagttggatgaacttaaaaagcaaattagggagttgcaagaaaagggatttgtacgccccagttcgtcaccttggggagccccagtgctattcgtcaagaagaaagatggtagcatgagaatgtgtgtggactaccgctcactgaacgaagtaactatcaaaaacaagtatccactaccacggattgatgatctttttgatcaactcaaaggagctaaggtgttctctaagattgaccatcggtcaggataccaccaattgaaaattagaaccggggacatacccaaaactgcgttctcaacacgctatggattatatgagttcaccgtaatgtcgtttggtttaaccaacgctccggcatactttatgaatcttatgaacaaagtgttcatggactacttggacaaatttgtggtggtattcatcgatgatattctaatctactccaaagatgaggaagaacatgcggaacacttgcgattggtactcgagaaacttcggaagcataagttatatgcaaaattcagcaagtgtgagttctggttaaaagaagtcgcttttctaggccacgtaatctcggccggtggagtagcagtggatcctgctaaagtggaggctgtcacagaatggaaagcacccaaatctgtgactgaaattcggagttttctaggcttggctggatactaccgacggttcattgaagggttctctaagatagcccgaccaatgacacaactactcaagaaggaaaagaagtttgtgtggtcagaacagtgtcaggaaagctttgagcagctcaaagaaaagctgacctcggcgcctattttagttcttcccgacatcaggaaagacttcgttatatattgtgatgcgtcaaggcaaggactaggaggagtactgatgcaggacggaaaagttgtggcctatgcgtcgcgacaattgcaaccacatgaggaaaactaccctacccgtgacctagaactcgcagctgtggttcatgcgctaaagatttggagacattatctgattggaaaccattgcgatatctacactgaccacaagagtctaaagtatatcttcacccagtcagatctcaacttgaggcaaaggcgatggttagaattaatcaaggactatgatctagaagttcactatcacccaggcaaagcaaacgttgtggccgacgctctgagtcgtaagagccattgcaatcatctgagaatggaagggatgatccctgagcttagggaggagatagctcagctgaacctacatatagtacctcgtggacagataaacaccctggacattcaacctcttttgagaacccaaatagaagaagcccagaaggacaacgaggaagtccgagaggtgaaggaacgcttagctacaggacgtgcaaaggaattttcaaccgacgaaaaagatgttctatggtataaaaagagaatttacgtacccgaacagggtggactgaggggattaattttaaaggaagctcacgaatcggcatattcattgcaccccggaagtaccaagatgtaccaagatctgaaggaaggatactggtggcccaacatgaagagagatgtggcggaatacatagcactctgtgacgtgtgccaaaaggtgaaggctgagcatcagcgaccggtaggcttgctgcaaccccttaggattcccgaatggaaatgggatgagataggtatggattttattgttggattgcccaaaaccgcaacaggatatgattccatttgggtgatcgtggatcgactcaccaagacggcgagattcattcccgttaagacaaattatagcagtgctaagctagccgagttatacatgaccaggatagtatgtcttcatggtgtacctaagaaaattacatctgatcggggcacacagtttacctcacatttctgggagaaagtccatgaagccctaggaagttacctcgcatttagcacagcttatcatccacagacagatggccagacagagagaaccaaccaggtcctggaggaaatgctgagggcttgtgctctggattttagcaaggactgggagagatgtttgccctacgccgaattctcctacaacaacagctttcaagcaagcctaaagatgtcacccaatgaggcattgtttggtcgacgatgtcgtaccctgctaatgtggtccgagactggagaacaggcggtatttggacctgacattattcaagaagccgaagaaaaggttcgcttgatccgtgaccgtctaaaagtagcacaatcatga

SEQ ID NO: 13978 - DNA, 3093 bp, Oryza sativa
  Clone ID: TFbOSC400477j.C1.o39.fg
atggagaccaacagtggtgacaacgcctccagcaatttccacaggccggttaccattcagaaccgagctcctgcaccaaatcaggccgccactggaccagtaaggccaggaagctgtttcaactgtggggagtatgggcatttcgccaacaaatgcccccatccaaacaagacacctattcgcaccggagctaatgcaacgactattcacggaactgctacccctgctgctggacgaggagcatcgcattcatttatatctctgaaagcaagtcaacaacacaaattaaccagagttaaactaaggcaaccaatgttagtacattcacctgggggtgaaatagccgtggacacagcttgcattgatgtacctattcgccttagggatgtggtgtttccctccaaccttatggttttgataccacagacccttgatgtcatattgggtatggattggttagcaaagcatagaggagtaattgactgtagacgtagagaagttaccctgaccacaccctggggatcggatatgagagcaaccatggatcaagatcctaggctaaccgaacgtgccggaggtatatttaccatgctacccctaaagggaatgcccgtagtgcagctatttcctgatgtgttcccagaagatttacctggaatgccaccagatcgtgacatagagttcattattgacctgatacccggaactgcccctatatccaagagaccatatcggatgctggtcaatgagttagaagaacataaaaagcaaattagggagttgcaagaaaagggatttgtacgccccagttcgtcaccttggggagccccagtgctattcgtcaagaagaaggatggtagcatgagaatgtgtgtggactaccgctcactgaacgaagtaactatcaaaaacaagtatccactaccacggattgatgatctttttgatcaactcaaaggagctaaggtgttctctaagattgaccttcgattaggataccaccaattgaaaattaggaccggggatatacccaaaaccgcgttctcaacacgctatggattatatgagttcaccgtaatgtcgtttggtttaaccaacgccccggcatactttatgaatcttatgaacaaagtgttcatggactacttggaaaaatttgtggtggtattcatcgatgatattctaatctactccaaagatgaggaagaacatgcggaacacttgcgattggtactcgagaaacttcggaagcataagttatatgcaaaattcagcaagtgtgagttctggttaaaagaagtcgcttttctgggtcacgtaatctcagccggtggagtagcagtggaccctacaaaagtggaggccgttacggaatggaaagcacccaagtcggtgaccgaaattcagagttttctaggcttggctggatactaccgaaggtttatcgaggggttctctaagatagcccgacccatgacacaactactcaagaaggaaaagaagtttgtgtggtcagaacagtgtcaggaaagctttgagcagctcaaagaaaagctgacctcggcgcctattttagttcttcccaacatcaggaaagactttgttatatattgtgatgcatcaaggcaaggactaggaggagtactgatgcaggacggaaaggttgtggcctatgcgtcacgacaattgcgaccacatgaggaaaattaccctacctatgacctagaactcgcagctgtggttcatgcgctaaagatttggagacattatctgatcggaaaccattgcgatatctacactgaccacaagagtctgaagtatatcttcacccaatcagatctcaacttgaggcaaaagcgatggttagaattaatcaaggactatgatctagaggtaaacaccctggacattcaacctcttttgagaacccagatagaggaagcccagaaggacaacggagagatccaggaggtgaaggaacgcatggccactggtcatgtgaaagaattctcaatggatgagaagaaaacactgtggtataaaaagagaatctacgtacctgaacagggtggactgaggggattaattttaaaggaagctcatgaatcggcatattcattgcaccccggaagtacgaagatgtaccaagatctgaaagaaggatactggtggcccaacatgaagagagatgtgaaggaatacgtagcactctgtgacgtgtgccaaaaggtgatcgtggatcgactcaccaagatggcgaggttcatccctgttaagacaaattacagcagtgccaagctagccgagttatacatgaccaggataacagatggccagacggagagaaccaaccaggtcctggaggacatgctgagagcttgtgcgttggactttagcaaagacggggagagatgtttgccctacgccgaattctcctacaacaacagctttcaagcaagcctaaagatgtcacccaatgaggcattgtttggtcgacgatgtcgtaccccgctaatgtggtccgagactggagaacgggcggtatttggagctgacattattcaagaagccgaagaaaaggtttgcttgatccgtgaccgtttaaaagtagcacaatcacgacaaaagagttacaccgacacccgacgaagaaacctggaatttaaggaaggagattacgtttatctaaaggtttctccgataaggggaataaaaaggtttaaggtcaaaggaaaactggcaccaagatatgtgggaccattccagatcatcgccagacaaggagaagttgcataccagttacagctaccagaaaatatcgccgatgtgcacccagtctttcatgtgtctcagttaaagaagtgcttgcgagtgccggaagaacaagctacgttggaagaaattcatattagcaatgatctcacgtatccagaacacccagtccggatattggatgaagctgaaaagaggactagaaccaaagtgtggcatatgtacaaggtacaatggagtaatcacactgaggatgaagccacttgggaaagcgaagaatttttgaggacggaatacccgcatctgttcgagaactggtaa

SEQ ID NO: 13979 - DNA, 4483 bp, Oryza sativa
  Clone ID: TFbOSC400603j.C1.o12.np
atgggcgtaccccgctcagagggatacgtcattgagctacaccggctgatgaggcgtctgcgataccccagatttccgatctaccgagtgagacaatgtggatctgtttgggaggctcgggtcgaggttcacacgctagttccttcggagttagactacagcttcccgacacgccaccgtcgcgacttgccggagaccgcgatgcaggatgcagcacgggaggccttcctccgacttagctctatccaccgagctgagttggcgagtactgagtttgctcaccacccgtttcgagaggagagcaactccgtctgcacagttcaggacacaccttgctgctacaacccgatagtgacccgactgtcacgatgggctgaggtagtagacgacttttacgaggaggctctgttagagatcgacgaccagcagaggcgtgtgggagagttagagaccgaggtgactgacctcacagcgcagcagcttcagttggaggaggagcaccaggcttggggcagtgagatagactcactgaaggcacagctccagccgggttccagtttggagactccgatccaggtcgactccgagacagaggggaccgacaccgagccagagaccgagccagacatcactgacccttcagaggatgagactcttgttcctcgcatcaccttcctcggaggacctcgcaccctcagcactgcccgcaagagcacacgacctccgggcaagaagcccaagccagatccagaggccactacttccgagccgtggggactcagggtcattgagaagaagctaactcttgttcgagtacgggaggccgataaagtgatctttgaggcaaaccaattggaaggaccagccggagactggtgggacacatacaaagaagcccgagaagaagatgctggagaaccaaactgggaggaatttaccacagccttccgtgacaacttcgtgcctgccgcggtgatgcggatgaagaagaatgagttcaggagactacggcaagggaataccacagtacaagagtacctgaaccgtttcactcagctggcgcgctacgcgactggagatcttgccgacgaggaggaaaagatcgacaaattcattgaaggcttgaatgacgagttgcgcgggcccatgattggacaagaccacgatagtttccagagtttaatcaataaggtcgttaggctggaaaacgaccggaaggtcgtggagcacaatcgcaaaaggaggcttgccatgaaccgcccgcctcagcccgtaccctagcgtcataaagggacaacctcctcagtatggagaccaacagtggtgacaaccaatcgtcctaccgcatccagcaatttccacaggctgattaccatccagaaccgagctcctgcaccgaatcaagccgccactggatcagtaagactaggaagttgtttcaactgtggagagtatgggcattttgctaataaatgtcctcatccaaacaagacacccatttgcaccggagctaatgcaacggctattcacgggactgctacccctgctgctggacgaggtctattcgggactccgcagactaacaggaccactaccggatttggacgcgggcaagtgaaccatgttcgagctgaagaggcccaggaagaccaaggcgtactgatgggtatgttttctatcaactccactccagttaaagttctcttcgattcaggagcatcgcattcatttatatctttgaaagtaagtcaacaacacaatttgaccagagttaaattaagacaaccaatgttagtacattcacctgggggtgagatagcagtggatacagcttgcattgatgtacccatccgccttagggatgtggtatttccctccaatcttatggtgctgatgccccaaactcttgatgtcatattgggtatggattggttaacaaagcataggggagtaatcgactgtagacgtagagaagttaccctgaccacaccctggggatcggatatgagagcaaccatggatcaagatcctagactaaccgaacgtgccggaggcatatttaccatgctaccccaaaaaggaattcccgtagtgcagcgatttcctgatgtgttcccagaagatttacctggaatgccaccagatcgtgacatagagttccttattgacctgatacccggaactgcccccatatccaagagaccatatcggatgccggtcaatgagttggaggaacttaaaaagcaaattagagagttgcaagaaaagggatttgtacgccccagttcgtcaccttggggagccccagtgctattcgtcaagaagaaagatggtagcatgaggatgtgtgtagactaccgttcactgaacgaagtaactatcaaaaacaagtatccactaccacggattgatgatctttttgatcaactcaaaggagccaaggtgttctctaagattgaccttcgatcaggataccatcaattgaagattaggaccggggatatacctaagaccgcgttctcaacgcgttatggattgtatgaattcacagtgttgtcgtttggattaaccaacgccccgggcatattttatgaatcttatgaataaagtgttcatggattacctggacaaatttgtggtagtattcatcgatgatattttaatctactccagagatgaggaagaacatgcggaacacttgcgattggtactcgagaaacttcggaagcataaattatatgcaaagtttagtaaatgtgagttctggttaaaagaagtcgcttttctaggccacgtaatctcagccggtggagtagcagtggatcctgctaaagtggaggccgttacggaatggaaagcacccaaatctgtgactgaaattcggagttttctaggcttggccggatactaccgaaggtttactgaaggattatctaagatagcccgaccaatgagacaactactcaagaaggaaaagaagtttgtatggtcagaacagtgtcaggaaagctttgagcagctcaaagaaaagctgacctcggcacctattctagttcttcccgacatcaggaaagactttgttatatattgtgatgcgtcaaggcaaggactaggaggagtactgatgcaggacggaaaggttgttgcctatgcgtcgcgaaaactgcgaccacacgaggaaaattaccctacccatgacctagaactcgcagctgtggttcatgcgctaaagatttggagacattatctaattggaaaccattgcgatatctacactgaccacaagagtctgaagtatattttcacccagtcagatctcaacttgaggcaaaggcgatggttggaattaatcaaggattatgacttggaggttcactatcacctcggcaaggcaaacgtggtggccgacgctttgagtcggaagagccattgcaatcatctgaggacggaaggaatggctcctgagcttaaggaggaaatagcccaactaaacctacatatagaagctcacgaatcagcatattcattgcaccccggaagtacgaagatgtaccaagatctgaaggacggttactggtggcccaacatgaagagagatgtggcagaatacgtagcactctgtgacgtgtgccagaaggtgaaggctgagtaccagagaccggcagaccgactcaccaagacagcgagattcattcccgttaagacaaattatagcagtgccaagctagtcgagttatacatgaccaggatagtgtgtcttcatggtatacctaagaggattatatctgatcgaggcacacagtttacctcgcatttctgggagaaagtacatgaagccctaggaagttaccttgcgtttagcacagcttatcacccacaaacagatggccagacagagagaacaaaccaggtcttggaggacatgctgagagcttgtgcattggattttagcaaagactgggagagatgtttgccctacaccgaattctcctacaacaacagtttccaagcaaacctaaagatgtcgccaaatgaggcattatttggtcgacgatgtcgcaccccgctaatgtggtccgagactggagaacgggcggtatttggacctgacattatccaagaagccgaagaaaaggttcgcttgatccgtgaccgtttaaaggtggcacaatcacgacaaaagagttacaccgacacccgaagaagaaacctagaatttaaggaaggagattacgtctatctaaaggtttctccgatgagagctccaccgttctcccctctcctcactccatctccccctcctctgcctcttccccttctccacgcgccgccgtcgtcgtgccgccgcgtcgctgcctttgagccgccgcgccgccgccctcgtgctgtcgtgccgccgcattcgtgccaccgcgccaccgcctcagtgtgccgcgccgtgcgccgtcgtcgccgccgccgccgtcggtgagctgctgccccc

SEQ ID NO: 13980 - DNA, 4413 bp, Oryza sativa
  Clone ID: TFbOSC400800j.C1.o10.fg
atggcaagccgacgtcgggcaacaaccagcaatgacgaaactcagacacccgacttaaacactctggccggaattatggccacccaaactcaacttctgcaagctatcgcgagcaaccaaggcaaccgcggagggtcaagctttggagagtttatgaggaccaagccacccacattcgccacagctgaagaacctatggatgctgaagattggttaaggatcattgagaagaagctaactcttgttcgagtacgtgaggccgataaggtgatctttgcggcaaaccaattggaaggaccagccggagattggtgggacacgtacaaagaagcccgagaagaagatgctggagaaccaaactgggaggaatttaccacagccttccgtgacaactttgtgcctgccgcggtgatgcggatgaagaagaacgagttcaggaaactacggcaagggaataccacagtacaagagtacctgaaccgtttcactcagctggcgcgctacgcaactagagatcttgccgacgaagaggaaaagatcgacaaattcattgaaggcttgaatgacgagttacgcgggcccatgattggacaagaccacgatagtttccagagcttaatcaataaggtcgtcaggctggagaacgaccggaaggtagtggagcacaatcgtaaaaggaggcttgccatgaaccgcccgcctcagaccgccccccagcgtcctaaagggacaaccccctcagcatggagaccaacagtggtgacaaccagtcgacctgccgcctccagcaatttccacaggccggttaccattcagaaccgcgctcctacaccgaatcaggccgccactggatcagtaaggccagggagctgcttcaactgtggagagtatgggcatttcgctaataaatgtcctcatccaaacaagacacccattcgtaccggagctaatgcaacggctattcacggtactgctacccctgctgctggacgaggtctattcaggactccgcagactaacaggaccgctaccggatttggacgcgggcaagtgaaccatgttcgagctgaagaggcccaggaagaccaaggcgtactgatgggtatgttttcactcaactccactccagttaaagttctcttcgattcaggagcatcgcattcatttatatctttgaaagcaagtcaacaacacaatttaaccagagttaaattaagacaaccaatgttagtacattcacctgggggtgagatagcagtggatacagcttgcattgacgtacccatccgccttagggatgtggtatttccctccaatcttatggtgctaataccccaaactcttgatgtcattttgggtatggattggttagcaaagcatagaggagtaattgactgtagacgtagagaagttaccctgaccacaccctggggatcggatatgagagcaaccatggatcaagatcctaggctaaccgaacgtgccggaggtatatttaccatgctacccctaaagggaatgccaatagtgcagcgatttcctgatgtgttcccagaagatttacctggaatgccaccagatcgtgacatagagttcattattgacctgatacccggaactgcccccatatccaagagaccatatcggatgccggtcaatgagttagaagaacttaaaaagcaaatcagggagttgcaagagaagggatttgtacgccccagttcgtcaccttggggagcccaagtgttgtttgttaaaaagaaagacggtagcatgagaatgtgtgtagactaccgatcactgaacgaagtaactatcaaaaataagtatccactaccacggattgataacctcttcgaccaacttaagggagctaaggtgttttcaaagatagaccttcgatcaggataccaccaactgaagattaggaccgaggatatccccaaaaccgcgttttcaacacgctatgggttgtatgaattcacagtaatgtcgtttggtctaaccaatgccccagcatacttcatgaatcttatgaacaaagtattcatggaatacttggataagtttgtggtggtattcattgatgacattctgatctactccaaagatgaggaagaacatgcggaacacttacgattggttctccagaaacttcggaagcataagttatatgcaaaattcagcaagtgcgagttctggttaaaagaagtcgcttttctaggccacgtaatctcggccggtggagtagcagtggatcctgctaaagtggaggctgtcacggaatggaaagcacccaaatctgtgactgagattcggagttttctaggcttggctagatactaccgaaggttcattgaagggttctctaagatagcccgaccgatgacacaactactcaagaaggaaaagaagtttgtatggtcagaacaatgtcaggaaagctttgaacagcttaaagaaaagctgacctcggcacctattttagttcttcccgacatcaggaaagactttgttatatattgtgatgcgtcgaggcaaggactaggaggagtactgatgcaggacggaaaagtggtggcctatgcgtcgcgacaattgcgaccacatgaggaaaactaccctacccatgacctagaactcgcagctgtggttcatgcgctaaagatttggagacattatctgattggaaaccattgcgatatctacactgaccacaagagtctaaagtatatcttcacccagtcagatctcaacttgaggcaaaggcgatggttagagttaatcaaggactatgatttagaggttcattatcacccaggcaaagcaaacgttgtggccgacgctctgagtcgtaagatccattgcaatcatctgagaatggaagggatggtccctgagcttagggaggaaatagctcagctgaacctacatatagtaccccgtggacagataaacaccctggacattcaacctcttttgagaacccaaatagaagaagcccagaaggacaacgaggaagtccgagaggtgaaggaacgcttagctgcaggacgtgcaaaggaattttcaaccgacgaaaaagatgttctatggtataaaaagagaatttacgtacccgaacagggtggactgaggggattaattttaaaggaagctcacgaatcggcatattcattgcaccccggaagtacgaagatgtaccaagatctgaaggaaggatactggtggcccaacatgaagagagatgtggccgaatacgtagcactctgtgacgtatgccagaaggtgaaggctgaacaccagaggccggcaggtttgttgcaacctctcaggattcccgaatggaaatgggatgagataggtatggactttattgttggattgcccaaaaccgcaacaggatatgattccatttgggtgatcgtggatcgactcaccaagacggcgagattcattcccgttaagacaaattatagcagtgctaagctagccgagttatacatgaccaggatagtatgtcttcatggtgtaccaaagaaaattatatctgatcggggcacacaatttacctcacatttctgggagaaagtccatgaagccctaggaagttatctcgcatttagcacagcttatcatccacagacagatggccagacggagagaaccaaccaggtcctggaagacatgctgagggcttgtgctctggattttagcaaggattgggagagatgtttgccctacgccgaattctcctacaacaacagctttcaagcaagcctaaagatgtcacccaacgaggcgttgtttggtcgacgatgtcgtaccccgctaatgtggtccgagacgggagaacgggcggtatttggacctgacattattcaagaggccgaagaaaaggttcgcttgatccgcgaccgtctaaaaatagcacaatcacgacaaaagagttacgccgacacccgaagaagaaacctggaatttaaggagggagattacatttatctaaaggtttctccgatgaggggaacaaaaaggtttaaggtcaaaggaaaactggcaccaagatatgtgggaccattccagatcatcgccaggcgaggagaagttgcatatcagttacagttaccagagaatatcgcggatgtgcacccagtcttccatgtgtctcagctaaagaaatgtttacgagtgccggaagagcaagctccgctggaagaggttcacattagcaatgatctcacatatccagaacacccgatccggatattggatgaagccgcaaagaggactaggagcaaagtgtggcgtatgtacaaggtacaatggagcaatcacactgaggaggaagccacctgggaaagtgaagaatttttgaggacggaatacccgcacctattcgaagactggtaa

SEQ ID NO: 13981 - DNA, 4266 bp, Oryza sativa
  Clone ID: TFbOSC401478j.C1.o74.fg
atggcaagccgacgtcgggcaacaaccagcaatgacgaaactcagacacccgacttaaacactctggccggaattatggccacccaaactcaacttctgcaagctatcgcgaacaaccaaggcaaccgcggagggtcaagctttggagagtttatgaggaccaagccacccacattcgccacagctgaagaacctatggatgctgaagattggttaaggatcattgagaagaagctaactcttgttcgagtacgtgaggccgataaagtgatctttgcggcaaaccaattggaaggaccagccggagattggtgggacacgtacaaagaagcccgagaagaagatgctggagaaccaaactgggaggaatttaccacagccttccgtgacaactttgtgcctgccgcggtgatgcggatgaagaagaatgagttcaggagactacggcaagggaataccacagtacaagagtacctgaaccgtttcactcagctggcgcgctacgcaactagagatcttgccgacgaggaggaaaagatcgacaaattcattgaaggcttgaatgatgagttacgcgggcccatgattggacaagaccacgatagtttccagagtttaatcaataaggtcgttaggttggagaacgaccggaaggtcgtggagcacaatcgtaaaaggaggcttgccatgaaccgcacgcctcagaccgcaccccagcgtcctaaagggacaacctcctcggcatggagaccaacagtggtgacaaccagtcgacctgccgcctctagcaatttccacaggccggttaccattcagaaccgcgctcctgcaccaaatcaggccgccactggatcagtaaggccaggaagctgtttcaactgtggagagtatgggcatttcgccaataaatgtccacatccaaacaagacacccattcgcaccggaactaatgcaacggctattcacgggactgctacccctgctgctggacgaggtctattcaggaccccgcagactaacaggaccgctacaggatttggacgcgggcaagtgaaccacgttcgagccgaagaggcccaggaagaccaaggcgtactgatgggtatgttttcactcaactccactccagttaaagttctcttcgattcaggagcatcgcattcatttatatctttgaaagcaagtcaacaacacaatttaaccagagttaaactaagacaaccaatgttagtacactcacctgggggtgagatagcagtggatacagcttgcattaacgtacccatccgccttagggatgtggtatttccctccaatcttatggtgctaataccccaaactcttgatgtcattttgggtatggattggttagcaaagcatagaggagtaattgactgtagacgtagagaagttaccctgaccacaccctggggatcggatatgagagcaaccatggatcaagatcctaggctaaccgaacgtgccggaggtatatttaccatgctacccctaaagggaatgccagtagtgcaacgatttcctgatgtgttcccagaagatttacctggaatgccaccagatcgtgacatagagttcattattgacctgatacccggaactgcccccatatccaagagaccatatcggatgccggtcaatgagttagaagaacttaaaaagcaaatcagggagttgcaagagaagggatttgtacgccccagttcgtcaccttggggagccccagtgttgtttgttaaaaagaaagacggtagcatgagaatgtgtgtagactaccgatcactgaacgaagtaactatcaaaaataagtatccactaccacggattgatgacctcttcgaccaacttgagggagctaaggtgttttcaaagatagaccttcgatcaggataccaccaactgaagattaggaccgaggatatccccaaaaccgcgttttcaacacgctatgggttgtatgaattcacagtaatgtcgtttggtctaaccaatgccccagcatacttcatgaatcttatgaacaaagtattcatggattacttggataagtttgtggtggtattcattgatgacattctgatctactccaaagatgaggaagaacatgcggaacacttacgattggttctccagaaacttcggaagcataagttatatgcaaaattcagcaagtgcgagttctggttaaaagaagtcgcttttctaggccacgtaatctcggccggtggagtagcagtggatcctgctaaagtggaggctgtcacggaatggaaagcacccaaatctgtgactgaaatttggagttttctaggcttggctggatactaccgacggttcattgaagggttctctaagatagcccgaccaatgacacaactactcaagaaggaaaagaagtttgtgtggtcagaacagtgtcaggaaagctttgagcagctcaaggaaaagctgacctcagcgcctattttagttcttcccgacatcaggaaagactttgttatatattgtgatgcgtcaaggcaaggactaggaggagtactgatgcaggacggaaaagtggtggcctatgcgtcgcgacaattgcgaccacatgaggaaaactaccctacccatgacctagaactcgcagctgtggttcatgcgctaaagatttggagacattatctgattggaaaccattgcgatatctacactgaccacaagagtctaaagtatatcttcacccagtcagatctcaacttgaggcaaaggcgatggttagaattaatcaaggactatgatttagagataaacaccctggacattcaacctcttttgagaacccaaatagaagaagcccagaaggacaacgaggaagtccgagaggtgaaggaacgcttagctgcaggacgtgcaaaggaattttcaaccaacgaaaaagatgttctatggtataaaaagagaatttacgtacccgaacagggtggactgaggggattaattttaaaggaagctcacgaatcggcatattcattgcaccccggaagtacgaagatgtaccaagatctgaaggaaggatactggtggcccaacatgaagagagatgtggccgaatacgtagcactctgcgacgtatgccagaaggtgaaggctgaacaccagaggccggcaggtttgttgcaacctctcaggattcccgaatggaaatgggatgagataggtatggattttattgttggattgcccaaaaccgcaacaggacatgattccatttgggtgatcgtggatcgactcaccaagacggcgagattcattcccgttaagacaaattatagcagtgctaagctagccgagttatacatgaccaggatagtatgtcttcattgtgtaccaaagaaaattatatctgatcggggcacacaatttacctaccatttctgggagaaagtccatgaagccctaggaagttatctcgcatttagcacagcttatcatccacagacagatggccagacggagagaaccaaccaggtcctggaagacatgctgagggcttgtgctctggattttaacaaggattgggagagatgtttgccctacgccgaattctcctacaacaacagctttcaagcaagcctaaagatgtcacccaacgaggcattgtttggtcgacgatgtcgtaccccgctaatgtggtccgagactggagaacgggcggtatttggacctgacattattcaagaggccgaagaaaaggttcgcttgatccgcgaccgtctaaaaatagcacaatcacgacaaaagagttacgccgacacccgaagaagaaacctggaatttaaggagggagattacgtttatctaaaggtttctccgatgaggggaacaaaaaggtttaaggtcaaaggaaaactggcaccaagatatgtgggaccattccagatcattgccaggcgaggagaagttgcatatcagatacagttaccagagaatatcgcggatgtacacccagtcttccatgtatctcagctaaagaaatgtttacgagtgccagaagagcaagctccgctggaagaaattcacattagcaatgatctcacatatccagaacacccgatccggatattggatgaagccgaaaagaggactaggagcaaagtgtggcatatgtacaaggtacaatggagcaatcacactgaggatgaagccacctgggaaagtgaagaatttttgaggacggaatacccgcacctattcgaagactggtaa

SEQ ID NO: 13982 - DNA, 4740 bp, Oryza sativa
  Clone ID: TFbOSC401834j.C1.o7.fg
atgggcgtaccccgctcggagggatacgtcattgagctgcatcagttgatgaggcgtctacggtaccccagatttccgatctaccgagtgagacagtgtggacccgtttgggaggtcctggtcgaggttctcacacgagttccgtcagagtcagactacagctttccgacacgccactgtcacgacttaccggagaccgcgatgcaggatgcagcctgggaggccttcctccaacttagctctatccaccgagctgagttggcaatagacgacttctacgaggaggctctgttagagatcgacgaccagcagaggcgtgtaggagagttagagaccgaggtgactgacctcacagtgcagcagcttcagctagaggaggagcaccaggcttggggcagtgagataaacttactgaaggcacagcttcaggtccacggcgaccagttccagcagctatctgatcagtacaacgatcgccgtgggatgatggatacacttgaggagcagttgagagagagtcaggagcatgttagccagctggaggagcagcttcgagcagccacggtcaacaccacaggagcttctacttccacagcagtagggcgtgaccgctacttcttcctcaccccgccgtacccacccgcgttccacgctcttctgggagagctgggttctagcatggagactccgatccaggtcgactccgagacggaggggactgacaccgagccagagatagagccagacatcactgatccttcggaggacgagactcctgttccccgcatcacctttatcggaggccctcgcaccctcagcaccgcccacaagagcacccgacccccgggtaagaagcccaagccagatccagaggccactacctccgagccgtggggactcagcaatgaagagacccaagcacccgacctaaccaccctggccggagtcatggctgctcaaacccaacttctgcaagccatcgcaaataatcaaggcaaccgtggaggatcaagctttggggaattcatgagaactaagccacccacgttcgctacagctgatgaacctatggaggctgaagattggttaaggattattgagaagaagctgacccttgttcgagtacgtgaagccgataaagtgatctttgcggcgaaccaattggaagaagcccgagaagaagatgctggagaaccaaactgggaggaatttaccacagccttccgtaacaacttcgtgcctgccgcggaccacgataatttctacagtttaatcaataaggtcgttagaatggaaaacgaccggaaggttgtggagcacaatcgcaaaaggaggtttgccatgaaccgcctgtctcaggccgcaccccagcgtcctaaaggaacaacctcctcagtatggagaccaacagtggtgacaaccaatcgtcttgccgcatctagcaatttccataggccggttaccattcagaaccgagctcctgcgccgaatcaggccgccactggatcagtgaggccaggaagctgtttcaactgtggagagtatgggcatttcgccaacaagtgcccccatccaaaaaagacaccagttcgtactggagctaatacaacggctattcacgggactactacccctgccgctggacgaggtctattcaagactccgcaaactaacaggaccgctaccggatttggacgcgggcaggtgaaccacgttcgggccgaagaggcccaggaagaccagggcgtactgatgggtatgttttctatcaactccactccagttaaagttctcttcgattcaggagcatcgcattcatttatatctttgaaagcaagccaacaacacaagttgaccagagttaaactaaggcaaccaatgttagtacattcacctgggggtgagatagccgtggatacagcttgcattgatgtacccattcgccttagggatgtggtatttccctccaaccttatggtgctgatacctcaaactctttatgtcgtattgggtatggattggttaacaaagcatagaggagtaatcgactgtagacgtagagaagttaccctgaccacaccctggggatcggatatgagagcaactatggatcaagatcctagactggctgaacgtgccgaaggcatattcaccatgctacccatgaagggaatgcccgtagtgcagcgattccccgatgtgtttctagaagatttacctggaatgccactagatcgtgacatagagtttattattgacctgatacccggaactgcccccatatccaagagaccatatcggatgccggtcaatgagttggaggaacttaaaaagcaaatcagagagttgcaggagaagggatttgtacgtcccagttcgtcaccttggggagccccagtgttattcgtcaggaagaaagatggtagcatgaggatgtgtgtagactaccgctcactgaacgaagtcactatcaaaaacaagtatccattaccacgaatcgatgatctttttgatcaactcaaaggagctaaggtgttctctaagattgaccttcgatcaggataccaccaattgaaaattaggaccgagaatatacccaagaccgcgttctcaacgcgctatggattgtatgagttcacagtaatgtcgtttggattaaccaatgccccggcatactttatgaatcttatgaacaaagtgttcatggattacttggacaaatttgtggtagtattcatcgatgatattttaatatactccaaggatgaggaagagcatgcggagcacttgcgattggtactcgagaaattacggaagcataagttatatgcaaaatttggcaagtgtgagttctggttgaaggaagtcgcttttctaggccacgtgatctcagccggtggagtagcagtggatcctgctaaagtggaggccgttacggaatggaaggcacccaaatcggtaactgaaattcggagttttctaggtttggccggatactatcgaaggaaagactttgttatatattgtgatgcatcaaggcaagggctaggaggagtactgatgcaggacggaaaggttgtggcctatgcattgcgacaattgcgaccacatgaggaaaattaccctactcatgacctagaactagcagccgtggttcatgcgctaaagatttggagacactacttgattggaaaccattgcgatatctacattgaccacaagagtctgaagtatattttcacccagtcagatctcaacttgaggcaaaggcgatggctggaattaatcaaggactatgatctagaggttcactaccaccccggcaaagcaaacgttgtggccgacgctttgagtcgtaagagccattgcaatcatctgagaatggaaggaatggctcccgagcttaaagaggaaatagcccagctgaacctacatatagtacctcatgggcagataaacaccctggatattcaacctcttttgagaacccaaatagaagaagctcagaaggacaacgaagaaatccaagaggtgaaggaacgcttagctgcagggttcgcaaaggaattttcgaccgatgagaaagacgtcttgtggtacaaaaagaggatctatgtacccgaacggggtggactgagaggattaatcttaaaggaagctcacgaatcggcatattcattgcaccccggaaatacgaaaatgtaccaggatctaaaggaaggatactggtggcccaacatgaagagagatgtggcagaatacgtagcgctctgtgacgtatgccaaaagaccgcaacggggtatgattccatttgggtgatcgtggatcgacttaccaagacggcgaggttcattcccgtcaagacaaattatagcggtgccaagctcgccgagttgtacatgaccaggatagtatatcttcatggtgtgcctaagagaattgtatccgatcgaggcacacagtttacctcgcatttctgggaaaaagtacatgaaaccctaggaagttatcttgcttttagcacagcttatcatccacagacagatggccagacggagaggacaaaccaggtcctggaggacatgctgagagcttgtgcattggatttcagcaaagactgggagagatgtttgccctacgccgaattctcctacaacaacagctttcaagcaagcctaaagatgtcacccaatgaggcattgtttggtcgacgatgtcgaaccccactgatgtggtccgagacatgtgaacgggcggtatttggacctgacattatcaaagaggccaaagaaaaggttcgcctgattcgagaccgtctaaaagtggcacaatcacgacagaagagttacgccgacacccgaaaaagaaacctggaatttaaggaaggagattacgtttatctaaaggtttctccgatcaggggaacaaaaaggtttaaggtcaaaggaaaactagcgccaagatatgtgggaccttttcaaatcacggctagacgaggagaagtcgcatatcagttacagctaccagagaatatcgctgatgtgcacctagtcttccatgtgtctcaattaaagaaatgcttacgagtgccagaagaacaagctccgttggaagaaattcacattagcaatgatctcacgtatccagaacacccagtccggatattggatgaagcagaaaagaggactaggaacaaagtatggcgtatgtacaaggtacagtggagtaatcacacttag

SEQ ID NO: 13983 - DNA, 4413 bp, Oryza sativa
  Clone ID: TFbOSC410570j.C1.o1.fg
atggcaagccgacgtcgggcaacaaccggcaatgacgaaactcagacgcccgacctaaacactctggccggaattatggccacccaaactcaacttctgcaagctatcgcgagcaaccaaggcaaccgcagagggtcaagctttggagagtttatgaggaccaagccacccacattcgccacagctgaagaacctatggatgctgaagattggttaaggatcattgagaagaagctaactcttgttcgagtacgtgaggccgataaggtgatctttgcggcaaaccaattggaaggaccagccggagattggtgggacacgtacaaagaagcccgagaagaagatgccggggaaccaaactgggaggaatttaccacagccttctgtgacaactttgtgcctgccgcggtgatgcggatgaagaagaacgagttcaggagactacggcaagggaataccacagtacaagagtacctgaaccgtttcactcagctggcgcgctacgcaactggagatcttgccgacgaagaggaaaagatcgacaaatttattgaaggcttgaatgacgagttacgcgggcccatgattggacaagaccacgatagtttccagagcttaatcaataaggtcgtcaggctggagaacgaccggaaggtagtggagcacaatcgtaaaaggaggcttgccatgagccgcccgcctcagaccgccccccagcgtcctaaagggacaaccccctcagcatggagaccaacagtggtgacaaccagtcgacctgccgcctccagcaatttccacaggccggttaccattcagaaccgcgctcctacaccgaatcaggccgccactggatcagtaaggccagggagctgcttcaactgtggagagtatgggcatttcgctaataaatgtcctcatccaaacaagacacccattcgtaccggagctaatgcaacggctattcacggtactgctacccctgctgctggacgaggtctattcaggactccgcagactaacaggaccgctaccggatttggacgcgggcaagtgaaccatgttcgagctgaagaggcccaggaagaccaaggcgtactgatgggtatgttttcactcaactccactccagttaaagttctcttcgattcaggagcatcgcattcatttatatctttgaaagcaagtcaacaacacaatttaaccagagttaaattaagacaaccaatgttagtacattcacctgggggtgagatagcagtggatacagcttgcattgacgtacccattcgccttagggatgtggtatttccctccaatcttatggtgctaataccccaaactcttgatgtcattttgggtatggattggttagcaaagcatagaggagtaattgactgtagacgtagagaagttaccctgaccacaccctggggatcggatatgagagcaaccatggatcaagatcctaggctaaccgaacgtgccggaggtatatttaccatgctacccctaaagggaatgccagtagtgcagcgatttcctgatgtgttcccagaagatttacctggaatgccaccagatcgtgacatagagttcattattgacctgatacccggaactgcccccatatccaagagaccatatcggatgccggtcaatgagttagaagaacttaaaaagcaaatcagagagttgcaagagaagggatttgtacgccccagctcgtcaccttggggagccccagtgttgtttgttaaaaagaaagacggtagcatgagaatgtgtgtagactaccgatcactgaacgaagtaactatcaaaaataagtatccactaccacggattgatgacctcttcgaccaacttaagggagctaaggtgttttcaaagatagaccttcgatcaggataccatcaactgaagattaggaccgaggatatccccaaaaccgcgttttcaacacgctatgggttgtatgaattcacagtaatgtcgtttggtctaaccaatgccccagcatacttcatgaatcttatgaacaaagtattcatggaatacttggataagtttgtggtggtgttcattgatgacattcttatctactccaaagatgaggaagaacatgcggaacacttaagattggttctccagaaactccgaaagcacaagttatacgcaaaattcagcaagtgcgaattttggttgaaggaagtcgcttttctgggtcacgtaatctcagccggtggagtagcagtggaccctgctaaagtggaggctgtcacggaatggaaagcacccaaatcggtgactgagatccggagttttctaggcttggctggatactaccgaaggttcattgaagggttctctaagatagcccgaccaattacacaattactcaagaaggaaaagaagtttgcatggtcggaacagtgtcaagaaagctttgagcagctcaaagaaaagctgacctcagcacctattttagttcttcccgacatcaggaaagactttgttatatattgtgatgcgtcgaggcaaggactaggaggagtactgatgcaggagggaaaagtggtggcctatgcgtcgcgacaattgcgaccacatgaggaaaactaccctacccatgacctagaactcgcagctgtggttcatgcgctaaagatttggagacattatctgattggaaaccattgcgatatctacactgaccacaagagtctaaagtatatcttcacccagtcagatctcaacttgaggcaaaggcgatggttagaattaatcaaggactatgatttagaggttcattatcacccaggcaaagcaaacgtcgtagccgacgctctgagtcgtaagagccattgcaatcatctgagaacggaagggatggtccctgagcttagggaggaaatggcgcagctgaacctacatatagtaccccgtggacagataaacaccctggatattcaacctcttttgagaacccaaatagaagaagcccagaaggacaacgaggaagtccgagaggtgaaggagcgcttagctgtaggacgtgcaaaggaattttcaaccgacgaaaaagatgttctatggtataaaaagagaatttacgtacccgaacagggtggactgaggggattaattttaaaggaagctcacgaatcggcatattcattgcaccccggaagtacgaagatgtaccaagatctgaaggaaggatactggtggcccaacatgaagagagatgtggccgaatacgtagcactctgcgacgtatgccagaaggtgaaggctgaacaccagaggccggcaggtttgttgcaacctctcaggattcccgaatggaaatgggatgagataggcatggattttattgttggattgcccaaaaccgcaacaggatatgattccatatgggtgatcgtggatcgactcaccaagacggcaagattcatccccgtcaagacaaactatagcagtgcaaaactcgccgagttgtacatgaccaggatagtgtgtcttcatggtatacctaagaggattatatctgatcgaggcacacagtttacctcacatttctgggagaaagtccatgaagccctaggaagttacctcgcatttagcaccgcttatcatccacagacggatggccagacggagagaaccaaccaggtcctggaggacatgctgagggcttgtgctttggattttagcaaggactgggagagatgtttgccctacgccgaattctcctacaacaacagctttcaagcaagcctaaagatgtcacccaatgaggcattgtttggtcgacgatgtcgtaccccgctaatatggtccgagactggggaacgggcggtatttggacctgacatcattcaagaagccgaagaaaaggttcgtttgatccgtgaccgtctaaaagtagcacagtcacgacaaaagagttacgccgacactcgaagaagagacctggaatttaaggaaggagattacgtttatctaaaggtttctccgatgaggggaacaaagaggtttaaggttaaaggaaaactggcaccaagatatgtggggccattccagatcatcgccaggcgaggagaagttgcatatcagttacaactaccagagaatatcgccgatgtgcacctagtcttccatgtatcccaattaaagaaatgcttacgagtgtcggaagaacaagctccgctggaagagattcacattagcaatgatctcacatacccagaacacccgattcggatattagatgaagcagaaaagaggactaggagcaaagtgtggcgtatgtacaaggtacaatggagtaatcacactgaggatgaagccacctgggaaagcgaagaattcttgaggacggagtacccgcatctattctacaactggtaa

SEQ ID NO: 13984 - DNA, 5076 bp, Oryza sativa
  Clone ID: TFbOSC416395j.C1.o15.fg
atggagaggacgacggaggatgatgagaggccgacggttcctctgctggagcctaagccggcgagcaacgaggaggaagaagaggttggatcggtgaggcggcgagtggtggaggagaacaagaagctgtgggtggtggcgggtccttccatctgcgcccgcttctcctccttcggcgtcaccgtcatcagccaggcgttcatcggacacatcgggggtaccgagctcgccgcctacgccctcgtctccaccgtcctcatgcgcttcagcaatggcatcctgcttggcatggcgagcgcattagaaacattgtgtggacaatcatatggcgccaagcaatatcacatgttgggtgtctatctacaacgctcatggctagttctcttctgttgtgcagtcatccttctcccggtctatatcttcacaactccactcctgattgctctcggtcaagatcctgagatctctgccgtcgctggcaccatctctctatggtacatccccgtaatgttctcttacatatgggcattcatgctccaaatgtacctacaagcgcagagcaagaacatgattgtcacttaccttgccttcctcaatcttgggattcacctcttcttgtcatggctcctaacagtcaagttccaacttggtcttgctggggtcatgggatccatggtcatctccttttggatccctgtgtttggccaactcgcttttgtcttctttggtggttgccctctaacatggacagggttctcatcctctgcttttactgatcttggtgctattatgaagctttcgttatcgtctggagtgatgctttgtttagaattgtggtacaacaccatattggtgctcctcactggttatatgaagaatgcagaggttgctcttgatgctctttctatatgccttgcatacatatttactgaaagtaaggcagtagcagatgaagtcgctgatcttgctccccttctagctttctccattttgttgaatagtgttcaaccagtgctctcaggtgtcgctatcggatcgggttggcaaagtgtagttgcctatgttaatgttacatcgtactacttgattggtatccctcttggtgcaatactaggctatgtgctaggatttcaagcaaagggcatttggatcggcatgcttcttggaacactagtccagactcttgtgcttctattcatcacacttaggaccaattggaaaaaacagctgggttccagtttggagactccgatccaggtcgactccgagacagaggggaccgacaccgagccagagatcgagccagacatcactgatccttcagaggatgagacccctgttccccgcatcaccttcctcggaggccctcgcaccctcagcactgctcgcaagagcacacgacctccgggcaagaggcccaagctagatccagagatggcaagccgacgttgggcgtcaaccagcaatgaagaaactgagacacctgacctaaccaccctggccggagttatggccacccaaacccaacttttgcaagccattgcaaataaccaaggcaaccgctgtggatcaagctttggagagtttatgaggaccaagccacccacattcgccacagctgaagaacctatggatgctgaagattggttaaggatcattgagaagaagctaactcttgttcgagtacgtgaggccgataaagtgatctttgcggcaaaccaattggaaggaccagccggagactcgtgggacacatacaaaggagcccgagaagaagatgctggagaaccaaattgggaggaatttaccacagccttccgtgacaacttcgtgcctgccgcggtgatgctgatgaagaagaatgagttcaggagactacggcaagggaataccacagtacaagagtacctaaaccgtttcactcagctagcgcgctacgcgactagagatcttgccgacgaggaggaaacgatcgacaaattcattgaaggcttgaatgacgagttgcgcgggcccatgattggacaagaccacgatagtttccagagtttaatcaataaggccgccactggaccagtaaggccaggaagctgtttcaactgtggggagtatgggcattttgccaacaaatgcccccatccaaacaagacacctattcgcaccggagctaatgcaacggctattcacgggactactacccctgctgttagacgaggtctattcaggactccgcagactaacaggaccgctaccggatttggacgcgggcaagtgaaccacgttcgagctgaagaggcccaggaggaccaaggcgtgctaatgggtatgttttcactcaactccactccagttaaagttctcttcgattcaggagcatcgtatttatttatatctctgaaagcaagtcaacaacacaatttaaccagagttaaactaaggcaaccaatgttagtacattcacctgggggtgaaatagccgtggacacagcttgcattgacgtacctattcgccttagggatgtggtgtttccctccaaccttatggttttgataccacaaactcttgatgtcattttggctatggattggttagcaaagcatagaggagtaattgactgtagacgtagagaagttaccctgaccacaccctggggatcggatatgagagcaaccatggatcaagatcctaggctaaccgaacgtgtcggaggtatatttaccatgctacccctaaagggaatgcccgtagtgcagcgatttcctgatgtgttcccagaagatttacctggaatgccaccaaatcgtgacatagagttcattattgacctgatacccggaacggcccccatatccaagagaccatatcggatgccggtcaatgagttagaagaacttaaaaagcaaattagggagttgcaagaaaagggatttgtacgccccagttcgtcaccttggggagccccagtgctatttgttaagaagaaagacggtagcatgagaatgtgtgtagactaccgatcactgaacgaagtaactattaagaacaaatacccactaccaaggattgatgatctcttcgatcaacttaagggagctaagatgttttcaaagatagaccttcgatcaggataccaccaactgaagattaggaccgaggatatccccaaaaccgcgttatcaacacgctatgggttgtatgaattcacagtaatgtcgtttggtctaaccaatgccccagcatacttcatgaatcttatgaacaaagtattcatggactacttggataagtttgtggtggtattcatcgatgacattctgatctactccaaagatgaggaagaacatgcggaacacttacgattggtactccagaaactccgaaagcacaagttatacgcaaaattcagcaagtgcgaattttggttgaaggaagtcgcttttctgggtcacgtaatctcagccggtggagtagcagtggaccctgcaaaagtggaggccgttatggaatggaaagcacccaagtcggtgaccgaaattcggagttttctaggcttggttggatactaccgaaggtttatcgaggggttctcaaagatagcccggccaatgacacaactactcaaaaaggagaagaagtttgtgtggtcagaacagtgccaggaaagctttgagcaactcaaagagaagctgacatcggcacctattctagttcttcccgacatcaggaaggactttgttatatattgtgatgcatcaaggcaaggactaggaggagtactgatgcaggatggaaaggttgtggcctatgcgtcgcgacaattgcgaccacatgaggaaaactaccctacccatgacctagaactcgcagctgtggttcatgcgctaaatatttggagacattatctgattggaaaccattgcgatatctacaccgaccacaagaatctgaagtatatcttcacccagtcggatctgaacttgaggcaaagacggtggctggaattaatcaaggactacgatctcgagatttggagacattatctgattggaaaccattgcgatatctacaccgaccacaagagtctgaagtatatttttatccagtcggatctgaacttgaggcaaagacggtggctggaattaatcaaggactacgatctcgaggttcactatcaccccggcaaagcaaacgttgtggccgacgccttgagccgtaagagccattgcaatcatttggaaatggaagggatggcacctgagcttaaagaggaattggcccagctaaatctacatatagtgcctcgagggcaggtaaacaccctggacattcaacctcttctgagaacccaaatagaagaggctcagaaagacaacgaggaaatccgagaggtgaaggaacgtctagctgcaggatttgcaaaggaattttcaaccgacgagaaggatgtcctatggtataaaaagaggatttatgtacccaaacagggtggactgaggggattaattctaaaggaagctcacgaatcggcatattcattgcaccccggaagtacaaaaatgtaccaggatctgaaggaagtatactggtggcccaacatgaagagagatgtggcagaatacgtagcactctgtgacgtgtgccagaagaccgcaacaggatatgattccatttgggtgatcgtggatcgactcaccaagacggcgaggttcatccccgttaagacaaattacagcagtgccaagctagcagagttatacatgaccagaatagtatgtcttcatggtgtacctaagaggattatatctgatcgaggcacacagtttacctcacatttctgggagaaagtccatgaagccctaggaagttaccttgcgtttagcacagcttatcatccacagacagatggccagacggagagaaccaaccaggtcctagaggacatgctgagagcttgtgcgctggattttagcaaggactgggagaggtgtttgccctacgccgagttctcctacaacaacagctttcaagcaagcctgaagatgtcccccaatgaagcattgtttggtcgacgatga

SEQ ID NO: 13985 - DNA, 4257 bp, Oryza sativa
  Clone ID: TFbOSC420750j.C1.o6.fg
atggcaagccgacgtcgggcaacaaccagcaatgacgaaactcagacacccgacttaaccactctggccggagttatgaccacccaaacccaacttctgcaagctatcgcgaacaaccaaggcaaccgcggagggtcaagctttggagagtttatgagaaccaagccacccacattcgccacagctgaagaacctatggatgctgaagattggttaaggatcattgagaagaagctaactcttgttcaagtacgtgaagccgataaagtgatctttgcggcaaaccaattggaaggaccaaccggagactggtgggacacgtacaaagaagcccgagaagaagatgctggagaaccaaactgggaggaatttaccacagccttccgtgacaacttcgtgcctgccgcggtgatgaggatgaagaagaatgagttcaggagactacggcaagggaataccacagtacaagagtacctgaaccgtttcactcagctggcgcgctacgcgactagagatcttgccgacgaggaggaaaagatcgacaaattcattgaaggcttgaatgacgagttacgcgggcccatgattggacaagaccacgatagtttccagagtttaatcaataaggtcgttaggttggagaacgaccggaaggtcgtggagcacaatcgtaaaaggaggcttgccatgaaccgctcgcctcagaccgcaccccagcgtcctaaagggacaaccccctcggcatggagaccaacagtggtgacaaccagtcgacctgccgcctctagcaattttcacaagccggttaccattcagaaccgcgctcctgcaccgaatcaggccgccactggatcagtaaggccagggagctgtttcaactgtggagagtatgggcatttcgccaataaatgtcctcatccaaacaagacacccattcggaccggagctaatgcaacggctaatcacgggactgctacccctgctgctggacgaggtctattcaggactccgcagactaacaggaccgctaccggatttggacgcgggcaagtgaagcacgttcgagctgaagaggcccaggaagaccaaggcgtactgatgggtatgttttcactcaactccactccagttaaagttctcttcgattcaggagcatcgcattcatttatatctttgaaagcaagtcaacaacacaatttaatcagagttaaactaagacaaccaatgttagtacattcacctgggggtgagatagcagtggatacagcttgcattgacgtacccatccgccttagggatgtggtatttccctccaatcttatggtgctaataccccaaactcttgatgtcattttgggtatggattggttagcaaagcatagaggagtaattgactgtagacgtagagaagttaccctgaccacaccctggggatcggatatgagagcaaccatggatcaagatcctaggctaaccgaacatgccggaggtatatttaccatgctacccctaaagggaatgcccgtagtgcagcgatttcctgatgtgttcccagaagatttacctggaatgccaccagatcgtgacatagagttcattattgacctgatacccggaactgcccccatatccaagagaccatatcggatgccggtcaatgagttagaagaaattaaaaagcaaattagggagttgcaagagaagggatttgtacgccccagttcgtcaccttggggagccccagtgttatttgttaaaaagaaagacggtagcatgagaatgtgtgtagactaccgatcactgaacgaagtaactattaaaaacaagtatccactaccaaggattgatgatctcttcgaccaacttaagggagctaaggtgttttcaaagatagaccttcgatcaggataccaccaactgaagattaggaccgaggatatccccaaaaccgcgttttcaacacgctatgggttgtatgaattcacagtaatgtcgtttggtctaaccaatgccccagcatacttcatgaatcttatgaacaaagtattcatggattacttggataagtttgtggtggtattcatcgatgacattctgatctactccaaagatgaggaagaacatacggaacacttacgattggttctccagagactccgaaagcacaagttatacgcaaaattcagcaagtgcgaattttggttgaaggaagtcgcttttctgggtcacgtaatctcagccggtggagtagcagtggaccctgctaaagtggaggctgtcacggaatggaaagcacccaaatctgtgactgaaattcggagttttctaggcttggctggatactaccgacggttcattgaagggttctctaagatagcccgaccaatgacacaactactcaagaaggaaaagaagtttgtatggtcagaacagtgtcaggagagctttgagcagctcaaagaaaagctgacctcggcgcctattttagttcttcccgacatcaggaaagacttcgttatatattgtgatgcgtcaaggcaaggactaggaggaatttggagacattatctgattggaaaccattgcgatatctacactgaccacaagagtctgaagtatatcttcacccagtcagatctcaacttgaggcaaaggcgatggttagaattaatcaaggactatgatctagaggttcactatcacccaggcaaagcaaacgttgtggccgacgctctgagtcgtaagagccattgcaatcatctgagaatggaagggatggtccctgagcttagggaggaaatagctcagctgaacctacatatagtgcctcatggacagataaacaccctggacattcaacctcttttgagaacccaaatagaagaagcccagaaggacaacgaggaaatccgagaggtgaaggaacgcttagctgcaggacgcgcaaaggaattttcaaccgacgaaaaagatgttctatggtataaaaagagaatttacgtacccgaacagggtggactgcgaggattaatcctaaaggaggctcacgaatcggcatactcattacaccccggaagtaccaaaatgtaccaggatttgaaggagggctactggtggcccaacatgaagagagatgtggccgaatacgtagcactctgcgacgtatgccagaaggtgaaggctgaacaccagaggccggcaggtttgttgcaacctctcaggattcccgaatggaaatgggatgagataggtatggattttattgttggattgcccaaaatcgcaacaggatatgattccatttgggtgatcgtggatcgactcaccaagacggcgagattcattcccgttaagacaaattatagcagtgctaagctagccgagttatacatgaccaggatagtatgtcttcatggtgtacctatgaaaattatatctgatcggggcacacagtttacctcacatttctgggagaaagtccatgaagccctaggaagttacctcgcatttagcacagcttatcatccacagacagatggccagacggagagaaccaaccaggtcctggaggacatgctgagggcttgtgctctggattttagcaaggactgggagagatgtttgccttacgccgaattctcctacaacaacagctttcaagcaagcctaaagatgtcactcaatgagtcattgtttggtcgacgatgtcgaaccccactaatgtggtccgagactggagaacgggcggtacttggacctgacattattcaagaagccgaagaaaaggttcgcttgatccgcgaccgtctaaaagtagcacaatcacgacaaaagagttacgccgacacccgaagaagaaacctggaatttaaggagggagattacgtttatctaaaggtttctccgatgaggggaacaaaaaggtttaagatcatcgccaggcgaggagaagttgcatatcagttacagttaccagagaatatcgcggatgtacacccagtcttccatgtgtctcagctaaagaaatgtttacgagtgccagaagagcaagctccgctggaagagattcacattagcaatgatctcacatatccagaacacccgatccggatattggatgaagccgaaaagaggactaggagcaaagtgtggcgtatgtacaaggtacaatggagcaatcacactgaggatgaagccacctgggaaagtgaagaatttttgaggacggaatacccgcacctattcgaagactggtaa

SEQ ID NO: 13986 - DNA, 3225 bp, Oryza sativa
  Clone ID: TFbOSC900173j.C1.o6.fg
atggcaagccgacgtcgggcaacaaccagcaatgacgaaacccagacacctgacctaaccaccctggccggagttatggccacccaaacccaactcctgcaagccattgcaaataaccaaggcaaccgtggcggatcaagctttggagagtttatgaggaccaagccacccacattcgccagagctgaagaaccaatggatgctaaagattggttaaggatcattgagaagaagctaactcttgttcgagtacgtgaggccgataaagtgatctttgcggcaaaccaattggaaggaccagtcggagactggtgggacacatacaaggaagcccgagaagaagatgctggagaaccaaactgggaggaatttaccacagacttccgtgacaacttcgtgcctgccgcggtgatgcggatgaagaagaatgagttcaggagactacggcaagggaataccacagtacaagagtacctgaactgtttcactcagctggcgcgctacgcgactagagatcttgccgacgaggaggaaaagatcgacaaattcattgaaggcttaaatgacgagttgcgcgggcccatgattggacaagaccacgataaaaacgaccggaaggtcgtggagcacaatcgtaaaaggaggcttgccatgaaccgcccgccccagaccgcaccccagcgtcctaaaggggcaacctcttcggcatggagaccaacagtggtgacaaccagtcgacctgccacctccagcaatttccacaggccggttaccattcaaaaccgagctcctgcaccgaatcaggccgccactggatcagtaaggccaggaagctgtttcaactgtggagagtatgggcatttcgccaataaatgtcctcatccaaacaagacacccattcgcaccggagctaatgcaacggctattcatgggactgctactcctgctgctggacgaggtctattcaggactccgcagactaacaggaccgctaccggatttggacgcgggcaagtgaaccacgttcgagctgaagaggcccaggaagaccaaggcgtgctgatgggtatgttttcactcaacttcactccagttaaagttctcttcgattcaggagcatcgcattcatttatatctctgaaagcaagtcaacaacacaatttaaccagagttaaactaaggcaaccaatgttagtacattcacctgggggtgaaatagccgtggacacagcttgcattgatgtacctattcgccttagggatgtggtgtttccctccaaccttatggttttgataccacagacccttgatgtcatattgggtatggattggttagcaaagcatagaggagtaattgactgtagacgtagagaagttaccctgatcacaccctggggatcggatatgagagcaaccatggatcaaaatcctaggctaaccgaacgtgccggaggtatatttaccatgctacccctaaagggaatgcccgtagtgcagcgatttcctgatgtgttcccagaagatttacctggaatgccaccagatcgtgacatagagttcattattgacctgatacccgcaactgcccccatatccaagagaccatatcggatgccagtcaatgagttaaaagaacttaaaaagcaaattagggagttgcaagaaaagggatttgtacgccccagttcgtcaccttggggagccccagtgctatttgttaagaagaaagacggtagcatgagaatgtgtgtagactatcgatcactgaaagaagtaactattaagaacaagtacccactaccaaggattgatgatctcttcgaccaacttaagggagctaaggtgttttcaaagataaaccttcgatcaggataccaccaactgaagattaggaccgaggatatccccaaaaccgcgttttcaacacgctatgggttgtatgaattcacagtaatgtcatttggtctaaccaatgccccagcatacttcatgaatcttatgaacaaagtattcatggattacttggataagtttgtggtggtattcatcgatgacattctgatctactccaaagatgaggaagaacatgcggaacacttacgattggttctccagaaactccgaaagcacaagttatacgcaaaattcagcaagtgcgaatttcggttgaaggaagtcgcttttctgggtcacgtaatctcagccagtggagtagcagtggaccctgcaaaagtggaggctgttacggaatggaaggcacccaagtcggtgaccgaaattcggagttttctaggcttggccggatactaccgaacgtttatcgaggggttctcaaagatagcccggccaatgacacaactactcaaaaaggagaagaagtttgatctgaaggaaggctactggtggcccaacatgaagagagatgtggccgaatacgtagcactctgcgacatatgccagaaggtgaaggctgagcaccagaggccggcaggtttgttgcaacctctcaggatttccgaatggaaatgggatgagataggtatggatttcattgttggattgcccaagactgcaacaggctttcaagcaagcctgaagatgtcccccaatgaagcattgcttggtcgacgatgccggacgccgctgatgtggtctgagacaggtgaacgggcggtatttggacctgacatcatcaacgaggccgaagagaaggttcgcctaattcgagaccgtctaaaagtgacacaatcacggcagaagagttacgctgacacccgaagaagggatctagaatttaaaaaaagagattacgtgtatctcaaagtttctccgatgaggggaacaaaaaggtttaaggttaagggaaaactagcaccaagatatgggggaccctttcaaatcacggctagaagaggagaagtcgcatatcagttacagctaccagagaatatcgctgatgtgcacccagtcttccatgtgtcccaattaaagaaatgcttaccagtgccggaagaacaagctccgctggaagagattcacattagcaacgatctcacgtatccagaacacccgatccggatattggatgaagtagaaaagaggactaggagcaaagtgtggcgtatgtacaaggtacaatggagtaatcacactgaggatgaagccacctgggaaagcgaagaattcttgaggacggagtacccgcatctattcgaaaactggtaa

SEQ ID NO: 13987 - DNA, 4287 bp, Oryza sativa
  Clone ID: TFbOSC900324j.C1.o13.fg
atggcaagccgacgtcgggcaacaaccagcaatgacgaaactcagacacccgacttaaacactctggccggaattatggccacccaaactcaacttctgcaagctatcgcgagcaaccaaggcaaccgcggagggtcaagctttggagagtttatgaggaccaagccacccacattcgccacagctgaagaacctatggatgctgaagattggttaaggatcattgagaagaagctaactcttgttcgagtacgtgaggccgataaggtgatctttgcggcaaaccaattggaaggaccagccggagattggtgggacacgtacaaagaagcccgagaagaagatgctggagaaccaaactgggaggaatttaccacagccttccgtgacaactttgtgcctgccgcagtgatgcggatgaagaagaacgagttcaggagactacggcaagggaataccacagtacaagagtacctgaaccgtttcactcagctggcgcgctacgcaactagagatcttgccgacgaagaggaaaagatcgacaaattcattgaaggcttgaatgacgagttacgcgggcccatgattggacaagaccacgatagtttccagagcttaatcaataaggtcgtcaggctggagaacgaccggaaggtagtggagcacaatcgtaaaaggaggcttgccatgaaccgcccgcctcagaccgccccccagcgtcctaaagggacaaccccctcagcatggagaccaacagtggtgacaaccagtcgacctgccgcctccagcaatttccacaggccggttaccattcagaaccgcgctcctacaccgaatcaggccgccactggatcagtaaggccagggagctgcttcaactgtggagagtatgggcatttcgctaataaatgtcctcatccaaacaagacacccattcgtaccggagctaatgcaacggctattcacggtactgctacccctgctgctggacgaggtctattcaggactccgcagactaacaggaccgctaccggatttggacgcggagttaaattaagacaaccaatgttaatacattcacctgggggtgagatagcagtggatacagcttgcattgacgtacccatccgccttagggatgtggtatttccctccaatcttatggtattaataccccaaactcttgatgtcattttgggtatggattggttagcaaagcatagaggagtaattgactgtagacgtagagaagttaccctgaccacaccctggggatcggatatgagagcaaccatggatcaagatcctaggctaaccgaacgtgccggaggtatatttaccatgctacccctaaagggaatgccagtagtgcagcgatttcctgatgtgttcccagaagatttacctggaatgccaccagatcgtgacatagagttcattattgacctgatacccggaactgcccccatatccaagagaccatatcggatgccggtcaatgagttagaagaacttaaaaagcaaatcagggagttgcaagagaagggatttgtacgccccagttcgtcaccttggggagccccagtgttgtttgttaaaaagaaagacggtagcatgagaatgtgtgtagactaccgatcactgaacgaagtaactatcaaaaataagtatccactaccccggattgatgacctcttcgaccaacttaagggagctaaggtgttttcaaagatagaccttcgatcaggataccaccaactgaagattaggaccgaggatatccccaaaaccgcgttttcaacacgctatgggttgtatgaattcacagtaatgtcgtttggtctaaccaatgccccagcatacttcatgaatcttatgagcaaagtattcatggattacttggataagtttgtggtggtattcattgatgacattctgatctactccaaagatgaggaagaacatgcggaacacttacgattggttctccagaaacttcggaagcataagttatatgcaaaattcagcaagtgcgagttctggttaaaagaagtcgcttttctaggccacgtaatctcggccggtggagtagcagtggatcctgctaaagtggaggctgtcacggaatggaaagcatccaaatctgtgactgaaattcagagttttctaggcttggctggatactaccgacggttcattgaagggttctctaagatagcccgaccaatgacacaactattcaagaaggaaaagaagtttgtgtggtcagaacagtgtcaggaaagctttgagcagctcaaggaaaagctgacctcagcgcctattttagttcttcccgacatcaggaaagactttgttatatattgtgatgcgtcaaggcaaggactaggaggagtactgatgcaggacggaaaagtggtggcctatgcgtcgcgacaattgcgaccacatgaggaaaactaccctacccatgacctagaactcgcagctgtggttcatgcgctaaagatttggagacattatctgattggaaaccattgcgatatctacactgaccacaagagtctaaagtatatcttcacccagtcagatctcaacttgaggcaaaggcgatggttagaattaatcaaggactatgatttagaggttcactatcacccaggcaaagcaaacgttgtagccgacgctctgagtcgtaagagccattgcaatcatctgagaatggaagggatggtccctgagcttagggaggaaatagctcagctgaacctatatatagtgcctcatggacagataaacaccctggacattcaacctcttttgagaacccaaatagaagaagcccagaaggacaacgaggaggtccgagaggtgaaggaacgcttagctgccggacgtgcaaaagaattttcaaccgacgaaaaagatgttctatggtataaaaagagaatttacgtacccaaacagggtggactgaggggattaattttaaaggaagctcacgaatcggcatactcattacaccccggaagtaccaaaatgtaccaggatttgaaggagggctactggtggcccaacatgaagagagatgtggccgaatacgtagcactctgcgacgtatgccagaaggtgaaggctgaacaccagaggccggcaggtttgttgcaacctctcaggattcccgaatggaaatgggatgagataggtatggattttattgttggattgcccaaaaccgcaacaggatatgattccatttgggtgatcgtggatcgactcaccaaaacggcaagattcattcccgtcaagacaaactatagcagtgcaaaactcgccgagttgtacatgaccaggatagtgtgtcttcatggtatacctaagaggattatatctgatcgaggcacacagtttacctcacatttctgggagaaagtccatgaagccctaggaagttatctcgcatttagcacagcttatcatccacagacagatggccagacggagagaaccaaccaggtcctagaagacatgctgagggcttgtgctctagattttagcaaggactgggagagatgtttgccctacgctgaattctcctacaacaacagctttcaagcaagcctaaagatgtcacccactgaggcattgtttggtcgacgatgtcgtaccccgctaatgtggtccgagactggagaacgggcggtgtttggacctgacattattcaagaagccgaagaaaaggttcgcttgatccgtgaccgtctaaaagtagcacaatcacgacaaaagagttacgccgacactcgaagaagaaacctggaatttaaggagggagattacgtttatctaaaggtttctccgatgaggggaacaaaaaggtttaaggtcaagggaaaactggcaccaagatatgtggggccattccagatcaccgccaggcgaggagaagttgcatatcagttacagttaccggagaatatcgcggatgtgcacccaatcttccatgtatcccaattaaagaaatgcttacgagtgccggaagaacaagctccgctggaagagattcacattagcaatgatctcacatatccagaacacccgattcggatattggatgaagcagaaaagaggactaggagcaaagtgtggcgtatgtacaaggtacaatggagtaatcacactgaggatgaagccacctgggaaagcgaagaattcttgaggacggagtacccgcatctattcgaaaactggaattgtggaatcaaatttatatgggaaatactctaa

SEQ ID NO: 13988 - DNA, 4284 bp, Oryza sativa
  Clone ID: TFbOSC100949j.C1.o4.fg
atggcgttggttccggcgggagccgcagcggatccggcgagggggagctcagggagtgcgttctcctacccacaactcacggcgacgaattacaccagctggtgcattcgcgttcaggcaatgatggaggaccagggcgtgtgggacgccatcgagccggcggccggggtggccgtcgacccaagaagggacaagaagtcgaagtcccatctgctgcagtccctcccggaggacttgctgatgcaggtggcaaagaagagatcggcaaaggaagtgtgggattgcttgaagacaaggttcgtgggcgcggaccgcgttcgcgaagcgcgcctgcagacgttgaagggtgaatttggtgccatggtgatggagccgggggaaactctggatcagtacgcgggccgcatcaccgcgatgagcgtgcgtcactcggtgttgggctcgacactgagtgattccgcgatagtgaagaagctgttcgacacggtgccagagaaattcatcagcctcgtcgcaggtattgagcagttttatgagattgataatatgccatttgaggaggcggtgggtcgtctcaaggcctacgaagaacgagttcgcaagaagaaggcggccgctggtggtgtcaccgccgacggtcaagtacttctcactcaggcggagtgggaggcgcgtttcaggaaggacggcagcgagtcgtcttcgccgcagaaaaacaaacctcccagcgacaggggaaaccgtgcccagggcggacgcggtcgcggcagagggcacggtggaggtggtggacgcggcagcgcgccgcggaacagtggcgctggtggctctggcggcggtggccgtgacaagagccacatcaagtgctacaactgcgaagaattcggccactactccacccagtgccctcatcccaagaagaagaaggtggaggcccatctcgcgcaaaccgacgacgcaaaccctgcattgttactggcggtgaccgaagacgagccggcgagcgggctggtcgtacacgaggagcgtgtgtggccgcagctgctgttggctgacagcggagcagccaccggggacatctggttcctggacaatggggcaagcaaccacatgacgggtgatcgtgctaagttcagagatctagacgtatcaatcaccgggagcgtcaagttcggggacgcctcaactgtgaaaattcaggggaaagggtctatcctgttctcctgcaagaatggggatcaatggctgctgcaggatgttttttatatccctagtctgtgttgcaacatggtgagcttgggccagctcacagaaacggggcacagagtggtgatggatgaagatgtgctcgaggtgttcgacaaaagtcccctgcggctggttatgcgggtgaggcgcacccctaatcggctgtaccggatcgagctgaagctagccactccggtgtgcctgctgacaaggatggatgagccagcatggctctggcatgcacggcttgggcatgtcaatttccaggcgatgaagctgttggctgacaagggcatggctggtggcatcccggcgatcacacatccaaaccagctctgtcaggcatgtctggttgcaaagcagataaggcagccgtttcccgcaacggcgaacttcagggcggaggagccgctcgagttgctccacattgatttatgtggaccgatcaccccgacaactatggccggtaatcgttactttatgctaattgttgatgatttctcacggtggatgtggatgttcgtgatcaaaacgaaggaccaggcactagaggctttcaccaagttcaagccgctggccgagaacacggccgggcggcgcatcaagacgctgagatcggatcgcggtggcgaattcctgtcgggcgaattcgcgcagttgtgcgagcaggcgggcatccagcggcatctgacggcgccatactcaccccagcaaaacggggtggtggaacgccgaaatcgttcggtaatggcgatggcacgatctctgatgaaagggatgtcagtgccgggcaggttttggggggaggcggtgcgccatgcggtgtatctcctcaaccggctaccgacgaaggcgatgggcgatcggaccccgttcgaggcatggacggggcgcaagccgcagctgggacacctgcgggtgtttgggtgcatagcacacgccaagatcacgacgcccaaccagaagaaacttgatgaccggagcgcgccgtatgtgtatctcggcgtggaaaaaggcagcaaggcgcaccgcctgttcgacccgcgttgtgggcgtatccatgtaagtcgtgatgtcatttttgaagaaaatgtaccttggcaatggagtgtagtcgcaggggagcaaaactctaccgagttcacggtggaggaggatggagttgatgcaccgccggcaggagcgccggcctacccagtaccgcggtaccgggcgccatccccggcagtcccgcaatcgcctccggcaagcccggtaggggcgtcatcgtcattgccgacttcgccccagtcatcaccgagctctacaccgccttcaacacctgctaccggctctgccgggccggtggcgtcaccaggttccggcggcgaccttagaagcgatgagggtcccgtccggttcaggagtcttgaagatatcatgcgggaggcaccccgcgtggacctggtggaggatgaacacgatggggacgcgctgcttgcagagatggaggagccatcgagctaccgcgaggcagctggccagccggcatgggagaacgccatggcacaggagctgcaggcgattgagaagaattcaacatgggctctcactgcattgccggcaggacacaaacccattggcctcaagtgggtgtacaagctgaaaaagaacactgccggcgaagtaatcaagcacaaggctcgtttggttgcaaagggctatgttcagcgtcaaggggtggattttgaagaggtgttcgcgccagtggcgcggcttgacacagttcgtgtcatcctggctatcgcagctgatcggcggtgggaagtgcaccacctcgacgtcaaatcggcgttcttgaatggcgatcttgaagaagaagtgtacgtagcccagccagagggttttgtgaaacgaggagaagaacacttggtgctcaggctgagcaaggcgctctatggattgcgccaggccccgcgggcgtggaacacgcgtctcgacaagtgcttgaaagaactcggttttgcacggtgcacgcaggagcaggccgtgtatactagaggaaaggggcaagctggtgtaatcgttggtgtgtatgttgatgacttgattgtcacaggagaaaatccacatgagatagccatgttcaagcagcagatgatgggggaatttgagatgagtgatctcggtcttctctcttactatctggggatagaagtaattcagggggagaatgggattgctatcaagcaagctgcgtatgcgaagaagattctgtctcagtttggtatgcagggatgtaatcccacctcaatccccatggagccacggtcgctgctgcacaaggatgctgatggaaatccaattgatgcgaccgagtaccggcgtgtcatcgggtgcctgcgatacttgttacacaccaggccggatctgtcctacgccgttggcgtggcgagcaggttcatggagcggccgacaacgatgcatctcaaggcggtcaagatgatactcagatatctaaaggggacgctggactctggtctggtgtttgcaagcggcagtggctcgttggacatcacgggtttcactgacagtgacttggcaggtgacatggatgaccgtcggagcaccggcggcatggcgttctatgtgaacagcagcttggtgtcttggtgttctcaaaagcagaagacagtggcgctctcgtcttgcgaggcagagttcatggcggccactgcagcagcatgtcacgcgctctggcttagggcgttgctgagcgagatgatgggtactgaagcaaagcgggtgaaactttttgttgacaacaagtcggcgatcgccttgatgaagaatcctgtgttccacgggaggagcaagcatattgatacccgctaccatttcattcgtgaatgtgttgagagtgggcagattctgattgagttcgttcgttctgaggagcagcgagcagatgcaatgacaaagggactgccggcggcgaagctggcgactgcacggcacctgttgggtgtgcgtgatctcaggccacgccaagactaa

SEQ ID NO: 13989 - DNA, 4284 bp, Oryza sativa
  Clone ID: TFbOSC24132j.C1.o4.fg
atggcgttggttccggcgggagccgcagcggatccggcgagggggagctcagggagtgcgttctcctacccacaactcacggcgacgaattacaccagctggtgcattcgcgttcaggcaatgatggaggaccagggcgtgtgggacgccatcgagccggcggccggggtggccgtcgacccaagaagggacaagaagtcgaagtcccatctgctgcagtccctcccggaggacttgctgatgcaggtggcaaagaagagatcggcaaaggaagtgtgggattgcttgaagacaaggttcgtgggcgcggaccgcgttcgcgaagcgcgcctgcagacgttgaagggtgaatttggtgccatggtgatggagccgggggaaactctggatcagtacgcgggccgcatcaccgcgatgagcgtgcgtcactcggtgttgggctcgacactgagtgattccgcgatagtgaagaagctgttcgacacggtgccagagaaattcatcagcctcgtcgcaggtattgagcagttttatgagattgataatatgccatttgaggaggcggtgggtcgtctcaaggcctacgaagaacgagttcgcaagaagaaggcggccgctggtggtgtcaccgccgacggtcaagtacttctcactcaggcggagtgggaggcgcgtttcaggaaggacggcagcgagtcgtcttcgccgcagaaaaacaaacctcccagcgacaggggaaaccgtgcccagggcggacgcggtcgcggcagagggcacggtggaggtggtggacgcggcagcgcgccgcggaacagtggcgctggtggctctggcggcggtggccgtgacaagagccacatcaagtgctacaactgcgaagaattcggccactactccacccagtgccctcatcccaagaagaagaaggtggaggcccatctcgcgcaaaccgacgacgcaaaccctgcattgttactggcggtgaccgaagacgagccggcgagcgggctggtcgtacacgaggagcgtgtgtggccgcagctgctgttggctgacagcggagcagccaccggggacatctggttcctggacaatggggcaagcaaccacatgacgggtgatcgtgctaagttcagagatctagacgtatcaatcaccgggagcgtcaagttcggggacgcctcaactgtgaaaattcaggggaaagggtctatcctgttctcctgcaagaatggggatcaatggctgctgcaggatgttttttatatccctagtctgtgttgcaacatggtgagcttgggccagctcacagaaacggggcacagagtggtgatggatgaagatgtgctcgaggtgttcgacaaaagtcccctgcggctggttatgcgggtgaggcgcacccctaatcggctgtaccggatcgagctgaagctagccactccggtgtgcctgctgacaaggatggatgagccagcatggctctggcatgcacggcttgggcatgtcaatttccaggcgatgaagctgttggctgacaagggcatggctggtggcatcccggcgatcacacatccaaaccagctctgtcaggcatgtctggttgcaaagcagataaggcagccgtttcccgcaacggcgaacttcagggcggaggagccgctcgagttgctccacattgatttatgtggaccgatcaccccgacaactatggccggtaatcgttactttatgctaattgttgatgatttctcacggtggatgtggatgttcgtgatcaaaacgaaggaccaggcactagaggctttcaccaagttcaagccgctggccgagaacacggccgggcggcgcatcaagacgctgagatcggatcgcggtggcgaattcctgtcgggcgaattcgcgcagttgtgcgagcaggcgggcatccagcggcatctgacggcgccatactcaccccagcaaaacggggtggtggaacgccgaaatcgttcggtaatggcgatggcacgatctctgatgaaagggatgtcagtgccgggcaggttttggggggaggcggtgcgccatgcggtgtatctcctcaaccggctaccgacgaaggcgatgggcgatcggaccccgttcgaggcatggacggggcgcaagccgcagctgggacacctgcgggtgtttgggtgcatagcacacgccaagatcacgacgcccaaccagaagaaacttgatgaccggagcgcgccgtatgtgtatctcggcgtggaagaaggcagcaaggcgcaccgcctgttcgacccgcgttgtgggcgtatccatgtaagtcgtgatgtcatttttgaagaaaatgtaccttggcaatggagtgtagtcgcaggggagcaaaactctaccgagttcacggtggaggaggatggagttgatgcaccgccggcaggagcgccggcctacccagtaccgcggtaccgggcgccatccccggcagtcccgcaatcgcctccggcaagcccggtaggggcgtcatcgtcattgccgacttcgccccagtcatcaccgagctctacaccgccttcaacacctgctaccggctctgccgggccggtggcgtcaccaggttccggcggcgaccttagaagcgatgagggtcccgtccggttcaggagtcttgaagatatcatgcgggaggcaccccgcgtggacctggtggaggatgaacacgatggggacgcgctgcttgcagagatggaggagccatcgagctaccgcgaggcagctggccagccggcatgggagaacgccatggcacaggagctgcaggcgattgagaagaattcaacatgggctctcactgcattgccggcaggacacaaacccattggcctcaagtgggtgtacaagctgaaaaagaacactgccggcgaagtaatcaagcacaaggctcgtttggttgcaaagggctatgttcagcgtcaaggggtggattttgaagaggtgttcgcgccagtggcgcggcttgacacagttcgtgtcatcctggctatcgcagctgatcggcggtgggaagtgcaccacctcgacgtcaaatcggcgttcttgaatggcgatcttgaagaagaagtgtacgtagcccagccagagggttttgtgaaacgaggagaagaacacttggtgctcaggctgagcaaggcgctctatggattgcgccaggccccgcgggcgtggaacacgcgtctcgacaagtgcttgaaagaactcggttttgcacggtgcacgcaggagcaggccgtgtatactagaggaaaggggcaagctggtgtaatcgttggtgtgtatgttgatgacttgattgtcacaggagaaaatccacatgagatagccatgttcaagcagcagatgatgggggaatttgagatgagtgatctcggtcttctctcttactatctggggatagaagtaattcagggggagaatgggattgctatcaagcaagctgcgtatgcgaagaagattctgtctcagtttggtatgcagggatgtaatcccacctcaatccccatggagccacggtcgctgctgcacaaggatgctgatggaaatccaattgatgcgaccgagtaccggcgtgtcatcgggtgcctgcgatacttgttacacaccaggccggatctgtcctacgccgttggcgtggcgagcaggttcatggagcggccgacaacgatgcatctcaaggcggtcaagatgatactcagatatctaaaggggacgctggactctggtctggtgtttgcaagcggcagtggctcgttggacatcacgggtttcactgacagtgacttggcaggtgacatggatgaccgtcggagcaccggcggcatggcgttctatgtgaacagcagcttggtgtcttggtgttctcaaaagcagaagacagtggcgctctcgtcttgcgaggcagagttcatggcggccactgcagcagcatgtcacgcgctctggcttagggcgttgctgagcgagatgatgggtactgaagcaaagcgggtgaaactttttgttgacaacaagtcggcgatcgccttgatgaagaatcctgtgttccacgggaggagcaagcatattgatacccgctaccatttcattcgtgaatgtgttgagagtgggcagattctgattgagttcgttcgttctgaggagcagcgagcagatgcaatgacaaagggactgccggcggcgaagctggcgactgcacggcacctgttgggtgtgcgtgatctcaggccacgccaagactaa

SEQ ID NO: 13990 - DNA, 4587 bp, Oryza sativa
  Clone ID: TFbOSC400181j.C1.o4.fg
atgtccgacgctcggtctcggcgttcggtcgcctcgagcactcagcgtcagcaggacgccgagctcgccgcagcagaagagcgcaggcgagcaacggctcagaccgctgcagcagcagcgagggcggccagactggcggcagcggagttggcagcagccagggcggaggcggaggcggaggcggcggaagatgcggcacgtgcggcggaggtagaggttgagaccttgcgcagcagcatcaacggctccatcgccggcgacatcaccgccgacagggagcttgaggagctggcaagaggaagggcacgggagcgggcagagcggtgggcagcagcccacctccacggcggtggcggcggcccaagggaccgcgcgcccgccgacgggaacccagacgggcgcgggcgtgccggcggcagcccggagcccacacgtggccctcacagacagcgcggctctcccctgaccggcgccatggtcaccacggcgtccagacggtggtcagggactttggtcccggcggtgcggcacatgtgggaggcagtccggtacggcgacgtcgactacgacgaggatcggcaggcactggatgccctcatcgctgcagtcccgcccgagatgcagttctcgctttcccagaagcggactgccaaggaggcctgggacgccatcactacggcacgcatcgacagcgaccgcgcccgcaagtccacactgcaggcactccgcaaggagtgggagaacctggccttcaagccaggtgaggatgttgatgactttgctctccgtctcaacactctcttgcagaaaatggtgcagtacggcgacgacacctacgacgaggagagagctgtcgagaagctcttccgctgcgtccctgagaagtacaggcagatcgctcgctcgatcgaatctctgctggacctctccacaatgtcgatcgaggaggcgttaggtcgcctcaaggtcgtcgatggtgatgagccacagcctctctcggggcccatcaccatcggcgggaagctccatctcactcgggagcagtgggaggcctctcagggtgacgggaggaagagggagtcatcttccccgacaggcggccgtaagccgcgcaaggcgcggggaggtgtccagctacggtgggcgcgaagacgtgccgagggtggcgcccgcagaggcgcccagggcgttgccaccggcaaccacaagcaggcacgagacgacgcctgccgcaactgtggcaagcttggccattgggccaaagactatcgacagccacgacgcggccaggcccacgtcgcacaggtggaagaggaagagccggctctgctcctggctcacgcaagcatcgagctacctccagcggcaccggccgcagcggctttcctccaccttgatgagccgaaggtactcgtctccctctgcaacggctccagcaacgacaaggctgatgagtggtacctcgacaccggcgccacccatcacatgaccagccgacgggagttcttcaccgagttcgactccggcgtccgaggctccgtcaagttcggggacgcctccggcgtggagatcaagggtgttggctccgtcaccttcaccgccaagtccggtgagcacaggctgctcaccggaatctactacatccccgcattgaggaattctatcatcagcgtgggacagctggatgagaacggctcacgcgtgttggtcgaggacggactcatgaggatttgggatcgccgtcgtcgccttcttgccaaggtaaccagaggcactaatcgactctacatcctcagcgcgcaggtcgcacaaccagtttgcctcgccgctcgtcgggacgacgaggcgtggcagtggcacgagcgcttcgggcacctccacttcgaggccctgaagcagctcagtgccaaggagatggtgcgaggcatgccgtgccttgaccacgtggagcagctctgcgacgtttgcgtggtgacgaagcagcggcggctcccctttccccagcagacgagcttccgagccaaggagtggctcgagctcgtgcacggggacttgtgtggcccagtgacaccggccacaccaggaggacgacgttacttcctgctgctcgtcgacgacctctcccgctacatgtgggtgatggtcctcggcagcaagggagaggctgcggacgccatcaggcatgcgcaggctgctgcagaggcggagtgcggccgcaagctgcgcgtgctgcgcaccgacaacggcggcgaattcacagcggctgaattcgcgtcgtactgcgctgatgagggcattcagcgccactacaccacgccgtacagcccgcagcagaacggcgttgtcgagcggcgcaaccagacggttgtggggatggctcgggccctcctcaagcagagggggatgccggccatcttctggggggaggcggtggtgacggcagcctacatcctcaaccgctcgcctaccaaggccctcgatggcaggacaccgtacgaggcttggcatgggcgcaagccggcggtctcccatctgcgggtcttcggctgcctcgcgttcgccaaggagcttggccacatcggcaagctcgacgacaggagcaccccaggggtgttcatcggctacgcggagggctcgaaggcctaccgtatcctcgaccccggagacacagcgtggcgagggtgggtatgggacaaggcggtggacgatggttcgactccgacgtacgacgacttcaccgtcgagtacatccacttcgagggagctgggggagtaggcagctcttcttcaccgagcgtgtctaccccagccctcgaatctccaccgactccgacaccaacacaccctcgggccacgacttcgactacgacgagctcttcgtcgacaccaccccagccagtgactccacatgctccagcaccaacagccactcctccaagcacgtctactccgacgccagctcgtgttgagcgcagcccagtggagttcgctactccgctctcccacgacagggagcgcatcgacgcgtaccacgacggcgagcagctacggtaccgtacgatggaggatcttctcggcgaccaaccggtgccaggactggtgcctcgcgacctagaggcgcagttgcaccttgcgtgcgacgacggtgagcctcggtcttttgcagaggccgagaaacacgcggcatggcgtgccgcgatgcagtcggagatggacgcggttcaggagaaccgcacctgggagcttgctgacctccctcgtggtcaccgagcgatcacccttaagtgggtgttcaagctgaagagggatgaagccggagccatcgtcaagcacaaggctcgcttggtggcacgcggtttcgtgcagcaggaggggatcgactacgatgatgccttcgctcccgtggcacggatggagtccgtgcgactccttcttgcgctggctgctcaggaaggctggggcgtccatcacatggacgtcaagtcggcgtttctgaacggcgacttgaaggaggaggtctacgtgcaccagccgccgggatttgtgatccccggcaaggagggcaaggtgctacgcctgcacaaggccctctacggcttgcggcaggcaccgagggcgtggaatgccaagttggattccacgctcaaggggatggcttcgagcaaagcccgcacgaggcggccatctactggcggggcaatggaggaaatgccttgctggatgcggaggtcgcggcgttcaagtgaggagatgaaggccaccttccagatgagtgatctggggcctctctccttctacctggggatcgaagtgcaccaggacgactccgggatcacgcttcgacagaccgcctacgccaagcgcgtcgttgagctgcctgggctcaccgattgcaacccagctctcactccgatggaggagagactgaagctgagccgcgacagcacggcggaggaggtggatgctacacagtaccggcgtcttgtggggagccttcgctacctcacccacacacggccggacttggccttctccgtcggctacgtcaatcggttcatgcagcgaccgacgacggagcaccagcaggctgtgaagaggatcatccgctacgttgcggggactctcgaccacggtctctactacccgaggtgtcctggcaaggcacacttcgtcgggtacagcgacagcgaccacgccggcgacatcgacaccagcaagagcacgagcgggattctcttcttcctcggcaagtgcctcgttagctggcagtcagtcaagcagcaggtggtggccctgtccagttgcgaggccgaagacactggaacggtggagctcagggtggatagcaagtccgctctggccctggcaaagaaccccgtttttcacgaacggagcaagcacatccgggtgaggtaccacttcatccaaagctacttggaggaagggagcatcaaggcgagctacatcaacaccaaggaccagcttgcggacttgctcaccaagcctcttgggaggatcaagttcctcgagctctactccaggatcgggatggcccaacttccccacaagacgacgcacaagacttag

SEQ ID NO: 13991 - DNA, 4410 bp, Oryza sativa
  Clone ID: TFbOSC407196j.C1.o1.np
atggcaagccgacgtcgggcgtcaactagcaatgaagaaactcagacacctgacctaaccaccctggccggagttatggccactcaaacccaacttctgcaagccattgcgaataaccaaggcaactacggcggatcgagctttggagagtttatgaggaccaagccacccacattcgccacagctgaagaacctatggatgctgaagattggttaaggatcattgagaagaagataactcttgttcgagtacgtgaggccgataaagtgatctttgcggcaaatcaattggacggaccagccggagaccggtgggacacatacaaagaagcccgagaagaagatgctggagaaccaaactgggaggaattcaccacagccttccttgacaacttcgtgcctgccgcggtgatgcggatgaagaagaatgagttcaggagactatggcaagggaataccacagtacaagagtacctgaaccgtttcactcagctggcgcgctacgcgactagagatcttgccgacgaggaggaaaagatcgataaattcattaaaggcttgaatgacgagttgcgcgggcccatgattcgacaagaccacgatagtttccagagtttaatcaataaggtcgttaggctggaaaacgaccggaaggtcgtggagcacaatcgtaaaaggaggcttaccatgaaccgcccgcctcagaccgcaccccagcgtcctaaagggacaacctcctcggcatggagaccaacagtggtgacaaccagtcgacctaccgcctccagcaatttccacaggccggttaccattcagaaccgagctcctgcaccaaatcaggccaccactggatcagtaaggccggaaagctgtttcaactgtggagagtacgggcatttcgccaacaaatgcccccatccaaacaagacacctattcgcaccggagctaatgcaacggctattcacgggactgctacccctgctgctggacgagatctattcaggactccgcagactaacaggaccgctaccggatttggacgcgggcaagtgaaccacgttcgagctgaagaggcctaggaagaccaaggcgtactgatgggtatgttttcactcaactccactccagttaaagttctcttcgattcaggagcatcgcattcatttatatctctgaaagcaagtcaacaacacaatttaaccagagttaaactaaggcaaccaatgttagtacattcacctaggggtgaagtagccgtggacacagcttgcattgacgtacctattcgccttagggatgtggtgtttccctccaaccttatggttttgataccacagacccttgatgtcatattgggtatggattggttagcaaagcatagaggagtaatcgactgtagacgtagagaagttaccctgaccacaccctggggatcggatataagagcaaccatggatcaagatcctagactaactgaatgtgccggaggtatatttaccatgctaccccaaaaaggaatgcccgtagtacagcgatttcccgatgtattcccagaagatttacctggaatgccaccagatcgtgacatagagttcatcattgacctgatacccggaactgcccccatatccaagagaccatatcggatgccagtcaatgagttggaggaactcaaaaagcaaatcagagagttgcaagagaagggatttgtacgccccagttcgtcaccttggggagccccagtgttattcgttaagaagaaggatggtagcatgaggatgtatgtggactaccgctcactgaatgaagtaactatcaagaacaagtacccactaccacagattgatgatctttttgatcaactcaaaggagctaaggtgttctctaagattaaccttcgatcaggataccaccaattgaaaattaggaccggggatatacccaagaccgcgttctcaacgcgctatggattgtatgagttcacagtaatgtcgtttgggttaaccaacgccccggcatactttatgaatcttatgaacaaagtgttcatggattacttggacaaattcgtggttgtattcatcgatgatatcctgatctactccaaagatgaggaagaacatgcggaacacttgcgattggtactcgagaaacttcggaagcataaattatatgcaaagtttagtaaatgtgagttctggttaaaagaagtcgcttttctaggccacgtgatctcagccggtggagtagcagtggaccctgctaaagtggaggccgttacggaatggaaggcacccaaatctgtgactgaaattcagagttttctaggcttggccggatactatcggaggttcattgaggggttctctaagatagcccgacctatgacacaactactcaagaaagaaaagaagtttgtgtggtcagaacagtgtcaaggaagctttgagcagctcaaagaaaagctgaccttggcacctattctagttctctctgacaataggaaagactttgttatatattgtgatgcatcaaggcaaggactaggaggagtactgatgcaggacggaaaggttgtggcctatgcgtcgcgacaattgtgaccacatgaggaaaactaccctatccatgacctagaacttgcagctgtggtccatgcgctaaagatttggagacattatctgattggaaatcattgcgatatctacactgaccacaagagtttgaagtatattttcacccagtcagatctcaacttgaggcaaaggcgatggctggaattaatcaaggattatgatctagaggttcactatcacctaggcaaagcaaacgttgtggccgacgctctgagtcgtaagaaccattgcaatcatctaagaatggaagggatggcccctgaacttaggaaggaaatagcccagctgaacctacatatagtatctcgtggacagataaacaccctggacattcaacctcttttgagaacccagatagaggaagcctagaaggacaacggtgagatccaggaggtgaaggagcgcatagccactggtcgtgcgaaagaattctcaatggatgagaaggaaatactgtggtataagaagagaatctacgtacccgaacagggtggactgaggggattaattttaaaggaagctcacgaatcggcatattcattgcaccccggaagtacgaagatgtaccaagatctgaaggaaggatactggtggcccaacatgaagagagatgtggcagaatacgtagcactctgtgatgtgtgccaaaaggtgaaggctgagcatcagcgaccggtaggtttgttgcaaccccttaggattcccgagtggaaatgggatgagataggtatggattttgttgttggattgcccaagaccgcaacaggatatgattccatctaggtgatcgtggatcgactcaccaagacagcgagattcatccccgtcaagacaaattatagcagtgccaagctagccgagttatacatgaccaggatagtatgtcttcatggtgtacctaagaggattatatctgatcgaggcacacagtttacctcgcatttctgggagaaagtacatgaagccctaggaagttaccttgtgtttagcacagcttatcacccacaaacagatggccagacagagagaaccaaccaggttctagaggacatgttgagagcttgtgcattggattttagcaaagactgggagagatgtttgccctacgccgaattctcctacaacaacagcttccaagcgagcctaaagatgtcgtcaaatgaggcattatttggtcgacgatgtcgcaccccattaatgtggaccgagacaggtgaacaggtggtatttggacctgacattatcaaagaagctgaagaaaaggttcgcctgattcgagaccgtctaaaagtagcacaatcacgacagaagagttacgccgacacccgaagaagaaacctggaatttaaggaaggagattacgtttatctaaaggtttctccgatgaggggaacgaaaaggtttaaggtcaaaggaaaactagcaccaagatatgtgggaccttttcaaatcatcgctagacgaggagaagttgcctaccagttacagctacccgaaaatatcgccgatgtgcacccagtcttccatgtgtctcagttaaagaagtgcttacgagtaccggaggaacaagctccgttggaggaaattcatattagcaatgatctcacgtatccagaacacccagtctagatattggatgaagcagaaaagaggactaggaccaaagtgtggcatatgtacaaggtacaatggagtaatcatactgaggatgaagccacctgggaaagcgaagaattcttgaggacggaatacccgcatctattcgaaacctga

SEQ ID NO: 13992 - DNA, 3015 bp, Oryza sativa
  Clone ID: TFbOSC101460j.C1.o3.fg
atggccccatccaactcttacgatgatgctatgaagcctgagaggttcaatggagccgcagcccggatgatgtactggctcactgctttggatttgttttcggtcatcactgaccaggagccgcagccaggcgagttctttcctggggctattccatatgctgatttttaccagaccaggaactttaattgtgtgggtagaattttgagcatgctttccgataaattctatgatatctacatgcatcatacctctgctcgtgtattgtgggaaactctagagaagaagtacagtgttccagatgctggaaaagatctgtacttggttgaaaaataccatgacttcaagatgaccaatggaaagtctatggtagagcaaacccaggaactccagcttctagtgggggagctcaaccatagtaagattgctctccctgacaagtttcaggtgggaatggtgattgcaaagctcccaccctcgtggagagattttgctactgctctcaaacatcgcagggaggaaatgactatggatgacctagttgcttccctggacgttgaagagaaagcccgtgcaaaggatgctccattggttaatgaagattataactctagagtgaatctcactgatacacatcagagaaggaacaagaagaacccaaaagagaacaacagtggcatgaagccaagaggaaagattgacaaaggcaacggcaagaaaaatggcaaaggtccgatgagttgcttcgagtgcggcaagcctggccactttgctaggaattgtcgttacaagaaaagaaatgagaaagtccagaaggacaagtctgatgatcagactgatgccaaggtcaatatggttattgacgaagctgaagttgcaagaacaaaagatgaagcttttgagcatttcaaaatttttaaagcagaggctgagaatcagcttgatttgaaaattaaaattttgaggtctgacagaggaggagaatacttatcaattgaattctctaagtttcatcaagaacatggaatcatccatgaaaccacccctccgtattcaccccaatcaaatggggtagttgaaaggaagaatcgtactctcactgatttagtgaatgcaatgctcagcaattcaggtcttccaaacaatatgtggggtgaagctctgtacacagcatgctttgtgctgaatcgtgttcctgcaaaaggaacagaagtaaatatacctgttgtcaagaagagaaagctcggacctaagaccgtcgattgcgtgttcataggatatgcacagaacagtccagcttatcgtttcctggtagttaaatctgaaactacagaagttcgtgaaaatactgtgatggaatcatgtgacgcgacctttttcgaagatacatttccactgaaggtaaaatctccaagttctgaacctatttctgttgaacctagaattagcattttgtcagatgattcccttaatttaaggaggagcaagagatcacgaactgagaaaatgtttggtgaagattttatcatataccttgtcaatgatgtgcccagtactctgtcagaagcatttgcatctgctgaagctgcatactggaaggaagcagtgcaaagtgagatggactctatcctctctaatgacacttgggaaatcacacacttgcctcaaggctgtagggccataggctgcaagtggattttcaaaaagaaactgaaacctgatggaactattgacaagttcaaagccaggttggtcgcaaaggggtacacacaaagacagggagaagattactttgatacattttctccagtggctcgcatgcctacaattcgtgctcttgtagcactggctgctgcatatggctataaaatccatcaaatggatgttaaaaccgccttcctcaacggagagttagaggaagaaatatacatgcagcaaccggatggtttcgtcattcctggacaagaagataaagtgtgtaaacttgagaagtccttgtatggactgaaacaggccccaatgcaatggcatgaaaaattcgacaaaacattgatctctgctggattcactgttaatgatgctgacaaatgtgtatattccaggtttgatggagatatagatttgggtgaagccaaagtaattctgaacattaaaattcaggaaaaggacaaaggttttgaactcaatcagtcacactatgtggagaagcttttgcatcgttttggtcattttaatagcaaatctgcagctactccctatgatccttgtttaaaattgcataaaaatcaaggtcatggtcttgaccaagtgaagtttgcacaaataattgggtctttaatgtatcttgcaaatactactcgtcctaacatttcatatgcagttagcaggctgagcaggtattcgagcaaacctgattcaaatcattggcatgctctagaatgtgttctaaggtatttgaaagggaccataaatcaaggtttgttttactctggtttcccagctgtgctggagggttatagtgatgcaaattggatcacttattctaatgaaatgaaatcaacgagtggttttgtttttactcttggtggagctgccatatcgtggaagtctgcaaaacagactatattaacacgatccaccatggaagcggaactagtagcattggagactgcttgttgcgaagctgaatggcttagggaactattgatggatattccaatagtagaaaaaccaattcctgcagtgctcttgtattgtgacaatcaagctgtgatagctaaagttacaagcaagaaagaaaacatgaaatcttctagacatgtgaagaggagactaaagtctgttagagacttgaggaatactggtgtagttacatttgactatatcaagacagaaaagaatttggctgatccattcacaaaaggattagcacgaaagccaatactagagttgtcgaaagggatggggctgaggcctgccaatgaattattgacagtggcaacccaacctgtttga

SEQ ID NO: 13993 - DNA, 4203 bp, Oryza sativa
  Clone ID: TFbOSC400798j.C1.o12.fg
atggcgacggcgacaggcggcgatggcgacgtcggcgcggcggcaggcgacggcgcgacgggacgactgagtctaaccttgagctctatgatgtacccgaacgtggaggaatgcaaaggatggacaaggttgtcaccacctgccgcctacctcactttccttggagcacacaacaaacgaagagcaaggtttagggcttggacacgtgatcgtgcactagaagaagcacttatgccaaggcgtcgcacgagctccccgcgctgttggtcggtgtcgccgagcgagcgcactcctggaggttccggcggccgcgcttcgggcagcggcgggaaggacagcgggctggttatacaccgcgtggtcaaggagtcaggatcgtctgcgaactatccggttctcacgaagacgaattacaatgactgggcattgctcatgaagatcaagttgcaggcacgttgcctgtgggacgctgtcgaacgtggccgcgctgccgttgagctgcacgaggatcagatggcgcttgatgcgatctatagtgcggttccacccgagatgatctcgatcttggcgacgaaggcatcggcgaaggaggcatgggactgcatcaagacaatgcgcgtcggtgacaaccgcatccgcaaggccagcgcacaacgggtgcgtacggagtacgagaggatcgcattccgggacggcgagtcggtggaggagttcgccatgtggcttactagtgtcgtcaaccaactcgccacccacggtgatcccgagcccgatgacaaggttgtcgagaagtatctgcacgtcgcccgaccgaggtttagccaactggcggccgaggattaccagaccccgccatcctcccaaaacaccgatggcaagctctacctaaccgaagaagaatggctggagcaccacaaaaaggagcaggaggcgaaacgctctggcgccggttccagcggacgtaacaagcgccgcggcggaaaggggtgcatcggcggtggctcggatgggtccacctcctcgccggcacgcagggatgacaaatgtcgtaactgcggcaagctcagccattgggctaaggagtgccggagcaagcctaagcacgaagaccaggcccatgtggcccaagacgacaagcccacgctcatgctcctgactgggggctacgtcgaaaccgcaggctccatgttgccgccaccaccgccacgcgcgacgccggcgcctcagcgcgtctgcgttgagctcgtcgagaagaaggtgttcgctgggttagatcatgaagcagaccgcgaccagcgcagctggatcatggactccggtgtgtcaaaccatatggcgggttgccgagcggccttctccgacctcgacactggcatcaccggcaacgtttggcttggggatggctcgatcatccctatcgaggggtgcggcatggtgttgttcgcctgcaagaatggagaacaccgcaccctcgccaacacgtactttctgccgcggctcgccgccaacattgtcagcatcggccaactcgacgaaaccagcttccaagtattggttgaggatggcatcatgcgcgtccgcgacaagcagcggcgcctactcgcccgaatccctcggagcccagggcgcttgtacgtgctcgacatcatccttgcgcggccagtttgcctgacagcgcgcgccggcgaagacgcgtggcattggcacgctcggttcgggcacatcaactttactgtgctgaagaaaatgagtagggagaccctggtacgtggattgccattgttgacgcaggtcgatcaggtttgcgaggcgtgtctcgccgggaagcatcgacgggcgccgttcccacgacgggcgctgtctcgctctagcaagcccctgcaactcctccacggcgatctctgcggcccgatctcaccagtgacgccgagtgggaaccgctacttccttctcctcatcgatgactacagccgcttcatgtggatcaagctccttccctcgaaggacgccgaaccggccaccatcaagcagatacaagcggctgccgagaggaagtcggggaagcggcttcgtgcactacgcatgcaccgaggaggcgagtacaccgccggacacttcaacgagtattgggccgagctcggactgcgtcgagaactcacagcgctgtattcgccacagcagaacggcgtcgtcgagcgccggaaccaatcggtggtgggcacggcgaggagcatgttaaaggcgaaagggctcccaggtcatcatcgaagagaatcggcgaaaaactccatacgagctatggaacggcggttcgccggcggttcatcatcttcgtacatttgggtgtgtgggccatgtgaagaactcgatgacaggagtaaacccatgattttcgtgggctacgagccaggatcaaaggcgtactgcgcctacaaccccgtgacgcgacaggtgcacatctcccgcaatatcgtgttcgacgaggaggctcagtggaggtgggacggccaggctgaaacgggcgtcgacaccgacttcgtcatcgagtacaccaccgtgcagcagtcagatgcggcgccaccttccccagctgcggcaccaccatcgccaggctcgccgttccgcaccatcgacaacgtgcttggcccagcaacaccacaaggacaggcggtacgggagttcgatgaggatctcctgatggtctctgcggaagagccggcgtcattcgatgaagcagagcaacatcagtgctggcgacatgcaatgatcgaggagatcaagtccattgaagccaacaacacttggcgtctcgccgacgggccgtcgcgtcagtgcccgattggactcaaatgggtcttcaagacgaagaaagacgttgctggcaacatcaccaggtacaaggcgtatctcgtggcgaaaggctacgtgcagcggcaggggattgacttcgacgaggtgttcgcgctggtggcgcggctcgagtctgttcgactgctgttggcacacgcggccccgcgcgcgtggtatgctaagctcgacgcgtccctgctggctctaggcttccatcaaagctcgtcagagcacgccgtgtacttccgagccacgggcgcacgccggctggtcgtcggcgtgtacgtcgatgatctcgtcatcaccggtggtgactccgccgagctcgagcagttcaaggacgagatgaagggcacgttccagatgagcgatctcgggttgttgaaatattacctcggattggaggtgaatcagactgaagatggcatcactgtgtgccaacgggcatacgctgagaagatattggagatggctgggatgagcagcaccaatcccagcctcacccccatggaatcacgcctcaagctcagtaagtcgagtgccgcaccagctgttgatgcaactgattataggcggatcgtgggatcactgcgatacttggtaaattcgcggtcagatttggcgttcttggtgggatatgtcagccggtttatggagaagcccaccaccgagcacatggcagctgtgaagcgtgtgttgaggtacattgctggcactaccaactatggctgtcaataccgaaggaagaaggatgccgtgtgcctcgttggctacagcgacagtgatcttgcaggcgatgttgatagccgtaagagcacaacaggagttctcttctttctcggggataatttgatcacctggcagtctcagaagcaaaaggtcgtcgctctatcgtcctatgaagcggagtacattgcggcgacgactgttgcgtgccaaggtgtgtggctggcgcttctccttgctgagctcaggggagaagaagggagcgccatcacactgaaggttgacaaccagtctgcaattttgcttagcaagaacttgtgtttcacaatcgtagcaaacatattgacactaggtatcatttcattcgggagtgtgtcgaggaagcgcatgagccccaacgtgtggaagccaattggaatcgaaaacccggatacggaaatgaaatcgaatattatcgaatacagatacagaaggaatacgaaactgaacgaatatggcaatgaagatttgctggagagagaaagcgctatctctgatctcgccgggcacaaactcgaggaggaagactaccctgttgtcgactatgagtcagaccttcagaccgccatatcgaaaacagttagatag

SEQ ID NO: 13994 - DNA, 3090 bp, Oryza sativa
  Clone ID: TFbOSC410421j.C1.o8.fg
atggccccatccaactcttacgatgatgctatgaagcctgagaggttcaatggagccgcagcccggatgatgtactggctcactgctttggatttgttttcggtcatcactgaccaggagccgcagccaggcgagttctttcctggggctattccatatgctgatttttaccagaccaggaactttaattgtgtgggtagaattttgagcatgctttccgataaattctatgatatctacatgcatcatacctctgctcgtgtattgtgggaaactctagagaagaagtacagtgttccagatgctggaaaagatctgtacttggttgaaaaataccatgacttcaagatgaccaatggaaagtctatggtagagcaaacccaggaactccagcttctagtgggggagctcaaccatagtaagattgctctccctgacaagtttcaggtgggaatggtgattgcaaagctcccaccctcgtggagagattttgctactgctctcaaacatcgcagggaggaaatgactatggatgacctagttgcttccctggacgttgaagagaaagcccgtgcaaaggatgctccattggttaatgaagattataactctagagtgaatctcactgatacacatcagagaaggaacaagaagaacccaaaagagaacaacagtggcatgaagccaagaggaaagattgacaaaggcaacggcaagaaaaatggcaaaggtccgatgagttgcttcgagtgcggcaagcctggccactttgctaggaattgtcgttacaagaaaagaaatgagaaagtccagaaggacaagtctgatgatcagactgatgccaaggtcaatatggttattgacgaagctgaagttgcaagaacaaaagatgaagcttttgagcatttcaaaatttttaaagcagaggctgagaatcagcttgatttgaaaattaaaattttgaggtctgacagaggaggagaatacttatcaattgaattctctaagtttcatcaagaacatggaatcatccatgaaaccacccctccgtattcaccccaatcaaatggggtagttgaaaggaagaatcgtactctcactgatttagtgaatgcaatgctcagcaattcaggtcttccaaacaatatgtggggtgaagctctgtacacagcatgctttgtgctgaatcgtgttcctgcaaaaggaacagaagttactccatatgaactatggaaaggcagaaaaccaaatctgaattttctgaaagtgtgggggtgccttgccaaggtaaatatacctgttgtcaagaagagaaagctcggacctaagaccgtcgattgcgtgttcataggatatgcacagaacagtccagcttatcgtttcctggtagttaaatctgaaactacagaagttcgtgaaaatactgtgatggaatcatgtgacgcgacctttttcgaagatacatttccactgaaggtaaaatctccaagttctgaacctatttctgttgaacctagaattagcattttgtcagatgattcccttaatttaaggaggagcaagagatcacgaactgagaaaatgtttggtgaagattttatcatataccttgtcaatgatgtgcccagtactctgtcagaagcatttgcatctgctgaagctgcatactggaaggaagcagtgcaaagtgagatggactctatcctctctaatgacacttgggaaatcacacacttgcctcaaggctgtagggccataggctgcaagtggattttcaaaaagaaactgaaacctgatggaactattgacaagttcaaagccaggttggtcgcaaaggggtacacacaaagacagggagaagattactttgatacattttctccagtggctcgcatgcctacaattcgtgctcttgtagcactggctgctgcatatggctataaaatccatcaaatggatgttaaaaccgccttcctcaacggagagttagaggaagaaatatacatgcagcaaccggatggtttcgtcattcctggacaagaagataaagtgtgtaaacttgagaagtccttgtatggactgaaacaggccccaatgcaatggcatgaaaaattcgacaaaacattgatctctgctggattcactgttaatgatgctgacaaatgtgtatattccaggtttgatggagatatagatttgggtgaagccaaagtaattctgaacattaaaattcaggaaaaggacaaaggttttgaactcaatcagtcacactatgtggagaagcttttgcatcgttttggtcattttaatagcaaatctgcagctactccctatgatccttgtttaaaattgcataaaaatcaaggtcatggtcttgaccaagtgaagtttgcacaaataattgggtctttaatgtatcttgcaaatactactcgtcctaacatttcatatgcagttagcaggctgagcaggtattcgagcaaacctgattcaaatcattggcatgctctagaatgtgttctaaggtatttgaaagggaccataaatcaaggtttgttttactctggtttcccagctgtgctggagggttatagtgatgcaaattggatcacttattctaatgaaatgaaatcaacgagtggttttgtttttactcttggtggagctgccatatcgtggaagtctgcaaaacagactatattaacacgatccaccatggaagcggaactagtagcattggagactgcttgttgcgaagctgaatggcttagggaactattgatggatattccaatagtagaaaaaccaattcctgcagtgctcttgtattgtgacaatcaagctgtgatagctaaagttacaagcaagaaagaaaacatgaaatcttctagacatgtgaagaggagactaaagtctgttagagacttgaggaatactggtgtagttacatttgactatatcaagacagaaaagaatttggctgatccattcacaaaaggattagcacgaaagccaatactagagttgtcgaaagggatggggctgaggcctgccaatgaattattgacagtggcaacccaacctgtttga

SEQ ID NO: 13995 - DNA, 3228 bp, Oryza sativa
  Clone ID: TFbOSC900212j.C1.o7.fg
atggatggaggaggtggtcacactcacgccagggcgcgctatctggtggagaagaaagcctcatgtggagtaacagtttccatggccccatccaactcttacgatgatgctatgaagcctgagaagttcaatggtaatcactttgagcgctggcaaacccggataatgtactggctcactgctttggatttgttttcggtcatcactgaccaggagccgcagccaggcgagttctttcctagggctgtgccatatgctgatttttaccagaccaggaactttaattgtgtgggtagaattttgagcatgctttccgataaattctatgatatctacatgcatcatacctctgctcgtgtactgcgggaaactctagagaagaagtacagtgttccagatgctggaaaagatctgtacttggttgaaaaataccatgacttcaagatgaccaatggaaagtctgtggtagagcaaacccaggaactccagcttctagtgggggagctcaaccatagtaagattgctctccctgacaagtttcaggtgggaatggtgattgcaaagctcccaccctcgtggagagattttgctactgctctcaaacatcgcatggaggaaatgactatggatgacctagttgcttccctggacgttgaagagaaagcccgtgcaaaggatgctccattggttaatgaagatgataactctagagtgaatctcactgatacacatcagagaaggaacaagaagaacccaaaagagaacaacagtggcatgaagccaagaggaaagatcgacaaaggcaacggcaagaaaaatggcaaaggtccgatgagttgcttcgagtgcggcaagcctggccactttgctaggaattgtcgttacaagaaaagaaatgagaaagtccagaaggacaagtctgatgatcagactgatgccaaggtcaatatggttattgacgaagctaaagttgcaaggtgcgtttcgaacatgtctcaaaaatttgataagtgtcaacctgtagattggtgggttgacactggagcaactattcatgaacagcaaggaggccgttctgtgattggtcttgagagcaagtccagggtgctgggtagtggtcgagtggatctgaagctttcttcaagaaaagttctgaccctacacaatgtgctcttcgtaccagcagcgaaagcaaatttgattagtatgaatggaattttgactaaaggaggtagacggtacttcattacttttattgatgattgctctaagtactgctatgtttatctcttaagaacaaaagatgaagcttttgagcatttcaaaatttttaaagcagaggctgagaatcagcttgatttgaaaattaaaattttgaggtctgacagaggaggagaatacttatcaattgaattctctaagtttcatcaagaacatggaatcatccatgaaaccacccctccgtattcaccccaatcaaatggggtagctgaaaggaagaatcgtactctcactaatttagtgaatgcaatgctcagcaattcaggtcttccaaactatatgtggggtgaagctctgtacacagcatgttttgtgctgaatcgtgttcctgcaaaaggaacagaagttactccatatgaactatggaaaggcagaaaaccaaatctgaattttctgaaagtgtgggggtgccttgccaaggtaaatatacctgttgtcaagaagagaaagctcggacctaagaccgtcgattgcgtgttcataggatatgcacagaacagtctagcttatcgtttcctggtagttaaatctgaaactacagaagttcgtgaaaatactgtgatggaatcacgtgacacgacctttttcgaagatacatttccactaaaggtaaaatctccaagttctgaacctatttctgttgaacctagaattagcatttcgtcagatgattcccttaatttaaggaggagcaagagatcacgaactgagaaaacgtttggtgatgattttatcatataccttgtcgatgatgtgcccagtactctgtcagaagcatttgcatctgctgaagctgcatactggaaggaagcagtgcaaagtgagatggactctatcctctctaatggcacttgggaaatcacacacttgcctcaaggctatagggccataggctatagggccataggctgcaagaaactgaaacctgatggaactattgacaagttcaaagccaggttggtcgcaaaggggtacacacaaagacagggagaagattactttgatacattttctccagtggctcacatgcctacaattcgtgctcttgtagcactggctgctgcatatggctataaaatccatcaaatggatgttaaaaccgccttcctcaacggagagttagaggaagaaatatacatgcagcaaccggatggtttcgtcattcctggacaagaagataaagtgtgtaaacttgagaagtccttgtatggactgaaacaggccccaatgcaatggcatgaaaaattcgacaaaacattgatctctgctggattcactgttaatgatgctgacaaatgtgtatattccaggtttgatggagatataggtgtcatactctgtctttatgttgatgatattttaatccttggtacaaatctgaatatcatctctgaaatcaaaagctatttatcaaataaatttgatatgaaagatttgggtgaagccaaagtaattctgaacattaaaattcagaaaaaggacaaaggttttgaactcaatcagtcacactatgtggagaagcttttgcatcgttttggtcattttaatagcaaatctacagctactccctatgatccttgtttaaaattgcataaaaatcaaggtcagggtcttgaccaagtgaagtttgcacaaataattgggtctttaatgtatcttgcaaatactactcgtcctaacatttcatatgcagttagcaggctgagcaggtattcgagcaaacctgattcaaatcattggcatgctctagaacgtgttctaaggtatttgaaagggaccatgaatcaaggtttgttttactctggtttcccagctgtgctggagggttatagtgatgcaaattggatcactgattctgatgaaatgaaatcaacgagtggttttgtttttactcttggtggagctgccatatcgtggaagtctgcaaaacagactatattaacatga

SEQ ID NO: 13996 - DNA, 4650 bp, Oryza sativa
  Clone ID: TFbOSC401668j.C1.o29.fg
atgtccgacgctcggtctcggcgtttggtcgcctcgagcactcggcgtcagcaggacgccgagctcgccgcagcagaagagcgcaggcaagcaacggctcagaccgctgcagcagcagcgagggtggccagactggcggcagcggagttggcagcagccagggcggaggcggaggcggaggcggcggaagatgcggcacgtgcggcggaggtagaggttgagaccttgcgcagcagcatcaacggctccattgccggtgacatcaccgccgacagggagcttgaggagctggcaagagaaagggcacgggagcgagcagagcggtgggcagcagcccacctccacggcggcggcggcggcccaagggaccgcgcgcccgccgacgggaacccagacgggcgcaggcgtgccggcggcagcccggagctctcacgcggccctcgcaggcagcacggctctctctcccctgaccggcgccatggtcaccacggtgtccagacggtggttagggactttggtcccggcggtgggtggcctaccctcaccaaaaccaactacatcgagtgggccgcggtgatgagggtgaggctccaggtgcggcacatgtgggaggcagtccggtacggtgacgtcgactacgacgaggatcggcgggcactggatgccctcatcgctgcagtcccgcccgagatgcagttctcgctttcccagaagcggactgccaaggaggcctgggacgccatcgctgcggcacgcatcggcagcgaccgcgcccgcaagtccacactgcaggcactccgcaaggagtgggagaacctggccttcaagccaggtgagaatgttgatgactttgctctccgtctcaacactctcttgcagaaaatggtgcagtacggcgacgacacctacgacgaggagagagctgtcgagaagctcttccgctgcgtccctgagaagtacagacagatcgctcgctcgatcgaatctctgctggacctctccacgatgtcgatcgaggaggcgttaggtcgcctcaaggtcgtcgatggtgatgagccacagcctctctcggggcccatcaccatcggcgggaagctccatctcactagggagcagtgggaggcctctcagggtgacgggaggaagggggagtcatcttccccgacaggcggccgtaagccgcgcaaggcgcggggaggtgtccagctacggtgggcgcgaagacgtgccgagggtggcgcccgcagaggcgcccagggcgttgccaccggcaaccacaagccggcacgagacgacgcctgccacaactgtggcaagcttggccattgggccaaagactatcgacagccacgacgcggccaggcccacgtcgcacgggtggaggagaaagagccggctctgctcctggctcacgcaagcatcgagctacctcaagcggcaccggccgcagcggctttcctccaccttgatgagccgaaggtactcgtctccctctgcaacggctccagcaacgacaaggctgatgggtggtaccttgacaccggcgccacccatcacatgaccggccgacgggagttcttcaccgagttcgactccagcgtccgaggctccgtcaagttcggggacgcctccggcgtggagatcaagggtgttggctccgtcaccttcaccgccaagtccggtgagcacaggctgctcaccggagtctactacatccccgcgttgaggaattctatcatcagcgtgggacagctggatgagaacggctcacgcgtgttggtcgaggacggactcatgaggatttgggatcgccgtcgtcgccttcttgccaagataaccagaggcactaatcgactctacatcctcagcgcgcaggtcgcacaaccagtttgcctcgccgctcgtcgggacgacgaggcgtggcagtggcacgagcgcttcgggcacctccacttcgaggccctgaagcagctcagtgccaaggagatggtgcgaggcatgccgtgccttgaccacgtggagcagctctgcgacgtctgcgtggtgacgaagcagcggcggctcccctttccccagcagacgagcttccgagccaaggagcggctcgagctcgtgcacggggacttgtgtggcccagtgacaccggccacaccaggaggacgaccaagggaggctgcggacgccatcaggcatgcgcaggctgctgcagaggcggagtgcggccgcaagctgcgcgtgctgcgcactgacaacggcggcgaattcacggcggctgaattcgcgtcgtactgcgctgatgagggcattcagcgccactacaccgcgccgtatagcccacagcagaacggcgtcgtcgagcggcgcaaccagacggttgtggggatggctcgggctcttctcaagcaaagggggatgccggccatcttctggggggaggcggtggtgacagccgtctacatcctcaatcgctcgcctaccaaggccctcgatggcaggacaccgtacgaggcttggcatgggcacaagccggcggtctcccacctacgggtcttcggctgcctcgcgttcgccaaggagcttggccacatcggtaagctcgacgacaggagcaccccaggggtgttcatcggctacgcggagggctcgaaggcctaccgcatcctcgacccggagacacagcgtgtgcgcacagtgcgcgacgtagtgttcgacgaagggcgagggtgggtatgggacaaggcggtggatgatggttcgactccgacgtacgacgacttcaccatcgagtacgtccacttcgagggagctgggggagtaggcagctcttcttcaccaagcgtgtctaccccaatccccgagcctccaccgactccaacaccaacacaccctcgggccacgacttcgactacgacgagctcttcgtcgacaccaccccagccggtgtccccacgcgctccagcaccaatagccactcctccgggcacgtctactccgacgccagctcgtgttgagcgcagcccggtggagttcgctactccgctctcccacgacggggagcgcatcgacgcgtatcacgacggcgagcagctacggtaccgtacgatggaggatcttctcggcgaccagccggtgccgggactggtgcctcgcgacctagaggcgcagttgcaccttgcgtgcgacgacggtgagcctcggttttttgcagaggccgagaaacacgcggcatggcgtgctgcgatgcagtcggagatggacgcggttcaggagaaccgcacctgggagcttgctgacctccctcgtggtcaccgcgcaatcacccttaagtgggtgttcaagctgaagagggatgaagccggagccatcgtcaagcacaagactcgcttggtggcacgcggtttcgtgcagcaggaggggatcgactacgacgatgccttcgctcccgtggcacggatggagtccgtgcgactccttcttgcgctggctgctcaggaaggctggggcgtccatcacatggacgtcaagtcggcgtttctaaacggcgacttgaaggaggaggtctacgtgcaccagccgccgggatttgtgatccccggcaaggagggcaaggtgctacgcctgcacaaggccctctacggcttgcggcaggcaccgagggcgtggaatgccaagttggattccacgctcaaggggatgggcttcgagcaaagcccgcacgaggcggccatctaccggcggggcaatggaggaaatgccttgctggtgggtgtctacgtcgacgacttggtgatcaccggcaccaaggatgcggaggtcgcggcgttcaaggaggagatgaaggccaccttccagatgagtgatctggggcctctctccttctacctggggatcgaagtgcaccaggacaactccgggatcacgcttcgacagaccgcctacgccaagcgcgtcgttgagctggctgggctcaccgattgcaacccagctcactccgatggaggagagactgaagctgagccgcgacagcacgacggaggaggtggatgctacacacgaccgacgacggagcaccagcaggctgtgaagaggatcatccgctacgttgcggggactctcgaccacggtctctactacccgaggtgtcctggcaaggcacacttcgtcgggtacagcgacagcgaccacgccggcgacatcgacaccagcaagagcacgagcgggattctcttcttcctcggcgagtgcctcgttagctggcagtcggtcaagcagcaggtggtggccctgtccagctgcgaggccgagtacatggcggcatccgccgcttcgacccaggcgctctggcttgctcgactgcttggtgatctcctcggcagagacactggagcagtagagctcagggtggacagcaagtccgctctggccctggcaaagaaccccgtttttcacgaacggagcaagcacatctgggtgaggtaccacttcattcaaagctacttggaggaagggagcatcaaggcgagctacatcaacaccaaggaccagcttgcggacttgctcaccaagcctcttgggaggatcaagttcctcgagctctgctccaggatcgggatggcccaactttcccacaagacgacgcacaagacttag

SEQ ID NO: 13997 - DNA, 603 bp, Oryza sativa
  Clone ID: TFbOSC30776j.C1.o1.fg
atggctgacaaccgttttgtagtcgaacaggctcatgagatacaaaccatagctaaggaactcgaactccttaagtgtgtcttacccgacaaatttgtggccgggtgcattattgcgaaactacctccatcatggagaagtttcggtactgcattcaaacacaagagacaggaatactccattgaggggttgatagcatctcttgatgttgaggagaaagctcgggaaaaagacgccgcgtctaaggatgatgctcaacagaccaccaacttcaagaggcagaagaagaacaacaacaatcctaaccaggatgagaggatttgctttgtgtgtgggcaacctggtcatctggctaggaagtatccacagcgcaaggggatgaaggcacctgcagggcagacttctaagtctgctaatgtgaccattggcaacactggagatggaagcgggtatggtcgcacggggttccaccttcctaatggcgaatgggtcacatgcttctgttcatggtgttggcacggtagatgtgaagtttacttcgggaaagatcgtgcagctgaggaacgtgcagcatgtcccttctatcaacaggaatcttgttag

SEQ ID NO: 13998 - DNA, 1671 bp, Oryza sativa
  Clone ID: TFbOSC401836j.C1.o4.fg
atggctgacaaccgttttgtagtcgaacaggctcatgagatacaaaccatagctaaggaactcgaactccttaagtgtgtcttacccgacaaatttgtggccgggtgcattattgcgaaactacctccatcatggagaagtttcggtactgcattcaaacacaagagacaggaatactccattgaggggttgatagcatctcttgatgttgaggagaaagctcgggaaaaagacgccgcgtctaaggatgatgctcaacagaccaccaacttcaagaggcagaagaagaacaacaacaatcctaaccaggatgagaggatttgctttgtgtgtgggcaacctggtcatctggctaggaagtatccacagcgcaaggggatgaaggcacctgcagggcagacttctaagtctgctaatgtgaccattggcaacactggagatggaagcgggtatggtaatttacctactgttttttcagttaatcagtctactaattggtgggttgatactggggccaatgtcgcacggggttccaccttcctaatggcgaatgggtcacatgcttctgttcatggtgttggcacggtagatgtgaagtttacttcgggaaagatcgtgcagctgaggaacgtgcagcatgtcccttctatcaacaggaatcttgttagtggctcccgtctaactagagatggatttaagttggtttttgagtctaataaagtagtcgtgtctaaacatggatattttattagtaaaggttatgagtgcggaggcctgttccgcttttccctttctgatttctgcaataagtctgtgaacaatatttgtggaagtgtggatgatgaggctaatgtttggcactcacgtttatgtcatattaattttggcttgatgtctcggctttccagcatgtgtttaatttctaagttttccattgtcaaaggttctaagtgccatagttgtgtgcaatcgaagcaacctcgcaagcctcacaaggctgccgaggagagaaacttggcaccactagaactcctacattcagatctttgtgaaatgaatgaggtgttgacgaagggtggaaaacaatatttcatgacgttaattgatgatgctactagattttgctatgtgtacttgttgaaaacgaaagacgaggctctagactattttaaaatttataaggcagaagttgaaaatcaacttgacagaaagataaaaaggcttaggtctgatcgtggtggagagtttttctcgaacgagtttgacttattctgtgacgaacatgacatcatacatgagaggactcctccctattctcccgagtctaatgggattgctgaaaggaagaaccgcacactgactgacttggtgaatgccatgttggacaccgcgggacaacctaaggcatggtggggggaggcattgttgaccacgaatcatgtgttaaacagagttcctaacagaaataagaacaaaacaccatatgagatatggattgggagaaaaccatcactttcttatttgcgcacatggggtgttgttggtcgctctgaagttaagctcgactacccatttcgcaatgcggccgataacgtctttgtttctcatgacttcgccaagagggaaggcggagacaactgtgaccctgtgggcttggaagtggtggtgtag

SEQ ID NO: 13999 - DNA, 3513 bp, Oryza sativa
  Clone ID: TFbOSC23905j.C1.o5.gm
atgtcggtggtggagcacggcacatcggccatggtgctcccagtcccatatatgtcagtctcagggacgtctgcggcgccggaggaggaaaaggacgacccctgcagtgccggaggaagacgcgggtcgctgctcaccaggcaaaaggagatgcgatatgatgttcgtcgaattgagccgacggagagcttgaaagacacggctgctcgtggagccaagccgcacgggcgggcgatcaggtttttggggagcgcaaggcgcgactactcactgttcgtcaacatctacttcatcttcaccaacatgtcgaacactggagacaaggagaaggagactcccgtcaacaccaacggaggcaatactgcctcaaactccagcggaggaccattcttggggtataaccttattacattatttcaattagaatgcttctatgtttcacggggcaaacgaagtgaaccacctctttctcctgaggaagaggctaagttcgaggcttcggattgcctgttccgtggagcattgatcagtgtactcgctgacaacatagtggacgtgtacatgcacatgccttctgggaaggacatgtgggatgcacttgaggccaagttcggagtttctgacgccggcagtgagctgtatgttatggagcagttctatgactacaatatggtcgatgaccgttctgtagttgaacaagctcatgagattcagatgctggctaaggaacttgagaacaacaactgtgagttgccggacaagtttgtggcaggtggcattattgccaaactaccaccttcttggtcggactttgccacttctctaaagcacaagagacaagagttcagtgttcctgatctcattggctctttgggtgttgaggagaaggcgagggcaaaggacgtccggggcaaaaaggttgagggaggttctagtgccaatatggtacagaagaagaaccctcatgcatcccacaacaacaagaaagtcaagcctgatgtcaaacccaaggctgcaaccaattttaagaagaaaagcaagggaaaggcaaagggagactgctttgtgtgtggcaagtctgggcattggcccaaggactgtcctgagcgcaaagacaagaagtctgccaacatgatcattagcgagggcggaggaacatcgggagatgctacattctttgagaatgaatttcctatgaaatatacacctagcacttctagtaaagaaactgtcatgccccatgagcactttgcaccgatagaacacaatgatcaaacgcctgaggaaaatcctgaggaggacaacattgtagatactcgcaagagtaagagacaaagggttgcaaaatcctttggagatgactacattgtatacctagtggatgacaccccaagaaccatagaagaggcatattcatctcctgacgctgactactggaaggaagcagtacgcagtgaaatggactcgattatgtctaatggtacttgggaagttgttgagcgtccatatgggtgcaagcccgtaggatgcaaatgggttttcaagaaaaagcttaggcctgatggtacaatcgaaaagtacaaggcaaggcttgtggccaagggttatacccaaaaggaaggcgaggacttcttcgacacatactcaccagttgctcgcttgaccacgattcgagtactacttgctctggcagcctctcatggtcttctcgtccatcagatggacgttaagacagctttcataaacggagagctggaggaggagatctatatggatcaaccagacgggtatgtactagaaggtcaggagggaatggtgtgtaaactattgaaatccttgtatggcctcaagcaagcacctaagcaatggcatgagaagtttgacaccacgcttacatctgcaggctttgttgtgaacgaagctgacaaatgtgtatactatcgctatggtgggggagaaggggtgatcttgtgcttatatgtcgatgacatactgatctttgggaccagccttaatgtgattgaggaggtcaaagactatctgtccaagagttttgaaatgaaagatttgggagaggctgatgttattcttaacatcaaactacaaagaggagatgagggtgggattacacttgtgcaatcccactatgtggacaaggttttgagtcgctttggatatagtgactgcaagccagctcctactccttatgatcccagcgtgctattaaggaaaaaccgaagaatagcaagggatcagctgagatactctcaaatcattggttcattgatgtacttggctaacgcaacgaggcctgacatctcatttgctgtaagcaagctgagccggtttgtctcaaatccgggagatgatcattggcaggctctggaaagagtaatgcgctatctaaagggtactatgagctatggaattcactataccgggtatccaaaagtactagaagggtatagtgactcaaactggatatctgatgctgatgagataaaagccacaagtggatatgtgttcacacttggaggtggcgctgtttcctggaagtcttgcaagcagaccatcttaacgaggtcaacaatggaagcagaacttacagcactagatactgcgatagttgaggccgagtggcttcgtgaactcctgatggatttgccggtggttgaaaaaccagtgccagctatcctaatgaactgcgataatcaaacagtgattattaaagtgaacagttcaaaggacaacatgaagtcatctagacacatcaagagaagactgaaatctgtcagaaagcagaaaaactccggagtgatagcattggactatgtccaaacggctagaaatctggcagatcagtttaccaaggggctaccacacgggcgggcgatcaggtttttggggagcgcaaggcgcgactactcactgttcgtcaacatctacttcatcttcaccaacatgtcgaacactggagacaaggagaaggagactcccgtcaacaccaacggaggcaatactgcctcaaactccagcggaggaccattcttgggtttattcgatcgccggatacccgaggaagaagaagaagaagaaaagatgagctactacggccagcaacctcccgtcggcgtcccgccgcagcaaggttacccggggaaggacggctacccgccgccggggtacccaccggccggctacccgccggcgcagggctacccaccggctgggtaccccccgcagcagggctaccctccgccgtacgcgcagccgccgccccagcagcagcagcacagcagcggcccttccttcatggagggatgtaattaccggacgctggtctcagatctgtccacgccgacgggtgcggtggccggcgcgtccgccgcggcggcggcggcggcggcggcgcaccttggctgccctctgctgctgctgtctcctggacgcctgcttctgaggatagaggcgacgggtgcaagagagctgaagagatttgtttcatggagctga

SEQ ID NO: 14000 - DNA, 4172 bp, Oryza sativa
  Clone ID: TFbOSC401841j.C1.o20.np
gtttatttctatatcctcaatgcatgtaaagacttaaaaaagatattctgtaaaatattatgcgctagtgttttttcctaaaatcatatcatacctttcaaagacgggtgggtgatcagttttttgaggagcgcaaggcgcgactactcactattcatcaacatctacttcaccttcaccaatatgtcgaatactggagataacagcaacactggatacaaggagaaggagcctcccgtcaataccaacagaggcaatatgcctcaaactccagcggaggaccattcttagggtcattttcggtagttggctttgctgcaacactgaaaccacatgcttttgatggttctaattataagagatggaaagcacgtgcactactgtggttgacagcgatgcttctatgtttcacggggcaaacgatgtgaaccgcctctctctcctgaggaggaggctaagttcgaggtttcggattgcttgttccgtggagcattgatcagtgtactcgctgacaatatagtggacgtgtacatgcacatgccttcagggaaggacatgtgggatgcacttgaggccaagttcagagtttccgacgccggcaacgagctgtatgtcatggagcagttctatgactacaagatggtcgataaccgttctgtagtggaacaggatcatgagatttagatgctggcaaatgaacttgagaacaacaactgtgagttgccggacaagtttgtggtgggtggcattattgctaaattgccaccttcttggtcggactttgctacttctctaaaacacaagaggcaagagttcagtgttattgatctcattggctctttgggtgttgaggagaaggcgagagcaaaggaaaaccggggcaaaaatatcgagggaggttctagcgccaatttggtgcaaaagaagaaccctcacgcatcccacaacaacaacaacaagaaagtcaagtctgatgtcaaaccaaaggctacaaccaattttaagaagaaaggcaagggaaaggccaagggcgactgctttgtgtgcggtaagcctaggcattgggccaagaattgtcctgatcgcaaggacaagaagtctgccaacatggttattagcgagggcggaggaacatcggggtacgacaattttttacctacagttctctctgtttttcattcacctgattggtgggttgatactggtgctaatattcatgtgtgtgctgatatttccctgttttcttcttatcaggtcgggagaggttcctccttgttgatgggaaacgggtcgcttgcggctgttcatggtgttggtacggtcgatctgaagtttacttcgggaaagaccgtatagctgaagaacgtgcagcatgtcccttcaataaagaagaatctagttagcggctctctactgtgtagagatggttttagacttgtgtttgaattcaataaatgtgtcatatctaaatattgaacttttattggaaaaggttatgacaacggaggtctgttccgtttttctttggatgacatgtgtaataataataataatgttgtgaaccatattagcgagaatgatgagtccaatgtgtggcattcgtgactttggctaacatgagtttaattctaaaattcactttggtcaaaggttccaagtgccatacttgtgttcaattgaaacaaccttgcaagcctcacaaggcatctgaggcgagaaatttggcaccactagaactagttcattccgatctgtgcgaaatgaacggtgtgttgactaaagggggaaagaaatatttcatgacactgatagatgattgcactagatattgctatgtgtacctattgaaaacaaaggatgagacattgcattactttaagatctataaagctgaggtagaaaaccaacttgaaaggaaaatcaaacggttgaggtctgataggggtggagagtatttttccaatgagtttacgtccttttgcaaaaagtttggaattattcatgagaggacgcatccctattcaccccaatcaaatggggtagccgaaagaaagaaccgcactctaactgagatggtgaatgccatgttagacactgcgggactttccaaggaatggtggggtgaggcaattttgactgtttgtcatgtcctgaataaaattccagtgaagcataagaaagtaacaccattcgaagaatgggaaaggaagaaattaaatctctcatacctacgcacatggggctgcttggccaaggtaaatatacctatagccaaaaagcgtaaacttggaccaaagaccgtagactgtgttccttggttatgctatccacagcgtgggctataggttcttaatagtaaactctggagtacccgacatgcgtgttggtacaattactgagtccagagatgccacattttttgagaatgaatttcccatgaaaaatacacttagcacgtctagtcaagaacctgttttaccccatgagcattttgcaccgatagaacacaatgatcaaacggctgaggaaaatcctgaggaggataacattgtagcaactcgaaagagtaagagacaaaggactgcaaagtcttttggagatgactacattgtatacctcgtggatgacactccaagaaccatagaagaagcatattcatctcctgacgctgactattggaaggaagcggtacgcagtgagatggactcaattatgtctaatggtacttgggaagtcgttgagcgtccatatgggtgcaagcctgtaggatgcaaatgggttttcaagaaaaagcttaggcctgatggtacaattgaaaagtataaggcaaggcttgtggccaagggttatacccaaaaagaaggcgaggatttttttcgacacctactcaccagttgcccgcttgaccacgattcgagtactacttgcttttgaagcctctcatggtcttctcgtccatcaaatggatgttaagacagctttcctaaacggagagctagaagaggagatctatatggatcaaccagacggatatgtactagaaggtcaggagggaatggtgtgtaaactgttgaaatccttgtatagccttaagcaagcacctaagcaatggcatgagaagtttgacacaacacttacatctgctggctttgttgtgaacgaagctgacaaatgtttgtactatcactatggtgggggagagggagtgatcttgtatttatatgtcgatgacatattgatttttggaaccagcctcaatgtgattgaggaggttaaggactttttgtccaaaagctttgaaatgaaggatttgggagtggctgatgttattcttaacattaagctactgagaggagatgagggtgggattacactcgtgcaatcttactatgtggacaaggttttgagtcgctttggttatagtgactgcaagccagctccaactccttataactccagtgtgctattaaggaaaaaccgaagaatagaaagggatcaattgagatactcccaaatcattggttcattgatgtacttggctagtgcaacgaggcctgacatctcatttgctgtgagcaagctgagccggtttgtttaaaatctgggagatgatcattggcaagctctggaaatggtcatgcgctatctaaaggatacaacgagctatggaattcactatactagttacccaaaagtactgtaagggtatagtgactcaaactggatatctgatgctgatgagataaaagccacaagtggatatgtgttcacacttggaggtggtgctgtttcctggaagtcttgcaagcagaccatcttaacgaggtcaacaatggaagcagaactcacagcactagatactgccacagttgaggccgagtggctttcgtgaactcctgatggatttgccggtgattgaaaaacctgtgccagctatcctaatgaactgtgataatcaaacagtgattattaaggtgaacagttcgaaggacaatatgaagtcatttaggcatgtaaagagaagactgaaatctattagaaagcagaaaaactccagagtgatagcactggactatgtccagacagctaaaaatctagcagatcagtttaccaaggggctaccacgtaatgtgatagatagtgcatcgagggaaatgggcttgagacccact

SEQ ID NO: 14001 - DNA, 1125 bp, Oryza sativa
  Clone ID: TFbOSC11678j.C1.o1.fg
atgtcgggggatggcgagaaaagtgtgaagggggccatgggtcctcaaatagagcaagttatagttgtgagcatttctcctcctagtgatcaaatgctatcatttgaagaggaagagaaatgcatacatctcaatgctcaagctactaatgttttgtttagtgctttgagtgaagatgtgtttgaatccatcatgccacttgaggatgctcatctcatttggaacacactcaaggagagatatgacaagtccgagtgtgatgagacacatgtcttcattgaaggtaatgaaatggtgagtagcgtcaatgtggatacttctacctcctacagtgcttgtgaaactaatcttttgaaggaagaagtatgtggaaaaaaatggccaagtgaagaatttacatctccaagatgctcatctccacgctccgatgaatattcttgcatcatggagaaatcatctttggagaaagaaaatctagagcttaaagctcaacttgtagagctcactagcaagcatgtggacctacaagaaaagtatgatgaacttttgtgctctcatggaaatattgtagattcacatgccatgctagaagtaactcatgaggtgatcataacaacggtaaaatcctatgtgcctcatattcaagttgactttacttgtgctaactcttattgctctcaagcaaatatttttccgagcactatatgtgacctggattatgtagagaaaaaggataagcgcatcgatcatggacttgttggcaatgctcaaccttctcaagataaccgtgagagcatggtgaagaagcttgagaagggaacaaccgtagcttgcaacaagttctatcaagaagatatcaagtccaacaacaagatcaaggggcaagatcaaaggaagaacaaaacttccattacttgcttcaagtgcaagaaaatgggacatcatgtgagagattgtccttggaagaaagagaagaagttgaacaagaatgaggatcttgctcacaagttcttcaagtccaccaaagagggacactttgcctcaagttgtcctcgcaagattgatgatgaaatcacacttccaacaaagacatctagaatcaacaaaaggaagtgctatggttga

SEQ ID NO: 14002 - DNA, 1089 bp, Oryza sativa
  Clone ID: TFbOSC402680j.C1.o1.fg
atgggtcctcaaatagagcaagttatagttgtgagcatttctcctcctagtgatcaaatgctatcatttgaagaggaagagaaatgcatacatctcaatgctcaagctactaatgttttgtttagtgctttgagtgaagatgtgtttgaatccatcatgccacttgaggatgctcatctcatttggaacacactcaaggagagatatgacaagtccgagtgtgatgagacacatgtcttcattgaaggtaatgaaatggtgagtagcgtcaatgtggatacttctacctcctacagtgcttgtgaaactaatcttttgaaggaagaagtatgtggaaaaaaatggccaagtgaagaatttacatctccaagatgctcatctccacgctccgatgaatattcttgcatcatggagaaatcatctttggagaaagaaaatctagagcttaaagctcaacttgtagagctcactagcaagcatgtggacctacaagaaaagtatgatgaacttttgtgctctcatggaaatattgtagattcacatgccatgctagaagtaactcatgaggtgatcataacaacggtaaaatcctatgtgcctcatattcaagttgactttacttgtgctaactcttattgctctcaagcaaatatttttccgagcactatatgtgacctggattatgtagagaaaaaggataagcgcatcgatcatggacttgttggcaatgctcaaccttctcaagataaccgtgagagcatggtgaagaagcttgagaagggaacaaccgtagcttgcaacaagttctatcaagaagatatcaagtccaacaacaagatcaaggggcaagatcaaaggaagaacaaaacttccattacttgcttcaagtgcaagaaaatgggacatcatgtgagagattgtccttggaagaaagagaagaagttgaacaagaatgaggatcttgctcacaagttcttcaagtccaccaaagagggacactttgcctcaagttgtcctcgcaagattgatgatgaaatcacacttccaacaaagacatctagaatcaacaaaaggaagtgctatggttga

SEQ ID NO: 14003 - DNA, 3540 bp, Oryza sativa
  Clone ID: TFbOSC100566j.C1.o19.gm
atgccgtgcaaaactcacgcccacaacgcacgcctgacgcggtcgtctactcctgcagctcgccacatctctcgccgagtgggaggcgcgcttcaagaaaggcgggggagaaacctcgtcgccacagaggaacaagccctctgtggccgcgacaagagccacataaaatgtttcaactgtgaggagtttggccactactccacgcagtgtccacaccccaagaagaagaaggctgaagctcatcttgcgcaaactgaggatgctggcccagctttgttgctcgctgtgacagaggcggtgcagaacgcgccgtgccaggacgcgctctgcgggctggtcgtgcacgaggagcgtgtgtggcctcgcctgatgctggcagagaagggagcagctgctggtgatctgtggtacctggacaatggtgccagcaatcatatgtcaggagatcgtcggaaattccgggaactggacgagactgtgacagggcaggtcaggttcggcgacgcctcgtcagtgcagataatggggcagggatccatccttttctcatgcaagaacggtgaccagtggttgctcgacgacgtctactacatccccagcctctgctgcaacatggtgagtttggggcagctaactgaaactggccaccgtgtcgtgatggatggagatgacctcgaggtgttcgacaaaaatccttggcgattggtgatgaaggtgcggcgaacctcaaatcggctgtaccgcatcgagctgcagctggcgtcaccgctattggtggacaaggagatggtggcaggagtgcccgcagtccaccacccaaaccagctgtgtcaagcatgtctggtggcgaaacaagtccggcagtcgttcccaggaatggcaaactatcgagcagaggcaccgctcgagctgctccacatggatctgtgtgggccgatcactccatcgacgttcgccggtaatcgatactttatgttgatcgttgatgatttttctcgttggatgtgggtgtttgtgatcaagtcgaaggaccaagcgctcgcggcctccgagaagttcaagccgttggcggagaacacggcaggacgaacaatcaagacactccggacagaccgcggcagcgagttcttgtccggcgagttcgcgcgtgtctgcgatgcagccggcatcgagcgccacctgacggcaccgtattcaccgcagcagaatggcgtcgtggagcatcgcaataggacggtgatggcaatggcgcggtctctcctcaaggggatgtccgtgcccggcaggatgtggggcgaggcagttcgtcacgccgtattcctcctaaatcggctgccgaccaaggcgatgggaaatcgcacttcgttcgaggcatggatggggaagaaacctcacctgggccacctgtgggtgttcgggtgtacggcgcacacgaaggtgactgcaccgcacttgatgaagctggatgaccggagcaatccattcgtgtacctgggcgttgaagaagggagcaaggcccatcggctgtttgatccgcgtcgtcggcaaatcattgtaagtcgtgacgttgtttttgatgaaaacacaccttggcagtggagtgctgctgcaggagaggtgacttccactgagttcgaggtagaagaacccgtcggcgcagagcaggcagcctcggtaccgtggtaccgagcgccgccggcaggaaggcgagccggcaaggagccagaagtggcagaacagcggggaacgcctccggcaagcccggcgaggttctcaccaaccttgcctagcacgcctacactcggctcatcctcaacgcactctgccgaggtgcaggcgtcaccgcgcacgcccggcagtgacgacgggccggtgcggtatagaagcttggtggagatcatgcttgaagcacctcgggtggacctggtggaggatgatgatgacgcagaagcgctgctcgcagagatggaggagccgacatcctaccgtgaagcagccggcgagacggcgtgggtgaacgcaatgaacaaggaactggaggctattgagaagaacaggacgtggtcgctgtgcatgctgccagccggtcgcaaggcaatagggctcaagtgggtgttcaagctaaagaaaaacactgccggtgaggtgatcaaacacaaggcgcggctggtggcgaaggggtacgtccagcggcaaggtgtggattttgatgaagtgtatgcgccggttgcaaggttggacacggtgcgagctatacttgcagttgcagctgatcgaaggtggcaggtgcatcaccttgacgtcaagtcggcattccttaatggtgatcttgaggaagaagtatatgtctttcagccagaaggccgcctccccctcctctcctccgtgccgcgcccggcccaagccgacggcggcctccccgcccgttgccggtgcgcgctgacgccgccgcctgaccgcgtggggcccacgcgccaggccgaccgcctgtgccgcctcgcccgcgcaccggccggccgcgccgtcgcctcctccagcgtcgccgccacctcctccaccccggcctgccctccgtttcgcgcggtgaccgccggaggcgcgttcccgccgtcgtccttctttttcctccgcgccggccgcctccagccgcctctccctcctcgccggagcgccgtccggccgcgccgtcttctccctcggcctcgcagccacctcctctccctcggtcagccctccgtttcgcgggggaagcaccggagacgcgtcctcgccggcaaaacagtggcgttgccgccactgttccacctccggccgccactgtcgcgtttcccgtgcgccggccgacgtcgccaccacctccctcggctccgcgacgccaccctcatccccggcatcacctcctcctcgcccgaagttcgccggaacgccgccgccgcgccaaccacccattcctcctcgtcggctcgtcgccccgctgcaccaccaccttctccaacatcgcagcagcgcgttccactccgtcccctcctccgctcagccgctgctgcctgccatcatcgtttccacgtcaccgttcgtcctcgccgatcgacgtcccgtcggtcgcccggctcgtcgtctcgcggcgccgcctccgtcatcgtcatcgctgcggcgtgttccacgccgtcctcgtccccgtgcagccgctgccggctgtcctcgtcgcctcctcgccggtcccggtcgtcgtcgtcgtcgtcgtcctctcgtcgttcccgccccgtcctcgtcttcgtcctcggctccgcgtcgtcaagcctcgtgccggccgtgtctcgccttcgtcctaggatcgccgccgaagtcgttccctcgccgtccgtctccgccgcgcccgttcgtcgttgtcgttccctcgcctcgtcgcgtggtggtaaggatctctcctctcgctgccccgtcctcgtcctttcggtgtcgccccgtatccgttgtgcggtcgtcgaccccggtacccgtgtaccggtgtcggtagtcgttcacgtgtgcgggtggtga

SEQ ID NO: 14004 - DNA, 3651 bp, Oryza sativa
  Clone ID: TFbOSC401435j.C1.o49.np
atggcgttggttccggtgacggcggacccggcgatggggagctcaggaagtgctttcctttacccacagctcatgtcaaccaactacactagttgggtaatacgtgtgcaggctatgatggaggatcaaggcatatgggaagcaatcgagccggcggccggggcggccgtcgacccgaggaaggacaagaaggcgaagtctcatcttctccagtcgctgccggaggatctcttgatgcaggttgcaaagaaacgctcggcaaaggaggtttgggactgcctcaagacgagattcgtcggggtggatcgggtgcgcgatgcacgcctgcagacactcaagggagagttcactagcatggtgatggaggccggggagacgctggaccagtacgccggccggatcaccacgatggggtggttgaacgacgccgccatggtgaagaagctgttcgacactgtcccggagaagttcgttagcctcgtcgcagggatcgagcaattttacgatgttgacaccatgccgttcgaagaagcggtaggtcgcctcaaggcgtatgaagagtggatgtggaagaagaaggcgaccgccggcggagtgaccgctgacgggcaagttctgctcactcagggcgagtgggaggcacgcttcaagaaaggcgggggagaaacctcgtcgccacagaagaacaagccctctggtgagggggcgaaccacggccaggccgagcgtggtcgtggtaggggtcgcggacgcggcgggacgcagagaagcggtggcggctctagcggtggtggccgcgacaagagccacataaagtgtttcaattgtgaggagtttggccactactccacacagtgtccacaccccaagaagaagaaggctgaagctcatcttgtgcaaacggaggatgctggcccagctctgttgcttgccgtgacagaggcagtgcagaacgcgccacgccaggacgcgcactgtgggctggtcgtgcacgaggagcgtgtgtggcctcgcctgatgctggcagagaagggcgcagctgctggtgatctgtggtacctggacaatggtgccagcaatcatatgtctggagatcgtcggaaattccgggaactagacgagaccatgacggggcaggtcaggttcggcgacgcctcgtcagtgcagataatggggatgggatccatccttttctcatgcaagaacggtgaccagtggttgctcgacgacgtctactatatccccagcctctgctgcaacatggtgagtttggggcagctaactgaaactggccaccgtgttatgatggatggagatgacctcaaggtgttcgacaaaaatccttggcgattggtgatgaaggtgcggcgaacctcaaatcggctgtaccgcatcgagctgcagctggcgtcacaggtgtgcctgctggccagtctcgataacccggcgtggctgtggcatgcccggatcggacacgtgaatttccatgcattgaagctattagtggacaaggagatggcgtcaggagtgcccacagtccaccacccaaaccagctgtgtcaagcatgtctggtggcgaaacaagtccggcagccgttcccaggaatggcaaactatcgagcagaggcgccgctcgagctgctccacatggatctgtgtgggccgatcactccatcgacgttcgccggtaatcgatactttatgttgatcgttgatgatttttctaattggatgtgggtgtttgtgatcaagttgaaggaccaagcgctcgcggtgttcgagaagttcaagccgttggcaaagaacacggtaggacgaacaatcaagacactccggacagaccgcggcggcgagtttttgtccggcaagttcgcgcgcgtctgcgatgcagccagcatcgagcgccacctgacggcaccatattcaccgcagcagaacgacgtcgtggagcgtcgcaataggacggtgatggcaatggcgcggtctctcctcaaggggatgtccgtgcccggcaggatgtggggcgaggcagttcgtcacgccatattcctcctaaattggctgccgaccaaggcgatgggaaatcgcactccgttcgaggcatggacggggaagaaacctcacctgggccacctgcgggtgttcgggtgcgttgaagaagggagcaaggcccatcggctgtttgatccgcgtcgtcggcaaatcattgtaagtcgtgacgttgtttttgatgaaaatacaccttggcagtggagtgctgctgcaggagaggtgacttccaccgagttcgaggtagaagaacccgtcggcgcagagcagccggcgctggcagagcaggcaggcttggtaccgtggtaccgggcgccgccagcaggaaggcgagccggcaaggagccagaagtggcggaacatgacgtcgggccggtgcggtatagaagcttggcggagatcatgcttgaagcacctcgggtggacctggtggaggatgatgacgacgcaagagcgctgctcgcagagatggaggagccgttatcctaccgtgaagcaaccggcgagccggcatgggtgaacgcaatgaacaaggaactggaggccattgagaagaacaagacgtggtcgttgtgcatgctgccagccggtcacaaggcaatagggctcaagtgggtgttcaagctaaagaaaaacaccgccggtgaggtgatcaaacacaaggcgcggctggtggcgaatgggtacgtccagcagcaaggtgtggattttgatgaagtgtttgcgccggttgcaaggttggacacggtgcgagctatacttgctgttgcagctgatcgaaggtggcaggtgcatcaccttgacgtcaagtcggcattccttaatggtgatcttgaggaagaagtatatgtctctcagctggaaggttttgttgagaaggggaaggaacatcttgtgtacgaattgagcaaagctctctacgggctgagacaggcgccacgggcatggaatacacggcttgatcggagcatgaaggagcttggtttcagccggtgtgcacaagaacaagcagtctacactagaggcgtggtgagcaaattcatggaacaactgacagtgatgcacttcaaggcggtgaagcaaattctcagatatctcaaggggacaatcaactgtggactcatgttttctggaggcaatgatgcagtggagattactggtttcacagatagtgatctggccggcgacagtgatgatcgtcggagtactagcggcatggcgttttacttcaacagcagtttggtctcgtggagttcacaaaagcagaaaacagtggcactttcgtcctgtgaggctgagttcatggcagccactgcagcagcttgtcaagctttgtggctcaggggattgttgattgagatgattggtgcagaagccaggccggtgaagctgtatgttgataacaagtcagcaattgcactcatgaagaaccctgtgtttcatgggagaaagagtggagacggaggcgacggcgacggtgctggaggcgggggcggcgtcgccgtcggcgtcaccagcacggggaggaggagatggggatgggaagggctcggtggatgggaggatgctggtggtggttggttggataaggttgtgggtgga

SEQ ID NO: 14005 - DNA, 3996 bp, Oryza sativa
  Clone ID: TFbOSC405457j.C1.o13.fg
atggcgggcgagtgcaacggtggacctccgccattgctgccccttcctccgctcgccgctcatcgcgtgacggcaccaacgcggctggctgcggcgggagggaggtggaccgcgcgcttcttagttgatggcgatgccccggagcttcatgctatgatggaggatcaaggcgtatgggaagcaatcgagccggcggccggggcggccgtcgacccgaggaaggacaagaaggcaaagtctcatcttctccagtcgctgccggaggatctcttgatgcaggttgcaaagaaatgctcggcaaaggaggtttgggattgcctcaagacgagattcgtcggggcggatcgggtgcgcgatgcgcgcctgcagacactcaagggagagttcaccaacatggtgatggaggccggggagacgctggaccagtacgccggccggatcaccacgatgggggtccggtactctgctctcggcgcgacgttgaatgacgccgccatggtgaagaagctgttcgacactgtcccggagaagttcatcagcctcgtcgcagggatcgagcaattttacgacgtcgacaccatgccgttcgaagaagtggtaggtcgcctcaaggcgtatgaagagcggatgcggaagaagaaggcgaccaccggcggagtgaccgcggacaggcaaaagaacaagccctctggtgagggggcgaaccgcggccaggccgggcgtggtcgtggcaggggtcgcggacgcggcgggacgcagagcagcggtggcggctctggtggtggcggcggtggccgcgacaagagccacataaaatgtttcaactgtgaggagtttggccactactccacgcagtgtccacatcccaagaagaagaaggttgaagctcatcttgcgcaaacggaggatgctggcccagctttgttgctcgctgtgacagaggcggtgcagaacgcgccgcgccaggatgcgctctgcgggctggtcgtgcacgaggagcgtgtgtggcctcgcctgatgctggcagagaagggagcagctgctggtgatctgtggtacctggacaatggtgccagcaatcatatgtcaggagatcgtcggaaattccgggaactggacaagaccgtgacggggcaggtcaggttcggcgacgcctcgtcagtgcagataatggggaagggatccatccttttctcatgcaagaacggtgaccagtggttgcttgacgatgtctactacatccccagcctccgctgcaacatggtgagtttggggcagctaactgaaactggccaccgtgtcgtgatggatggagatgacctcgaggtgttcgacaaaaatccttggcgattggtgatgaaggtgcggcgatcctcaaatcggctgtaccgcatcgagctacagctggcgtcaccgctattggtggacaaggagatggcggcaggagtgcccgcagtccaccacccaaaccagctgtgtcaagcatgtctggtggcgaaacaagtccggcagccgttcccaggaatggcaaactatcgagcagaggcgccgctcgagctgctccacatggatctgtgtgggccgatcactccatcgacgttcgccggtaatcgatactttatgtttatcgttgatgatttttctcgttggatgtgggtgtttgtgatcaagtcgaaggaccaagcgctcgcggccttcgagaagttcaagccgttggcggagaacacggcaggacgaacgatcaagacactccggacagaccgcggcggcgagttcttgtccggcgagttcgcgcgcgtctgcgatgcagccggcatcgagcgccacctgacggcaccgtattcaccgcagcagaatggcgtcgtggagcgtcgcaataggatggtgatggcaatggcgcggtctctcctcaaggggatgtccgtgcccggcaggatgtggggcgaggcagttcgtcacgccgtattcctcctaaatcggctgccgaccaaggcgatgggaaatcgcactccgttcgaggcatggacggggaagaaacctcacctgggcccctgcgggtgttcgggttggagtgttgctgcaggagaggtgacttccactgagttcgaggtagaagaacccgtcggcgcagagcagccggcgccggcagagcaggcaggctcggtaccgtggtaccgggcgccgccggcaggaaggcgagccggcaaggagccagaagtggcagaacagcggggaacacctccggcaagcccggcgaggttctcaccaaccttgcctagcacgcctacactcggctcatcctcaacgcactctgccgaggtgcaggcgtcaccgcgcacggccgacagtgacgacgggccggtgtggtacagaagcttggcggagatcatgattgaagcacctcgggtggacctggtggaggatgatgatgacacagaagcgctgctcgcagagatggaggagccgacatcctatcgtgaagcagccggcgagccggcgtgggtgaacgcaatgaacaaggaactggaggctattgagaagaacaagacgtggtcgctgtgcatgctgccagccggtcacaaggcaatagggctcaagtgggtgttcaagctaaagaaaaacactgccggtgaagtgatcaaacacaaggcgcggctggtggcgaaggggtacttccagcggcaaggtgtggattttgatgaagtgtttgcgccggttgcaaggttggacatggtgcgagctatacttgcagttgcagctgatcgaaggtggcaggtgcatcaccttgacgtcaagtcggcattccttaatggtgatcttgaggaagaagtatatgtctctcagccagaaggttttgttgagaagggaaaggaacatcttgtgtacaaactgagcaaagctctctacgggctgagacaggcgccatgggcgtggaatacacagcttgatcggagcatgaaggagcttggtttcagccggtgtgcacaagaacaagcagtctacactagaggtacagggagtgccgggataattgttggagtatatgttgatgatctgatcgtgacaggagaaagcccaagcgagatcactgcattcaaacaacagatgatgggggagtttgagatgagtgatcttggactgctcacctattacttgggaattgaagtgttgcaaggcactgacgggatcgccatcaagcaggttgcttatgcaaggaagattctgacccagtttaggatgctagattgcaattctacctcaattcctattgaacatcgttcacagttgcacaaagatgctcaaggaagcacagttgatcccacggagtacaggcgagtgataggttgtcttcgttacttgttgcatactcggccggatttgtcctacacagtaggcgtggtgagcagattcatggaacgaccgacagtgatgcatttcaaggcggtgaagcaaattctcagatatctcaaggggacaatcaactgtggactcatgttttctggaggcaatggtgcagtggagattactggtttcacagattgtgatctggccggcgacagtgatgatcgtcggagtactagcggcatggcgttttacttcaacggcagtttggtctcatggagttcacaaaagcagaaaacagtggcactttcgtcctgtgaggctgagttcatggcagccactgcagcagcgtgtcacgctttgtggctgaggggattgttgattgagatgattggtgcagaagccaggccggtgaagctgtatgttgataacaaatcagcaattgcactcatgaagaaccctgtgtttcatgggagaagtaagcacatcgatacccggtatcattttattcgtgagtgtgttgaaagtgggaagattcagattgaattcgtccggactgaggagcagcgggcggatgcgttaacaaaagggttgccagcagcgagattggcgacagcacgacacctgctaggtgttcgtgattttgggccgtag

SEQ ID NO: 14006 - DNA, 4020 bp, Oryza sativa
  Clone ID: TFbOSC8960j.C1.o8.fg
atggcgttggttccggcgacggcggacccggcgagggggagctcaggaagtgctttcctttacccacagctcacgtcaaccaactacactagttgggttgcaaagaaacgctcggcaaaggaggtttgggattgcctcaagacgagattcatcggggcggatcgggtgcgcgatgcgcgcctgcagacactcaaggaagagttcaccaacatggtgatggaggccggggagacgctggaccagtacgccggccggatcaccacgatgggggtccggtactctgctcttggcgcgacgttgaacgatgccgccatggtgaagaggctgttcgacactgtcccggagaagttcatcagcctcgtcgcagggatcgagcaattttacgacgtcgacaccatgccgttcgaagaagcggtaggtcgcctcaaggcgtatgaagagcggatgcggaagaagaaggcgaccaccggaggagtgaccgctgacgggcaagttctcctcactcaggccgagtgggaggcgcgcttcaagaaaggcgggggagaaacctcgtcgccacagaagaacaagccctctggtgagggggcgaaccgcggccaggccgggcgtggtcgtggcaggggtcgcggacgcggtgggacgcagagcagcggtggcggctctggtggtggcagcggtggccgcgacaagagccacataaaatgtttcaactgtgaggagtttggccactactccacgcagtgtccacaccccaagaagaagaaggctgaagctcatcttgcgcaaacggaggatgctggcccaactttgttgctcgctgtgacagaggcggtgcagaacgcgtcgcgccaggatgcgctctgcgggctggtcgtgcacgaggagcgtgtgtggcctcgcctgatgctggcagagaagggagcagctgctggtgatctgtggtacctggacaatggtgccagcaatcatatgtcaggagatcatcggaaattccgggaactggacgagaccgtgacagggcaggtcaggttcggcgacgcctcgtcagtgcagataatggggaagggatccatccttttctcatgcaagaacggtgaccagtggttgctcgacgatgtctactacatccccagcctctactgcaacatggtgagtttggggcagctaactgaaactggccaccgtgtcgtgatggatggagatgacctcgaggtgttcgacaaaaatccttggcgattggtgatgaaggtgcggcgatcctcaaatcggctgtaccgcatcgagctgcagctggcgtcaccggtgtgcctgttggctagtctcgatgacccggcgtggctgtggcatgcccggctcggacacgtgaatttccatgcgttgaagctattggtggacaaggagatggcggcaggagtgcccgcagtccaccacccaaaccagctgtgtcaagcatgtctggtggcgaaacaagtccggcagccgttcccaggaatggcaaactatctagcagaggcgccgctcgagctgctccacatggatctgtgtgggccgatcactccatcgacgttcaccggtaatcgatactttatgttgatcgttgatgatttttctcattggatgtgggtgtttgtgatcaagtcgaaggaccaagcgctcgcggccttcgagaagttcaagccgttggcggagaacacggcaggacgaacgatcaagacactccggacagaccgcggtggcgagttcttgtccggcgagttcgcgcgcgtctgcgatgcagccggcatcgagcgccacctgacggtaccgtattcaccgcagcagaatggcgtcgtggagcgtcgcaataggacggtgatggcaatggcgcggtctctcctcaaggggatgtccgtgcccggcaggatgtggggcgaggcagttcgtcacgccgtattcctcctaaatcggctgccgaccaaggcgatgggaaatcgcactccgttcgaggcatggacggggaagaaacctcacctgggccacctgcgggtgttcgggtgtacggcgcacgcgaaggtgactgcaccgcacttgaagaagctggacgaccggagcaatccggtcgtgtacctgggggttgaagaagggagcaaggcccatcggctgtttgatccgcgtcgtcggcaaatcattgtaagtcgtgacgttgtttttgatgaaaacacaccttggcagtggagtgctgctgcaggagaggtgacttccactgagttcgaggtagaagaacccgttggcgcagagcagccggcgccagcagagcaggcaggctcggtaccgtggtaccgggcgccgccggcaggaaggcgagccggcaaggagccagaagtggcagaacagcggggaacgcctccggcaagcccggcgaggttctcaccaaccttgcctagcacgcctacactcggctcatcctcaacgcactctgccgaggtgcaggcgtcaccgcgcacggccggcagtgacgacgagccggtgcggtacagaagcttggcggagatcatgattgaagcacctcgggtggacctggtggaggatgatgacgacacagaagcgctgctcgtagagatggaggagccgacatcctatcgtgaagcagccggcgagccggcgtgggtgaacgcaatgaacaaggaactggaggctattgagaagaacaagacgtggtcgctgtgcatgctgccagccagtcacaaggcaatagggctcaagtgggtgttcaagctaaagaaaaacactgccggtgaggtgatcaaacacaaggcgcggctggtggcgaaggggtacgtccagcggcaaggtgtggattttgatgaagtgtttgcgccggttgcaaggttggacacggtgcgagctatacttcctgttgcagttgatcgaaggtggcaggtgcatcaccttgacgtcaagtcggcattccttaatggtgatcttgaggaagaagtatatgtctctcagccagaaggttttgttgagaagggaaaggaacatcttgtgtacaaactgagcaaagctctctacgggctgagacaggcgccacgggcgtggaatacacggcttgatcggagcatgaaggagcttggtttcagccggtgtgcacaagaacaagcagtctacactagaggtacagggagtaccgggataattgttggagtatatgttgatgatctgatcgtgacaggagaaagcccaagcgacatcactgcattcaaacaacagatgatgggggagtttgagatgagcgatcttggactgctcacctattacttgggaattgaattgcacaaagatgctcaaggaagcacagttgatcccacggagtataggcgagtgataggttgtcttcgttacttgttgcatactcggccggatttgtcctacgcagtaggcgtggcgagcagattcatggaacgaccgacagtgatgcatttcaaggcggtgaagcaaattctcagatatctcaaggggacaatcaactgtggactcatgttttctggaggcaatggtgcagtggagattactggtttcacagatagtgatctggccggcgacagtgatgatcgtcggagtactagcggcatggcgttttacttcaacggcagtttggtctcgtggagttcacaaaagcagaaaacagtggcactttcgtcctgtgaggctgagttcatggcagccactgcagcagcgtgtcacgctttgtggctcaggggattgttgattgagatgattggtgcagaagccaggccggtgaagctgtatgttgataataaatcagcaattgcactcatgaagaaccctgtgtttcatgggagaagtaagcacatcgatacccggtatcattttattcgtgagtgtgttgaaagtgggaagattcagattgaattcgtccggattgaggagcagcgggcggatgcgttaacaaaagggttgccagcagcgagattggcgacagcacggcacctgctaggtgttcgtgattttgggctgtag

SEQ ID NO: 14007 - DNA, 4050 bp, Oryza sativa
  Clone ID: TFbOSC900206j.C1.o25.fg
atggcgggcgagtgcaacggtggacctccgccattgctgccccttcctccgctcgccgctcatcgcgtgacggcaccaacgcggctggctgcggcgggagggaggtggaccgcgcgcttcttagttgatggcgatgccccggagcttcatgctatgatggaggatcaaggcgtatgggaagcaatcgagccggcggccggggcggccgtcgacccgaggaaggacaagaaggcaaagtctcatcttctccagtcgctgccggaggatctcttgatgcaggttgcaaagaaatgctcggcaaaggaggtttgggattgcctcaagacgagattcgtcggggcggatcgggtgcgcgatgcgcgcctgcagacactcaagggagagttcaccaacatggtgatggaggccggggagacgctggaccagtacgccggccggatcaccacgatgggggtccggtactctgctctcggcgcgacgttgaatgacgccgccatggtgaagaagctgttcgacactgtcccggagaagttcatcagcctcgtcgcagggatcgagcaattttacgacgtcgacaccatgccgttcgaagaagtggtaggtcgcctcaaggcgtatgaagagcggatgcggaagaagaaggcgaccaccggcggagtgaccgcggacaggcaaaagaacaagccctctggtgagggggcgaaccgcggccaggccgggcgtggtcgtggcaggggtcgcggacgcggcgggacgcagagcagcggtggcggctctggtggtggcggcggtggccgcgacaagagccacataaaatgtttcaactgtgaggagtttggccactactccacgcagtgtccacatcccaagaagaagaaggttgaagctcatcttgcgcaaacggaggatgctggcccagctttgttgctcgctgtgacagaggcggtgcagaacgcgccgcgccaggatgcgctctgcgggctggtcgtgcacgaggagcgtgtgtggcctcgcctgatgctggcagagaagggagcagctgctggtgatctgtggtacctggacaatggtgccagcaatcatatgtcaggagatcgtcggaaattccgggaactggacaagaccgtgacggggcaggtcaggttcggcgacgcctcgtcagtgcagataatggggaagggatccatccttttctcatgcaagaacggtgaccagtggttgcttgacgatgtctactacatccccagcctccgctgcaacatggtgagtttggggcagctaactgaaactggccaccgtgtcgtgatggatggagatgacctcgaggtgttcgacaaaaatccttggcgattggtgatgaaggtgcggcgatcctcaaatcggctgtaccgcatcgagctacagctggcgtcaccgctattggtggacaaggagatggcggcaggagtgcccgcagtccaccacccaaaccagctgtgtcaagcatgtctggtggcgaaacaagtccggcagccgttcccaggaatggcaaactatcgagcagaggcgccgctcgagctgctccacatggatctgtgtgggccgatcactccatcgacgttcgccggtaatcgatactttatgtttatcgttgatgatttttctcgttggatgtgggtgtttgtgatcaagtcgaaggaccaagcgctcgcggccttcgagaagttcaagccgttggcggagaacacggcaggacgaacgatcaagacactccggacagaccgcggcggcgagttcttgtccggcgagttcgcgcgcgtctgcgatgcagccggcatcgagcgccacctgacggcaccgtattcaccgcagcagaatggcgtcgtggagcgtcgcaataggatggtgatggcaatggcgcggtctctcctcaaggggatgtccgtgcccggcaggatgtggggcgaggcagttcgtcacgccgtattcctcctaaatcggctgccgaccaaggcgatgggaaatcgcactccgttcgaggcatggacggggaagaaacctcacctgggcccctgcgggtgttcgggtgtacggcgcacgcgaagtcgtgacgttgtttttgatgaaaacacaccttggcagtggagtgttgctgcaggagaggtgacttccactgagttcgaggtagaagaacccgtcggcgcagagcagccggcgccggcagagcaggcaggctcggtaccgtggtaccgggcgccgccggcaggaaggcgagccggcaaggagccagaagtggcagaacagcggggaacacctccggcaagcccggcgaggttctcaccaaccttgcctagcacgcctacactcggctcatcctcaacgcactctgccgaggtgcaggcgtcaccgcgcacggccgacagtgacgacgggccggtgtggtacagaagcttggcggagatcatgattgaagcacctcgggtggacctggtggaggatgatgatgacacagaagcgctgctcgcagagatggaggagccgacatcctatcgtgaagcagccggcgagccggcgtgggtgaacgcaatgaacaaggaactggaggctattgagaagaacaagacgtggtcgctgtgcatgctgccagccggtcacaaggcaatagggctcaagtgggtgttcaagctaaagaaaaacactgccggtgaagtgatcaaacacaaggcgcggctggtggcgaaggggtacttccagcggcaaggtgtggattttgatgaagtgtttgcgccggttgcaaggttggacatggtgcgagctatacttgcagttgcagctgatcgaaggtggcaggtgcatcaccttgacgtcaagtcggcattccttaatggtgatcttgaggaagaagtatatgtctctcagccagaaggttttgttgagaagggaaaggaacatcttgtgtacaaactgagcaaagctctctacgggctgagacaggcgccatgggcgtggaatacacagcttgatcggagcatgaaggagcttggtttcagccggtgtgcacaagaacaagcagtctacactagaggtacagggagtgccgggataattgttggagtatatgttgatgatctgatcgtgacaggagaaagcccaagcgagatcactgcattcaaacaacagatgatgggggagtttgagatgagtgatcttggactgctcacctattacttgggaattgaagtgttgcaaggcactgacgggatcgccatcaagcaggttgcttatgcaaggaagattctgacccagtttaggatgctagattgcaattctacctcaattcctattgaacatcgttcacagttgcacaaagatgctcaaggaagcacagttgatcccacggagtacaggcgagtgataggttgtcttcgttacttgttgcatactcggccggatttgtcctacacagtaggcgtggtgagcagattcatggaacgaccgacagtgatgcatttcaaggcggtgaagcaaattctcagatatctcaaggggacaatcaactgtggactcatgttttctggaggcaatggtgcagtggagattactggtttcacagattgtgatctggccggcgacagtgatgatcgtcggagtactagcggcatggcgttttacttcaacggcagtttggtctcatggagttcacaaaagcagaaaacagtggcactttcgtcctgtgaggctgagttcatggcagccactgcagcagcgtgtcacgctttgtggctgaggggattgttgattgagatgattggtgcagaagccaggccggtgaagctgtatgttgataacaaatcagcaattgcactcatgaagaaccctgtgtttcatgggagaagtaagcacatcgatacccggtatcattttattcgtgagtgtgttgaaagtgggaagattcagattgaattcgtccggactgaggagcagcgggcggatgcgttaacaaaagggttgccagcagcgagattggcgacagcacgacacctgctaggtgttcgtgattttgggccgtag

SEQ ID NO: 14008 - DNA, 5358 bp, Oryza sativa
  Clone ID: TFbOSC900365j.C1.o11.np
agaaaagaaggcatagatgaagaagcatcaacatccaaagaagaagtagaagaaaccaaagcagtcgacttagaatcaacttttcgagaaagaacattcatctcatgtgttttcaattttgtgtaaagtgaatccaaagtcaaaattccgacgttctcggagagtccgattttgcaggagaagactttgaagagttccaaggccagcaaggcaactcctggtttggaatggtatattcctggtttggagatagaactttacagccgagattggttgttcagaatggttgggcctatgcaacacgatgccacgcttcaagcctgagtacttgttcggtactgagggatttgtcctggagttgcgtacgatgtctttcctcataggattcgggactgcccctttgtatgcccagattcctcatgatcgtgatgaagagaagtgtcgggtcaaggtcaccttgaacagtaatcgtgaagatatcccatcagtgatgttcgaggctggagggggaaactgtattcatgcttgtcaggaggtggcaaggattaccataggagagctccgcgaacgctacaatgatcagttggccgacaccgagtatcgctaccatccttgtcaaccccagggaagtggtcgtggcagctaccttgaacttgcaggaattgagaatgatgctaccacaaggcatttggttgagatgctgtgggccatggatgagacccgcgctgagattgtgttagcagcccaagatcacgaagaccggaatcgtggtaagatttgcaagctggaggacaaggtggatcgtttggagaaggaattagccgcattgaagggagaagcaccaccgcagaaggccagggttcgtcttaccgcaaggaagagagctctttttgtccctcgctaccagttggcacctaagatggtgcttactcgcagcaatgggaatggtcccaacaacaacaacaacaacaacaacaacaacaatggagagaatcccacgcttgcccaagtcctggctcaacaggcacagctcatgaatatgatgatgcaccaactacagaaccagcagaaccagggaaacaatcatgcacctccccagaacaagttagcataatttcttcgtgtgaggccgcctactttttctagcactaccaatccagtcgaggctggtgattggctgcatgccatagaaaagaagttggacctgcttcagtgcacagatcaggaaaaagtctccttcgcttcgcatcagcttcatggccctgcctctgagtggtgggatcatttccgtctcaacagaactactgccgaaccaatcacttggcttgagttcactgctgctttccggaaaactcacataccctcgggagtggtgtctcttaagaagaaggagtttagggcgctcactcagggatctcgctctgtcaccgaatatctgcatgaatttaatcgtctggctcgctatgctccgaaagatgtgtgcactgatgatgggcgtcaagagaagttcctggaaggactgaatgatgagttttcttacccattaatgactggggattatcatgatttccagaagttggtggataaggctatacgccaggaggacaagtacaaccatatggagcagaagaaacgtaggattgctcacttcaaagctctacaggggaatagtcagaggccgcgtcttgctatgggacctcaggcagtgttgcagggagggtcttcgtctgttgttcgtccgcaacgtcagttcttcaacaacaatgctggcaacaacaaccgcaaccaagctccacgtcccgttgcaactccagtccagcatcagcctgccaagagggagcaaggcagcaagcctggggtgtgcttcaactgtggtgaacaaggacattactccgataagtgtccgaagccccgccgcgtgaaggttgtccctgcctagagcaactccaccgcaccagcgacaaaggctcgtgtcaaccatgttgctgctgtagaagcccaaggtgctctagatgtgattttgggtacgttccctgttaactcaattcctgcaacagtacttttcgattctggtgctacgcattcttttttgtctatgagttttgcgggaaatcatgggatgcaggtagaagatcttagacgtcctttgatggttagtactccgagtaagcaagcactcacatcacaacgtagcccctctgtcagaatagagattcaaggagtaccatttctagccaaccttattctgttagaatccaaagatcttgatgtcatcctagggatggactggttagccagatataaaggtgtgatagactgcgccaatagaaaagtaactctcaccagcaatgatggtcaagttgtaactgttcatgcattgccttctgagcctttatggtcaagtctgaaccaaataactttggaagagattcccatagtacgggagtacccggacgtgttcctggatgatttacctggtatgccgcctaaaagagatatagaattcagaatagatctggtaccaggaacaaccaatccataagagaccttatagaatggcagccaatgaattagcagaggacaagaggcaagtagatgatttgcttcagaaaggatacatcagaccaagttcgtctccatggagagctccagtcatctttgtggaaaagaaagatcatacccagaggatgtgtgtggactatcgtgcactaaatgatgtgactatcaagaataagtacccattgcccagaattgatgatttgtttgatcagcttaaaggtgccaccgttttctccaagatcgatcttcgatcaggttatcaccagttgaggatcaaagaggaacatatacctaagacggtttttaccactcggtatgggttgtttgaatgtacagttatgtcttttggacttaccaatgccctcgctttcttcatgaacttgatgaataaggtgtttatagaatacctagacaagttcgtggtagtctttattaatgacattcttatctactcccgaaccaaagaagagcatgaagaatatcttcgccatgcactagagaagctacgagaacatcaactgtatgccaagtttagcaagtgtgaattttggttgtctgaaataaaattccttggtcacatcatctcagccggaggagttgccgttgatcctagtaatgtggaatccgtaacgaactggaaacaaccgaagacagtttcagagattcgtagtttcatgggtctcgcaggttattactggaggtttatagagaatttctccaagattgctaagcccatgacacgactgcttcagaaaaatgtgaagtacaagaggtcagaagaatgtgagcagagctttcaagagttgaaaagtcgcttaatatcagcacccattttgattttgcctgatccaaagaagggtttccaagtgtactgcgacgcatctaagcttgggttaggttgtgttctgatgcaagatgggaaggtggttgcctatgcaggttgcctatgcatctcgtcagttacgtccgcatgagaagaactaccctactcttgatcttgagttagccgcagtggttcatgcgttgaagatttggcgtcactatctctttggtactcgtacggaggtgtacacggatcacaagagtttgaagtatatctttacccagccggatctaaacatgaggcagcggagatggttggaattgattaaggattatgacatgggaattcattaccaccccggaaaggccaatgttgtagcagatgctctcagcaggaaaggttattgcaatgctacggaaggacgacagttgccgttggagttatgcaaggaatttgaaaggctgaatttgggaattgtcagtagaggtttcgttgcagctttagaagcaacgcctactctcattgatcaagttagagaagctcaagtcaatgatcctgatattcaagagatcaagaagaatataagaagaggaaaagctatcagtttcttggaagatgagcaaggaactgtatggttgggcgagagaatctatgtcccagagaacaaggagttgaaagatgtaattctgaaagaagctcatgacactttatactctattcaccctggtagtaccaagatgtaccaagatctcaaggagaaattttggtgggcaagtatgaagcatgagatagcagagtatgtagctgtgtgtgatgtttgtcagcgagtcaaggcagaacatcagaaacctacaggtctgctgcaacctttaaaattaccagaatggaagtgggaggaaataggaatggatttcatcactggtctacccagaacgtcatcgggccatgactctattttagtgatagtcgacaggcttaccaaagtggctcatttcatcccagtgtggacaacatattccggaagccgtttggcggaattgtatatggcaaggattgtgtgtttgcatggcgttcctaagaaaatagtatccgatcgaggtaaccagtttacttcaaagttttggaagaagcttcaggaagagatgggttccaagctgaacttcagtaccgcttatcatccgcagacagacggacaaaccgaaagggtaaatcagattttggaagacatgttgagagcttatgctttagacttcggtggaagttgggataagaatctgccttacgcagaattctcgtacaacaacagttatcaagccagtcttcaaatggctccttatgaagcgttgtatggtcggaagtgccgcactccgctattctgggatcagacgggtgaacgtcaggttttcaggactgatattctgagggaagtagaagagaaagtaaagatcattcaaaaaagattgcgtatagctcagtctcgtcataagagctatgctgataatcgccgtagggatctgagttttgaggaaggagatcatgtgtaccttcgtgtcacgcctcttcgaggggttcatcgttttcacaccaaaggaaaattggcaccgtgttttgcgggaccttacatgattgtcagtagaagaggagaggttgcttatcagttggagttacctcaatcattggcaggtgtttataatgtgttccatgtgtcacaattgaaaaagtgtttaagggtacccactgaagaagctaatcttgagcaaatagaaatccaaaaggatctgacatatgttgagaaaccaatccgtatcctggagacagatgagataaggaccaagaatcgggttattcgtttctgcaaggtccaatggagtaatcacacagaggaagaagctacctgggagcgagaagatgaattaaagtcagctcatccgcatcttttcgacagttcttccgaatctcgaggacgagattctgtt

SEQ ID NO: 14009 - DNA, 2799 bp, Oryza sativa
  Clone ID: TFbOSC400321j.C1.o28.fg
atggatcatggggcttatgagccaattatgttatcaattggtccataccaccatggattgtcgtacttgctagcctttgagaaggaaaaatggaattgccttgatctttttcttaaactgaatcgtgaaataaagttggaggactacctaaatttggtcaaagatttagaggaggaagcacgggcatgctatgaagacattgacatgcaacatgacaaatttctgcagatgctactccttgattcttgcctttttgttcaccatttcagaggtttagagggaatacttccatccactttgggtgcaaatatatgtagtgctgacagttcggacattataatggaaagaacaatacacaaaagcactacaagtcaaggtaattttggtgagcaatgcagcagggataactctatctgcacacagagagaacttgtccttgctggttcaagtcgggaagttactagtcaaggaactgactttgatcacactgaggaacttgaatcttctcaatgtaataattggcaaattggaacctggtttgacagctgtattgaacaagacctgatgctactagagaaccaaattcctttctttattgttaggaggatatatgaactttttgctggaaatgagaggcctatttcatttctcacagacaaagtagctcaatcgttggagaacttcatacaataccatccaagagcaatccaggaagcacatcggcctaaagatttccatcatatgctgcatttgttccagatgtacctcaagcctagtaaaaagctggttgagggttcacaatacctggagagaggaagatattttcattctttcgctaatatatgctataggtatttgaaaattggacgtaagcttgccgatagcaatcacgatatgtcaccagatcctttgcttaactgctttcaggatcaccatccacgtattcgtggccgtcgggcagtgcaataccatcaagctggagttcaattcaagaaaaagtcatttgataggaataatccccattctctgttagatattagctttgacaatggtactttgatggttccttatttgtttgttgatcagagcaccgtctcccattttaggaacttaattgcatttgagcagacatgtccccagtttggaaatgatgtgactgcatattctgctttcatgtctttccttctgtgtagagcagatgatattgcttttcttggtcgcaaaggaataattgtacatcatttatgcagtgatggggaggtgtcagctatttttgctaagcttggtaaaaatgttgattttgatttgaatgggagacacttccttaaacatgtatgccatgcaatggaggaacactaccaaagtcgtattaacagtgagtgcaattccatcgttacacactggaggaaaatgattaacttgttgaatttcccaacatcagttgtcaaggccagcctcatcaatgcacctcctcatggcattgcccatggacaaggtcgaatttctaaagatgacgtcatgtcaattgttccacagaacccaaatgcagatgaggggcctgaagcctggtccggttcaatactctgttgtgaggaagaaatggatcctaccatgcaaggggaaggtgttgtgggaagtcaggaaaaagaagtagtgattgcttcatcatcccttgtcataaaggatgagatgaaagatttgttggaggatctagtaaagttgggaatgataggtactagaggtggaggatcagccgaattgaaactagaattgatgccaaatgaattgagattggaaggaagtaagaattgtttgagttggtcaaggagggcccaactaatgttgagggcaaaaggggtggatcattttttgcaggaggattataaagagcctgctgataaggaaagttcagcttggaggatgtggaatactacaaattcaaccgtggtgtcatggttgaggaattcggtggctccatctattgctcggatgctagaaaccattcaaaatgcagcagttgtatggaaaacattgagcagcatgtactcagaagagggaagtgtaatgatgatggttgaggctcaaaacaaggggctgaacaatgagtttgaggatagaagagcagctatgtttcaccaggctactttgcctactatggaagaggccatttcagccatggtacaggaggaaatgaggttaaaattgatgaggggtacaaatcctatgggatcagcatacattgtagctgatgatagggaatgctacaattgtggccaagtgggtcatgtgagctgcaattgtcccactccccgaaacagtggtggtaggggatcaatgcgaggatggtatggtggatttggtggaaatcatggtggctttggaggaagccatggtggtagaggaggtgaccgtggaggtcgcattggagatcatggtagaggccgaggtgcacctcaggctaatgcagctatggaggatggtaaagctatatccctaacggttaaccttctctcggttagctcggctattgaccaattcaagtgcattgttgcatttgatgagaactcatgtcttttccaggagaaggggactggaaggaggattgggactagagggtcttcggtgccaatattgggaactcctgactctgactctgattcgggttctgggctggcatctggacttgcacctgcggttggtgacattgacgcgactcctgacattgccgttgcatctggtatatttggtaccgacgtcgcatctgttgtaacaactcttccactgtttgagtttgattag

SEQ ID NO: 14010 - DNA, 3981 bp, Oryza sativa
  Clone ID: TFbOSC400685j.C1.o16.np
atgcttggtgctaagaaactcctgaactgcattcaggacccaactattgcaacatcagctggaggagttaataatttaccaacttcagccgagaaaaatcaggcactgcatttcctgatgcaccatttgaatactactctcaagaatgagtatatgactgaggaagatccgaaggtcctttgggactcactgaaggatcgctatggccatcaagtaaaggctttgctcccaaaagcaaaacgtgagtggcttcacttatgtttccaggattacaaatctgtggagtaatataactcagttcttcaccgcattgtcacttgtcttaagctatgtggagagaaaatcactgatgctgacatgatagacaaaactttgtccaccttccatgccaatcatgtgaatattcagaggcaataccgccaggctaaatacgagaagtattctgaactgatctccgtgctcatggaagcgcaaggagaagatgagacacttgttgaaaatcatacgtctcgccccactggaagttcagcagcacccgaagcaaatgctagctcctttaagaaggggaaaaaccagaataaccagaacaaagggaagaatttctggaaaaataatggtaaagttaacaagatgtctttcaagaagaaaggaaatcagaatagtaagtctaagaagggctctactagtggtgaatatggaaagcaatatcaggtatgcttcaagtgtggcactaggggacactggtctcgcatttgccgcacccctaagcatctcattgagctttatcaagagaagcacgggaagaagaagtcagagcatgagtcacacttcactgttgagatccagcactcagaggagaagatggctgccatgcatatcgacaagcagactagtcaaatcgctactattgccggaagcaatgcacacatcgtcggagtgggacgagcatcagtagttctcccacatagtaccaagatcattataaattatgctctattatatccagagtccagtcgtactctactaagctttaaagatatccgtgctaatggttatcatgtagaaaccaaagatgagaataaactcgaatttcttctcataacgaaattagacggaaatcgtaagactattgttgaaaaactcccttccttgaaatctggcctgtactacactcatataaaacccgaaaatgttgcactgaaaacaatatttaaaaatcccgagtcatacagaatatggcatgataggttaggacatccaggtctagggatgatgagaagaatcatctcaacttcaaatggctataatttacgacctaacgatttcccaaaccaagaagattttgtttgcactgattgtgcaacatggaaattaatcgttagaccctctaatctaaaggtgaacgcagaatcaccagtattcttgcaacaaatacagggagacatatgtggaccaattaatcccatgtccggatcattccgtttcccgggtaaccggatacaatccattagaatggacaatgccggggagtttacctctaaggtatttaatgaatattgcatggctttgggaattaaagtggaacattctgtaccacacgtccacactcagaatggtctcgccgaatcattaattaagaggattaagcttatcgctaggccattgctactgcatagcaacctaccaactacatgttggggacacactgttttgcatgcagcggcgttacttcaaatcagacctactgcatacaatgttgtatcccctatgtagcttacacgtggatatgcaccaaatatttcccatctacgcaaatttggatgtgctgtatacgtccctataccgccacctaagcgtacgtcaatgggtcctcatagaaaattgggaatctatgtaagatttgaatctccgtctatcattaaatttttagaaccattgacaggagacctacatatgggtcgatacgctgattgtatatttaatgaagatcatttcccggcattagggggaggaaagtacctacagaaggtcgaatgccgcgaaattgagtgggaaactaaaaatctcctacatttagatccacgtactaaggaatctgaccaggaagtttagaccataattgattcgcaaagaattacaaataatctgccagaagccttcactaacctaaaggggatcatgaaatctcatatacctgctgtgaatgcaccggaaagagtagaaatacctcctgacgcagaggaactggttttcaaattaatttctacatctaccccaacttctaggaagaaggggagaccaccggttgcacacaaccaaactaaagtttctaggagacgtcctacgaaacaacagattggacagaataccacagcaccagagaatagtgaaggagctcaccaggtagatgagccacctgcagtgacatgcccggatggcaatgaacccagtgagaatgcgcgcgcaattactactagcactaggagaccggaaattcctgacttaaacattgcgggaaacaatgaagatcaggaatgtgaaagaatagaggaaatatccaccagttatgtggatacaggtgaaacatacaatagagagactactattgtcgacatatactttgccgaaaagatcgctaagatcattgatctggatccagaaccaaagtccatggcagaatgcaaaaaagcgttcagactgggtcaaatggaaagaagcaataaaggcagagttaatctcgctcaataaaagaaaattattcggtcctattgatcgtacccccgtagggatatcctctgtaggatataaatgggtgttcgtccgaaaacgggatgagaacaaccaggtggttcggtataaagcaagattagtagcataagggtttacgcagagacctggcatcgatttcgatgaaaccaattcacctgtaatggatggaattacattccggttcttaatatctatggcagtcaatttgaacttagaaatacagttgatggatgtagtgaccgcatatttatatgggtcattggattttgaaatctatatgaaagttcctgatgggattcaagttcctgaagaaaaaaacacaacatatacagtgttaaattgcaaagatcattgtatgggttaaaacaatccggtaggatgtggtacaaccggctcagtgaattcctagaaggaaaaggattcatcaagaatgatgactgtccctgtaagactaaatattgcttaggtctgcagcttgagcacactcatgaaggggtattgttacaccagtctgcatatatccagaagataatggagaaatttaatatgaaggatttatatccgacgagaacccccatggtagtaagatctctagcagtagagagtgacccatttagaccataggaaaataacgaggaattattgggacctgaatgtccatatttaagcgctattggagctttaatgtatctcgcgaatggtaccaggcctgatattgcatttgctgttaacctacttgcaaggttcagtttggctcctaccaaacggcatttgaatggcgttaagcaaatcttccgttatttacgtggcacacaagatctcggtttattctttagaaaaaatcaagatttgaccatggtgggatatgctgatgctggatatttgtcagacccccataaagcattgtcacagactgggtatgtgtttctctgtggtggtacagccatctcatggaagtcgacgaagcagacgatggtcgcgacatcaacaaatcacttggagattatagcattatttgaagcgagcaaggaatgcatgtggttgaggagggtgatacaacatgtacagaatacatgtgggctgaatatcacaccaactccaaccattatttttgaagataattcagcttgtgttgcacaaatacaaacgggttatgtgaagacgagtctcacaaaacatatatcgcctaaattcttctatatgcatgaattg

SEQ ID NO: 14011 - DNA, 3954 bp, Oryza sativa
  Clone ID: TFbOSC401807j.C1.o5.np
atgcttggtgctaagaaactcctgaactgcattcaggacccaactattgcaacatcagctggaggagttaataatttaccaacttcagccgagaaaaatcaggcactgcatttcctgaggcaccatttgaatactactctcaagaatgagtatatgactgaggaagatccgaaggtcctttgggactcactgaaggatcgctatggccatcaagtaaaggctttgctcccaaaagcaaaacgtgagtggcttcacttacgtttccaggattacaaatatatggagcaatataactcagttcttcaccgcattgtcacttttcttaagctatgtggagagaaaatcactgatgctgacatgatagacaaaactttgtccaccttccatgccaatcatgtgaatattcagaggcaataccgccaggctaaatacgagaagtattctgaactggtctccgtgctcatggaagtgcaaggagaagatgagacacttgttgaaaatcatacgtctcgccccaatgaaagttcagcaacacccgaagcaaatgctagctcctttaagaagggggaaaaccaaaataaccagaacaaagggaagaatttctggaaaaatggtggtaaagttaacaagatgtctttcaagaagaaaggaaatcacagtaagtctaagaaaggctctactagtggtgaatatggaaagcaagatcaggtatgcttcaagtgtggcactaggggacactggtctcgcatttgccgcacccctaagcatctcattgagctttatcaagagaagcacgggaagaagaagtcagagcatgagtcacacttcactgttgagatccagcactcagaggagaagatggctgccatgcatatcgacaagcatactggtcaaatcgctactattgccggaagcaatgcacacatcgttggagtgggacgagcaacagtagttctcccacatggtaccaagatcattataaataatgctctgttatatccagagtccagtcgtactctactaagctttaaagatatccgtgctaatggttatcatgtagaaaccaaagatgagaataaactcgaatttcttctcataacgaaattagacggaaatcgtaagactgttgttgaaaaactcccttccttgaaatctggcctatactacactcatataaaacccgaaaatgttgcactgaaaacaatatttaaaaatcctgagtcatacagaatatggcatgacaggttaggacatccaggtctagggatgatgagaagaatcatctcaacttcaaatggccataatttacgaactaacgatttcccaaaccaagaagattttgtttgcactgattgtgcaacagggaaattaatcgttagaccctctaatctaaaggtgaacgcagaatcaccagtattcttgcaacgaatacagggagacatatgtggaccaattaatcccatgtccggatcattccgtttcccggataaccggatacaatccattagaatggacaatgccggggagtttacctctaaggtatttaatgaatattgcatggctttgggaattaaagtggaacattctgtaccacacgtccacactcagaatggtctcgccgaatcattaattaagaggattaagcttatcgctaggccattgctactgcatagcaacctaccaactacatgttggggacacgctgttttgcatgcagcggcgttacttcaaatcagacctactgcatacaatgctgtatcccctatgcagcttacacgtggatatgcaccaaatatttcccatctgcgcaaatttggatgcgctgtatacgcccctataccgccacctaagcgtacgtcaatgggtcctcatagaaaattgggaatctatgtaggatttgaatctccgtctatcattaaatttttagaaccattgacaggagacctacatatgggtcgatacgctgattgtatatttaaggaagatcatttcccggcattagggggaggaaagtacctacagaaggtcgaatgccgcgaaattgagtgggaaactaaaaatctcctacatttagatccacgtactaaggaatctgaccaggaagttcagaccataattgatttgcaaagaattgaaaataatctgccagaagccttcactaacccaaaggggatcatgaaatctcatatacctgttgtgaatgcaccggaaagagtagaaatacctcatgacgcagaggaaccggttttcaaattaatttctacatctaccccaacttctaggaagagggggagaccaccggttgcacacaaccaaactaaagtttctaggagacgtcctatgaaacaacagattggatagaataccacagcaccagagaatagtgaaggagctcaccaggtagatgagccacctgcagtgatatgcccggatggcaatgaacccagtgagaatgcgcgcgcaattactactagcactgggagaccggaaattcctgacttaaacattgcgggaaacaatgaagatcaggaatgtgaaagaatagaggaaatatccaccagttatgtggatacaggtgaaacatacaatagagagactactattgtcgacatatactttgccgaaaagatcgctaagatcattgatctggatccagaaccaaagtccatggcagaatgcaaaaagcgttcagactgggtcaaatggaaagaagcaataaaggcagagttaatctcgctcaataaaagaaaagtattcggtcctgttgatcgtacccccgtagggatatcccctgtaggatataaatgggtgttcgtccgaaaacgggatgagaacaaccaggtagttcggtataaagcgagattagtagcacaagggtttacgcagagacctggcatcgatttcgatgaaacctattcacctttaatggatggaattacattccggttcttaatatctatggcagtcaatttgaacttagaaatgcagttgatggatgtagtgaccgcatatttatatgggtcattggattctgaaatctatatgaaagttcccgatgggattcaagttcctgaagaaacaaaatgcaacatatacagtgttaaattgcaaacatcattgtatgggttaaaacaatccggtaggatgtggtacaaccggctcagtgaattcctagaaggaaaaggattcatcaagaatgatgactgtccctgtaagactaaatattgcttaggtctgcagcttgagcacactcatgaaggggtattgttacaccagtctgcatatatccagaagatattggagaaatttaatatgaaggattcatatccgacgagaacccccatggtagtaagatctctagcagtagagagtgacccatttagaccacaggaaaataacgacgaattattgggacctgaatgtccatatttaagcgccattggagctttaatgtatctcgcgaatggtaccaggcctgatattgcatttgctgttaacctacttgcaaggttcagttcggttcctaccaaacggcattggaatggcattaagcaaatcttccgttatttacgtggcacacaagatatcgatttgaccatggcgggatatgctaatgctggatatttgtcagacccccataaagcattgtcacagactgggtatgtgtttctctgtggtggtacagccatctcatggaagtcgacgaagcagacgatggtcgcgacatcaacaaatcactcggagattatagcattatttgaagcgagcaaggaatgcatgtggttgaggagggtgatacaacatgtactgaatagatgtgggctgaatatcacaccaactccaaccattatttatgaagataattcagcttgtgttgcacaaatacaaacgggttatgtgaagacgagtctcacaaaacatatatcgcctaaattcttctatatgcatgaattg

SEQ ID NO: 14012 - DNA, 1095 bp, Oryza sativa
  Clone ID: TFbOSC422281j.C1.o1.fg
atgactgatattgctaagagagattttgctgaactagcagtcagcggcaagaattacctgacatgggcactggatgccaaaatcatgcttggtgctaagaaactcctgaactgcattcaggacccaactattgcaacatcagctggaggagttaataatttaccaacttcagctgagaaaaatcaggcactgcatttcctgaggcaccatttgaatactactctcaagaatgagtatatgactgaggaagatccgaaggtcctttgggactcactgaaggatcgctatggccatcaagtaaaggccttgctcctaaaaacaaaacgtgagtggcttcacttacgtttccaagattacaaatctgtggagcaatataactcagttcttcaccgcaatgtcacttgtcttaagctatgtggagagaaaatcactgatgctgacatgatagacaaaactttgtccaccttccatgccaatcatgtgaatattcagaggcaataccgccaggctaaatacgagaagtattctgaactggtctccatgctcatcgaagcacaaggagaagatgagacacttgttgaaaatcatacgtctcgccccactggaagttcagcagcacctgaagcaaatgctagctcctttaagaaggggaaaaaccagaataaccagaacaaagggaagaatttctggaaaaatggtggcaaagttaacaagacgtctttcaagaagaaaggaaatcagaacagtaagtctaagaagggctctactagtggtgaatatggaaagcaagatcaggtatgcttcaagtgtggcactaggggacactggtctcgcatttgccgcacccctaagcatctcattgagctttatcaagagaagcacaggaagaagaagtcagagcatgagtcacacttcactgttgagatccagcactcagaagagaagatggctgccatgcatatcgacaagcaggtcgacgagaaggcagtggttgcaatgcacatcgatgataagatggaaaagaatgcagcagacgcagagctgaagctctcagatgatctcatggactctgatcagttatatggggacatttaa

SEQ ID NO: 14013 - DNA, 3953 bp, Oryza sativa
  Clone ID: TFbOSC422283j.C1.o4.np
atgcttggtgctaagaaactcctgaactgcattcaggacccaactattgcaacatcagctggaggagttaataatttaccaacttcagctgagaaaaatcaggcactgcatttcctgaggcaccatttgaatactactctcaagaatgagtatatgactgaggaagatccgaaggtcctttgggactcactgaaggatcgctatggccatcaagtaaaggccttgctcctaaaaacaaaacgtgagtggcttcacttacgtttccaagattacaaatctgtggagcaatataactcagttcttcaccgcaatgtcacttgtcttaagctatgtggagagaaaatcactgatgctgacatgatagacaaaactttgtccaccttccatgccaatcatgtgaatattcagaggcaataccgccaggctaaatacgagaagtattctgaactggtctccatgctcatcgaagcacaaggagaagatgagacacttgttgaaaatcatacgtctcgccccactggaagttcagcagcacctgaagcaaatgctagctcctttaagaaggggaaaaaccagaataaccagaacaaagggaagaatttctggaaaaatggtggcaaagttaacaagacgtctttcaagaagaaaggaaatcagaacagtaagtctaagaagggctctactagtggtgaatatggaaagcaagatcaggtatgcttcaagtgtggcactaggggacactggtctcgcatttgccgcacccctaagcatctcattgagctttatcaagagaagcacaggaagaagaagtcagagcatgagtcacacttcactgttgagatccagcactcagaagagaagatggctgccatgcatatcgacaagcagactggtcaaatcgctactattgccggaagcaatgcacccatcgtcggagtgggacgagcaacagtagttctcccacatggtaccaagatcattataaatgatgctctattatatctaaagtccagtcgtactctactaatctttaaagatatccgtgcttatggttatcacgtagaaaccaaagatgagaataaactcgaatttcttctcataacgaaattagacggaaatcataagactgttgttgaaaaactcccttccttgaaatctggactgtactacactcatataaaacccgaaaatgttgcactgaaaacaatatttaaaaatcctgagtcatacagaatacggtctagggatgatgagaagaatcatcttaacttcaaatggccataatttactaactaacgatttcccaaaccaagaagattttgtttgcactgattgtgcaacagggaaattaatcgttagaccctctaatttaaaggtggacgcagaatcaccagtattcttgcaacgaatacagggcgacatatgtggaccaattaatccaatgtccggatcattccgtttcctggataaccggatacaatccattagaatggacaatgccggggagtttacctctaaggtatttaatgcatattgcatggctttgggaattaaagtggaacattctgtaccacacgtccacactcacaatggtctcgccgaatcattaattaagaggattaagcttatcgctaggccattgctactgcatagcaacctaccaactacatgttggggacacgctgttttgcatgcagcggcgttacttcaaatcagacccactgcatacaatgttgtatcccctatgcagcttacacgtggatatgcaccaaatatttcccatctgcacaattttggatgtgttgtatacgtccctataccgccacctaagcgtacgtcaatgggtcctcatagaaaattagtaatctatgtaggatttgaatctccgtctatcattaaatttttagaaccattgacaggagacgtacatacgggtcgatacgctgattgtatatttaatgaagatcatttcccagcattagggggaggaaagtacctacagaaggtcgaatgccgcgaaattgagtgggaaactaaaaatctcctacatttagatccacgtactaaggaatctgaccatgaagttcagagcataattgatttgcaaagaattgcaaataatctgctagaagccttcactaacccaaaggggatcatgaaatctcatatacctgctgtgaatgcaccggaaagaatagaaatacctcatgacgcagaggaaccggttttcaaattaatttctacatctaccctaacttctaggaagagggggagaccaccggttgcacacaaccaaactaaagtttctaggagacgtcctacgaaacaacagattggacagaataccacagcaccagagaatagtgaaggagctcaccaggaagatgagccacctgcagtgatatgcccagatggcaatgaacctagtgagaatgcgcgcgcaattactactagcactgggagaccggaaattcctgacttaaacattgcaggaaacaatgaagatcaggaatgtgaaagaatagaggaaatatccaccaattatgtggatacaggtgaaacatacaataaagagactactattgtcgacatatactttgccgaaaagatcgctaagatcattgatctggacccagaaccaaagtccatggcagaatgcaaaaagcgttaagactgggtcaaatggaaagaagcaataaaggcagagttaatctcgctcaataaaagaaaagtattcggtcctgttgatcgtacccccgtagggatatcccctgtaggatataaatgggtgttcgtccgaaaacaggatgagaacaaccaggtggttcggtataaagcgagattagtagcacaagggtttacgcatagacctggcatcgatttcgatgaaacctattcacctgtaatggatggaattacattccggtttttaatatctatggcagtcaatttgaacttagaagtgcagttgatggatgtagtgactgcatatttatatgggtcattggattctgaaatctatatgaaagtttccgacgggattcaagttcctgaagaaacaaaacgcaacatatacagtgttaaattgcaacgatcattgtatgggttaaaacaatccggtaggatgtggtacaaccggctcagtgaattcctagaaaaggattcatcaagaatgatgactgtccctgtaaggctaaatattgcttaggtctgcagcttgagcacactcctgaaggggtattgttacaccagtctgcatatatccagaagatattggagaaatttaatatgaaggattcatatccgacgagaacccccatggtagtaagatctctagcagtagagagtgacccatttagaccacaggaaaataacgaggaattattgggacatgaatgtccatatttaagcgcaattggagctttaatgtatctcgcgaatggtaccaggcctgatattgcatttgttgttaacctacttgcaaggttcagttcagctcctaccaaacggcattggaatgacattaagcaaatcctccgttatttacgtggcacacaagatctcggtttattctttagaaaaaatcaagatttaaccatggcgggatatgctgattctggatatctgtcagacccccacaaagcattgtcacagactgggtatgtgtttctctgtggtggtacaaccatctcatggaagtcgacgaagcagacgatggtcgcgacatcaacaaatcactcggagattataggattatttgaagtgagcaaggaatgcatgtggttgaggagggtgatacaacatgtacagaatacatgtggactaaatatcacaccaactccagccattatttatgaagataattcagcttgtgttgcacaaatacaaatgggttatgtgaagacgagtctcacaaaacatatatcgcctaaatcttctatatgcatgaattg

SEQ ID NO: 14014 - DNA, 4359 bp, Oryza sativa
  Clone ID: TFbOSC400761j.C1.o70.fg
atgtcggacttagggggaaagaacggggaaaatggaaatgaatatggagcgagcagcaagggaactccatcacccaagggagctactataccttttgattacagcaaacttaccattccccctcacaactttgtctccgtgcctttcgggcgtgctcctcaatttgatgggacacattacgccgcttggaagcacaagatgaagttgcatctaatctctttgcatccaagtatttggaaagttgtttgtacaggtgttgatgtaccccatgatgacatggagctcacttcggagcaagagcaactcatccaccgcaatgctcaagcttccaatgcaattctctctgccttgagtccggaggagttcaacaaggttgatgggcttgaggaggccaaggagatatgggatactttgcaattggctcatgagggatcacccgccgttcctgaggccaagattgagttgttggaaggaagacttggaagatttgtgatggatgacaaacttctccgtgcttttggtccaagaaatcccactcttgtatcaatgatacaagaaaggaaagacttcaagaggctcaccccaagtgatattcttagaagaattgtgtctcatgagatgcaagaagaggaagctcgtgaagtgaggcaaatggtgaagaatgccgccatgatcaaaaatcaagaagtagttttgaaggcaaaacaagaagaagagtcaagttgtgaagaaagtgaagatgaagagatggcttttattgtcaagatattcaagcactttcttcgcaagagtggctatggcaaagggaggaaagatgatgacaagggaaagaggcaatcaaagagagcttgcttcaattgtggcgaatatggccacttcattgccgattttcccaagtcaaatgaagctaaggctaagggaggcaataagaagccggagcatgctcatgtggcggaggtgtggtactccggagatgaagaagatcccgaggtcaagcccaagcccaagccaaaagacaaggttgaaggagaagatggtgttgctatcgtcgccttcaagtcatcctcttcaagcaaggagcgtctcttcaataacttgagtgatgacgacgatgactcctaccactactcttgcttcatggcccaaggccgcaaggtgatgactcaaaagccctctcacacctctcttaatgttgattctagtgatgaggaaactagccttagggttgtcaatgaaactcttcaagagaaatttgctaatttagacaaaagtcataaagatcttgaagttcaatttgacactctttggaatagcacttctcaaccaaatgtggtttctaattcttccaacccttctactagcaatggttgtgctaggtgttacaatattgatttgaactcttatgctactaatgttgatgctatgcaagctcttaagaaagagaatgagaagttgggcacattggtgaaatatggatgcatgaagacataccattcaaaagatgccctttacaagaccatcaccgctcatcctaacaaggatggacacgggctcaagttttctggcggaagtcctgtgtctaagcgtgtgatgataaatgggaaagaatgcttgatgtttgtgagagaaggcaaagctccacaagcaagtgaggtgacttgccccttcactggtcagacacccagaagttccgggcaaaatgaccagaagttcctgtcctgtaagacaggaagttccggacattttgtcaggaagttccgggcttctgatagaccgaagggggtgaccggaagttccgggtataatgccaggaaattccggccagagggtctttactatgattcatatgcatactcctccggtggctcaagttgggttgtggacagtagctgcaccaatcatatgacgagagagaggcgtatgtttacaagtcttgatgaggagggtggaagtcgtaagaatattgtctttggagatgatggtaaaggaaaggtaatgggtctcggtaagattgccatttccaagaatcaatctctatctaatgtcctccttgtcaattcattaagctacaatttattatccgtgtctcaattgtgtaagttaggatttaattgcttgtttaccgatgtggatgtgaccgtttttaggcgagatgactcttccatagcattcaagggtgtgttaaagggtgatctatatcttgttaatttcgacatggatagagtgaatccggaggcatgcttgattgctaaatcttctatgggttggctatggcaccgtaggctagcccatgttggaatgaggaatttggcatctcttctaaaaggggaacacattcttggtctatctaatgtttcttttgagaaagatcgtgtgtgtagtgcttgccaagccgggaagcaagttgggagtccacatgccataaaaaacatcatgactacaacaagaccactcgagcttcttcatatggatttatttgggcccatggcctacataagcattggaggtaacaagtatggtttcgttattgttgatgatttttcacgcttcacttgggtgtactttctccatgacaaaagcgaagctcaagatgtcttcaagcgcttcgcaaagcaagctcaaaacctctatgatctcactatcaagaagaacactcaagtggaggaatttcttgatgaagaaggaatcaagcacgagttctccgccccctatgatcctccccaaaacggcattgttgagaggaagaaccaaaccctcattgaagccgcaagggcaatgcttgatgagtacaagacttcggatgtcttttgggcggaggccgtgagtaccgcatgtcataccatcaaccgcttgtacctccacaagatcctaaagaaaacttcatatgagctcttgagtggtaagaagcctaatgtttcatattttcgtgtctttgggagcaaatgttttattttaagtaagaaacctcgctcatctaagttctctcctaaggtggatgagggattcttacttggctatgaatcaaatgcacatgcctatcgtgtcttcaacaaaacctccggtattgttgaagtcactagggatgtgacatttgatgaatctaatggctcccaaggagagcaagttgttgtacatgttgtaggtgatgtggatccaagtcaagctataggcactaaggctattggagacatacgaccaatcgagacgcaggatgaccaagaagatagggatcaacctccgtcatcgacatccaatagccctacaagtgttgtgtctgctgagccggaagttccgagtcctattgaccggaacctccggacatctccaggcccggaagttccggattttacagtccggaacctccggacctgtggcagtgaagacgtgccaacggcacaggtcccctcagtgcaccatccaaggatacatcacactgtccaaagagatcattccgtcgacaacatacttggtgacataagaaaaggggtaactactcgctcttgtgtcgcaggtttttgtcaacacttctcgtttgtctcttctttggaaccaatcagggtggaagatacgcttggtgatccagattgggtgatggccatgcaagaggagttaaataacttcactcgcaaccaaatatggactttggtggagagacccaagcaaaatgtcatcggtaccaagttattccaaatggatatcaagagtgcctttctcaatggacctatctcggagttggtctatgtggagcaaccaccggggttcgaggatccaaagttgccaaaccatgtgtacaagctccacaaggcgctctacgggctcaagcaagcccctagagcttggtatgaatgtctccgaaattttcttttgaagaatggtttcgaaattggaaaggcggatactactctcttcactaaaaaatttaagagtgatttattcatatgccaaatttatgtcgatgacataatatttggttctactaatgcctctttttgtgaagaatttagtagtatcatgactaaaaggttcgagatgtctatgataggcgagttgaccttcttcctcgggctacaagtgaagcaagcacaagaggacaccttcatctctcaaaccaagtacgtgaaagacatactcaagaagtttgggatggaggatgccaaacttatcaagacgcccatgcctactaatggccacctagacctcgacgataatggtaaatatgtggaccaaaagggttgtgactttgaggttttgggctattccgattcggattatgccgggtgtaaggttgatagaaaaagcacaaccgggacttgtcaatttcttgggccgtcccttgttaattggtcctccaagaagtaa

SEQ ID NO: 14015 - DNA, 5802 bp, Oryza sativa
  Clone ID: TFbOSC401324j.C1.o2.fg
atgaagttgcatctaatctctttgcatccaagtatttggaaagttgtttgtacaggtgttgatgtaccccatgatgacatggagctcacttcggagcaagagcaactcatccaccgcaatgctcaagcttccaatgcaattctctccaccttgagtctggaggagttcaataaggttgatggacttgaggaggccaaggagatatgtgatactttgcaattggctcatgagggatcacccgccgttcgtgaggccaagattgaattattggaaggaaggcttggaagatttgtgatggatgacaaggagacaccacaagaaatgtatgataggatgatgatccttgtcaacaagattaaaggacttgggagtgaggacatgacaaatcactttgtggtcaagagacttctccgtgaatttggtccaagaaatcccactcttgtatcaatgatacgggaaaagaaagacttcaagagactcaccctaagtgacattcttggaagaattgtgtctcatgagatgcaagaagaggaagctcgcaaaacaagaagaagagtcaagagattcaagcactttcttcgcaagagtggctatggcaaagggaggaaggatgatgacaagggaaagaagcaatcaaagagagcttgcttcaattgtggcgaatatggccacttcattgccgattttcccaagtcaaatgaagctaaggctaagggaggcaagaagaagccggagcgtgctcatgtggcggaggcacacatgccggaggtgtggtactccggagatgaagaagatcccgaggttaagcccaagcccaagccaaaagacaaggttgatggagaaggtggtgttgctaccgtcaccttcaagtcatcctcttcaagtaaggagcgtctcttcaacaacttaagtgatgacgacgacgactcctaccactactcttgtttcatggcccaaggccgcaaggtgatgactcaaaagccctctcacacctctcttgatgttgattctagtgatgaggaaagtgataatgaattagatgatgtgcttaagagctttagcaaacccgctatgcaacatttggctaagctaatgagagctttggatagtaaagaacaatcactcgaaaggcaagaagaattgcttattcttgaggtgggcctcctagcatccccaatccttctactagcaatggttgtgctagctcttaagaaagagaatgaaaggttgggcacattggtgaaatatggatgcatgaagacataccattcaaaagatgccctttacaagaccatcacggctcatcctaacaaggatggacacgggctcgggttttctagtgaaagtcctgtgtctaagcgtgtgatggtaaatgggaaagaatgcttgatgtttgtgagagaagagagcaaagtggttgcttattttaatgggaattacaatgatgagtaccacacttgtgtgtgggtgccaaaggctttggcatactcctacgatggctcaagttgggttgtggacagtggctgcaccaatcatatgacgggagagaggagtatgtttacaagtcttgatgagaagggtggaagtcgtgaaaatattgtctttggagatgatggtaaagaaaagctacaatttattatccgtgtctcaattgtgcgagatgactcttccatagcattcaagggtgtgttaaagggtgatctctatctcgttgatttcgacgtagatagagtgaatccggaggcatgcttgattgctaaatcctctatgggttggctatggcaccgtaggctagcccatgttggaatgaggaatttggcatctcttctaaaaggggaacacattcttggtctatctaatgtttcttttgagatggatcgtgtgtgtagtgcttgccaagccgggaagcaagttgggagtccgcatcctatcaaaaacatcatgactacaacaagaccactcgagcttcttcatatggacttatttgggcccgtggcctacataagcattggaggtaacaagtatggttttgtcattgttgatgatttttcatgcttcacttgggtgtactttctccatgacaaaagcgaagctcaagatgtcttcaagcgcttcacaaagcaagcccaaaatctctatgatctcactatcaagagggtgcgaagcgacaatggaggagaatttaagaacactcaagtggaggaatttcttgatgaagaaggaatcaagcacgagttctccgccccttatgatcctccccaaaatggcattgttgagaggaagaatcgaacactcattgaagccgcaagggcaatgcttgatgagtacaagacttcggatgtcttttgggcagaggccgtgagtaccgcatgtcatgccatcaaccgcttgtacctccacaagatcctaaagaaaacttcatacgagctcttgagtggtaagaagcctaatgtttcatatttccgtgtctttgggagcaaattctttattttgagtaagatgcctcgctcatctaagttctcacctaaggtggatgagggattcttacttggctatgaatcaaatgcacatgcctatcgtgtcttcaacaaaacctccggagagcaagttgttatacatgttgtacgtgatgtggatccaagtcaagctataggtactaaggctattggagacatacgaccagtcgagacacaggatgaccaagaagatagggatcaacctccgtcatcgacatccaatagccctacaagtgttgtgtctgctgagccggaagttccgggtcctattgaccggaacctccggacatctccaggcccggaagttccgggttctacagtccggaaccttcggaccagtggcagtgaagacgtgccaacggcgcaagtggatgggatcgatgctgcgggcactttagggcataccgatcaggctcaggtccccctagtgcaccatccaaggatacatcacactgtccaaagagatcatcccgtcgacaacatacttggtgacataagaaaaggggtaactactcgctctcgtgtcgcaagtttttgtcaacactactcttttgtctcttctttggaaccaaccagggtggaagatgcgcttggtgattcggattgggtgatggctatgcaagaggagttgaataatttcgctcgcaaccaagtatggaatttggtggagagacccaagcaaaatgtcatcggcaccaagtggatctttcgcaacaagcaagatgaacatgtggtggttgtgaggaacaaagcccggttagttacgcaagggttcacccaagtcgagggtctcgattttggtgaaaccttcgcacccgtcgctcgccttgagtcaattagaattcttttagcctatgccgctcaccatgatttcaggttgttccaaatggatgtcaagagtgcctttctcaatggacctatctcggagttggtctatgtggagcaaccaccagggtttgaggatccaaagttgccaaaccatgtgtacaagctccacaaggcgctctatgggctcaaacaagcccctagagcttggtatgaatgtctccgagattttcttttgaaaaatggttttgaaattggaaatgcggatactactctcttcactaaaaaatttaagagtgatttattcatatgccaaatttatgtcgatgacataatatttggttctactaatgcctctttttgtgaagaatttagtagtatcatgactaaaaggttcgagatgtctatgatgggcgagttgaccttctttctctggctacaagtaaagcaagctcaagagggcaccttcatctctcaaaccaagtacgtgaaagacatactcaagaagtttgggatggaggatgccaaacctatcaagacgcccatgcctactaatggccacctagacctcgacgataatggtaaatgtgtggaccaaaaggtatatcgctccatgataggatctttgctttacttatgtgcatctcgtcccgacatcatgcttagtgtttgtatgtgtgcccgttttcaagcggagcctaaagagtgccatttgattgccgttaagagaattcaaagatatttagttcatactcctaatcttggcttgtggtatcctaagggttgtgactttgaacttttgggctattccgattcggattatgccgggtgtaaggttgatagaaaaagcataaccgggacttgccaatttcttgggccgtcccttgtttcttggttccccaagaagcaaaactccattgtattatccaccaccgaggccgaatatgtcgccgccgggtcttgttgtgcccaactcctttggatgaaacaaactctaaaagactttggctacaacttcaccaagaccccactcctatgtgacaatgagagtgccatcaaaatagccaacaatcccgtccaacactcaaaaaccaagcacatagatattcaccaccactttttgagagatcatgagactaaaggagacatatgccttacccatttttgcagggcggaagttccagtctctgtccagccagccagcaaccttgattcctctactgtttcttttaaccattgcactccaaccttgctaattcttgttgcagtggtcagtatgcctcgtgagaagagacagaagctttcacaggatgttcctgctgactcgagtcccccagttcatggtcctagggggagattgggcaaagaaaaagttggagatttttttagtgggagtcatattccgatccattccaagagggctggtagcattgtcattcgtgatgctccccgctctccctctccagttgcatctgagtctgatgatggtggcaatgaggatgagcctggttctgatagcaatcctttgaggctttacaagacaagggctgttgatcctgatcctagacgcccaagagtgaactatttgaagaatctgctcaagtgtggaaaggacagaatggatgacagattcaggaccttggtgcaggttgattggtataattctgtgatcatgggaagatcttatccagtgtattcctggaatgaggaagtgattggacagttctactccactgctttctttggcaccaccaagaaggggcttgattttgtgaagtggaccattcaggggcagcagtatagggtctctatggcacagtttgctgcagctttggggttagatgatgatgacctgagtcgtccacatatctttgtagaggatgctctgtcatcgaccagcactactttcttgtatgagaaggatgctcccaaggattgtttggggactactcgtgggttgcgtccatactatagaatgttgtattataaagtaaaatcctactatgggatttctcgaaacctcttgataaagttcaaagatgatcaaattgatgaaacatctattcttgcgcaagtactaagctccgaatctgccattagctcactgcttgacatgtcaattcggtcacttcctggagatcatggactaccgttacagcaggtacttcctgatgttccaccagcaatggccgatgcagtaaacagaggaggtgaactcctgacaaatctagcaacagggacaccatgggaggctgttgctaaggaggtaggcactgggggtgcacagtactgcacagtcctgtccgcaaatctacagttcagttttacaagaaatgttcatttggtagcaacggaagatgggtatttcataagactgctgcaacaacaacagcaacaacagttgattttatcacatatgggctcgacttaccctgatataaagtattgcatgtgtgtatga

SEQ ID NO: 14016 - DNA, 2403 bp, Oryza sativa
  Clone ID: TFbOSC410643j.C1.o22.fg
atggcggaaagcaaggcgacgagcacggcggcgctagggcgtgcgtgcttgccggagagacgacctccctcgccagcgacgccgaagaggggaggtaatcgagacgtttcgataggtgggaaatggtgttggaatacccatgggttagcccaagggcccgacactattcacgcgggctggagtggtggggctcgtggaatccgccatggatggtccatgcgtgatctgctcccgagcccgattaaggaggtttttttgtctgcgagctgggtgtgggtgccgaaagggggttctctgagtcctcatctagggtttccagccaccaggcgagaggtcgtgcgttttggggcgacgacgaggcggatctggagagctccggcgagactcactgacgggagatccttcctcgaggtagcgaagggaagtatggatcgtaaacctcaattccaacgtcctgatcaatgggttcccaataagagaagagcgttcgaagaggaggggggaggtgggaattgggggaatcgaaatttgcaggaaagggaggaacgtgaacttcggaatcggttgatggggcaacaacaacagcgcgaggaagggaggtggcagcaagttgagagaaggggggccaacaaacagtggcaaggagacagaaacagggagggtggtgcttgggagggaggggatcggcgtccgactcgtggaaaggagaagctgggggaggaagggagatcaggtccttcccagaaggaagagatcaagtgtttcaactgtggagaaagtggttatcatcaggtgaactgtcagaaacctcctctgtgctatgtctgtaagaatcctggacacatctcatctcattgccctgttcatgttggggggagtagctctaatttgagcaaactagaagtaaagctaaaaggttatggcatacctgagcagggttttttcagcctaaatgtagataatttaggtgtggctgagaaaggggcacaattcagaggaatcctaactgtggagaaaggggctggttcagtgcaaaaggtggccaatgagatgtctcatctatttagggagaaaaattgggattggaatgtgaagcaaatcagcagtaataatttcttgattgatttcccgagtgaagatgctagaagacaagttactaagtcagggggtttcgccaaaaagcaggaaatcattagagcaatatctgatattgtgggtgaatttaaagaagtggatgagaaatctttgaagggggaaggagctgttaggataaaagtgggatgcttggaccctagtgctatcaactattctgtcataatatatattaatgacattggatataagataaaatgggaggcagaggttgatacagaggggacagggtctattgattggggggggacaatgatgatgatgatgctgatgatctggatgatgattaccctccaggaggaaagaaaggtgggggtcaggatgccaaagggagtccaaagaaaaaggaacctgctaaggatgcagatagcaaaggaaggattgtcagtggagaatgaggtgggggtcactgctaagggtgaggatcctattgaatcaattaccgtggagaaaaaggcagacaaggcagtggtgttatggaagtcagaggaattttcacaaccagaattgtttgagcaagtttcacaggaggaggacaaaagtggtgaccttctcaaaagaatggatgtggatttaaaattggggggtgttagattattcacagatgaagagggggagaaatgtgctatccccgctgactcagacattgagttgatgagggcagaggaagatgatgacagtgaacaactagatctggaaagtgaagcagagatacagctcaaggaggttaacttccagaaagtcaggcacaagaaaaagcaagttagtttggtcaagagacagagttctagggtgaaggataaagaggtatcagttcatctaaaagctgagctcaggaagtccaaaatgaacatgacctcaggtatgtcatcaaaaaattcttatgcaatctttcattctgttagtcaggattatcttatcaacattgctagggctaggggaatctctttgggtgacaattctgtggaagtgagatgcaacttagatgctatttgtgctagggaattggcacaggctactatttttgatgcagataagagtttacaacagatggctgaaaaagcaagtttggaggaagaaggggggcaggaagtccccccaaatgggaatagtgtaattctggggttttctgtggtagaaatggagaatgatcagtttgttgagggcctgaaggaggaaaatagggatgagttggatgatgcagataaagagagttctgataatctgggggattttgacttgcatgactag

SEQ ID NO: 14017 - DNA, 4302 bp, Oryza sativa
  Clone ID: TFbOSC400225j.C1.o6.fg
atggcgttggttccggcgggagcgggagcggatccggcgagggagagctcggggagtgctttctcctacccacaactcacggcaacgaactacaccagctggtgcattcgggttcaggcgatgatggaggaccagggtgtctgggacgccatcgagccggcggccggggtggccgtcgacccaagaagggacaagaaggcgaggtcccatctgttgcagtccctgccggaggacttgctgatgcaggtggcaaagaagagatcggcgaaggaagtgtgggattgcttgaagacaaggttcgtgggcgcggaccgcgttcgcgaagcgcgcttgcagacgttgaagggtgaatttggtgccatggtgatggagccaggggaaactctggatcagtacgcgggccgcatcaccgcgatgagcgtgcgtcactcggcgttgggctcgacgctgggtgattccgcgatggtgaagaagctgttcgacacggtgccggaaaaattcgtcagcctcgtcgcaggtattgagcaattttatgacattgatactatgccatttgaggaggcagtgggtcgaccgaaggcctacgaggagcgcatgcggaagaagaaggctgccgctggcggggtcaccaccgatgggcaggtgctcctcactcaagcggagtgggaagctcacttcaagaagaacggcggggaatcctcgccaccacagaagaacaaaccttcaggtgaaggtgctgggcgcggccagggcggtcgcggtcgcggcagaggccgtggcgcaggcggacgcggtgggacgccgcggggcgactcaggtgcaggctctggcggcggtggccgtgacaagagtcacatcaagtgcttcaattgcgaggagtacgggcactactctaaccaatgcccacatccgaagaagaagaagggagaagcacatcttgcacagacggaggacgccgggcctgccctgttgcttgcgatgacggaggatgtgccagagcgcgcgtcgtgcggattggtcgtacgcgagcagcgcgtgtggcccaagctgctactggtagacgctggtggacatgctggcgatgtctggttcctggacaatggggccagcaaccacatgaccggcgatcgaagcaaattccgggagctggacgagtcgatcaccggacgggtgaagttcggcgacgcttccacagtgcagatcaaggggaaggggtcgattcttttttcatgcaagaacggtgatcaatggctgctacaggacgtctactacatccccagtctgcaatgtaacatggtgagtttgggccaactaacagagaccgggcatcgcgtggtcatggatgaggatgtactcgaagtgttcgacaaaagtccatggcggctggtgatgaaggtgaggcgcactgtaaatcgtctttaccgaattgagttgaagctggcgcatcccgtgtccctgctgtccagcctcgacgacccggcttggctgtggcatgcgcggctgggacacgtaaattttcaagcaatgaaactgctggtggacaaggagatggcggggggtgttccggcaatcgtccacccgaatcagctgtgccaatcttgcctggtggcgaaacaggccagggcgccgttcccggcggcggcgcacttcagggcggaggagccgctcgagctgctgcacatagatctgtgcggcccgattacaccgagtacgatgtctggtaatcgctatttttttcttatagttgatgattattcccggtggatgtgggtgttcgtactcaagacgaaggatcaatcgctcgatgctttcgtaaagttcaagccactggccgagaacacggctgggcggcgcgtgaagacgttgcggtcagaccggggtggtgaattcctgtcaggcgagtttgcacaggtgtgcgaggaggcggggattcaacgtcacctgacagcgccgtactcgccccagcaaaacggggcggtggagaggcgcaaccgcacggtgatggccatggcacgctcactactgaaggggatgcgcgtaccgggcaggttttggggggaggcggtgcgtcacgcggtgcatctccttaaccggctcccgacgaaggcaatgggtgatcgtactccgttcgaggcatggacggggaggaagccacagctgggacatctcaaggtgttcggctgcacggcacacgcgaaaaacacgcagccgcacctcaagaagctggacgacaggagtgcaccgtacgtgtatctcggtgtggaggaagggagcaaggctcatcgtctgttcgatccgcgtcgtgggcgcatacatgtaagtcgtgacgttgtatttgaggaaaatgtaccttgggagtggacatcagttgcaggacaggagccaacggatttcacgatggaggaggagcctggtgagcagctgccgagcccggcaacagcggccggcgtggtaccgtcgtaccaggcaccgtctcctggcaggcgcgccgggaaggaagcagtggtggcggcagaagaagtaccgtcaccggcaagcccggtggcagcatcaccgactctgcctggaacgcccacgcccggttctccatcgacaaactctgccggggtggtgccgtcaccgggcacagatgacaacatcgatacagatgatgggcctaggcggtatagatcgctggcagatgtcctacgtgaggccccgcgtgtggatttggtggaggacgaatgtgatggagaggcgctcctagctgagtcagaagagccatcaagctatcgagaagctgccggccaacctgcgtgggaagaagcaatgcagagggagatggaggcaatcgagaagaacaaaacatgggagttggccatgttgccagccgggcaccgagcgattgggctgaaatgggtgtataagctcaagaagaacacgacaggggagataatcaagcacaaggcacggttggttgcaaaaggatatgtgcagaaacaaggggtcgattttgaagaggtgtttgctccggtagcgaggcttgataccgttcgtgttgtgcttgcagtggcggctgatcgccgctggcaggttcatcatcttgatgtcaaatcggcattccttaatggtgaacttgaagaagaggtgtatgttgcacaaccggaagggtttgctagatcaggaaaagagcatcttgtgctcaagctgcataaggcattgtatggactccggcaggcactgcgagcctggaatatacgcctggacagaagcttgagggagctcggctttgatcggtgtacgcaggagcaggcagtatacacccgaggcagaggaagtgatggcataattgtcggcgtttacgttgatgatctcattgtcaccggagaaaatccctctgaattgaaggttttcaaggaacaaatgatgggggagtttgagatgagtgatctcggtttgctcacatattatctcgggatagaggttgatcaagatgagagtgctaccacattgaaacagactgcatatgccaagaaattactgtctcagtttgggatgatggagtgcaactcagtttcaattccaatcgatccgagatcgcagctgagcaaggatccagaaggtcacccggtggatgcaactgagtatcggcggatcatcggtagtcttcggtatttgcttcacacgaggccggatctgtcatatgttgtcggggtggcaagcaggttcatggagaggccaaccgtgatgcatttcaaggctgtgaagcaaattctcagatacatcaagggaacgatggattatggtctcgtgtatgctgcaggcactagggcactgaagattacagggtatactgacagtgacctcgccggggacttggatgatcggcgcagcactggtggaatggcgttctacatcaatcagagtctggtggcgtggagctcgcaaaagcagaaaactgtggcactatcgtcgtgtgaagccgagttcatggcagccacgacggcggcctgtcaagcgctctggttaagagtgttgctagcagaagtggcgggagtggaggagaaagcagtgaagctcttcgtcgacaataggtcagcaattgcattgatgaagaacccggtgtttcatgggagaagtaagcatattgacacccgttatcacttcatacgggagtgtgtggatggcgggcaaattgttgtggagttcgtccggactgaggagcagcgggcggatgcactgacgaaaggattgccggcggcgaagctggcgacggcgagacaccttcttggtgttcgttcactagggccacggcagaattaa

SEQ ID NO: 14018 - DNA, 4185 bp, Oryza sativa
  Clone ID: TFbOSC400510j.C1.o22.fg
atggcgttggttctggcaacatcggatccggcgagggggagctcggggagcgctttcctgtatccacaactcacagccaccaactacactagttgggtgatccgtgtccaggcgatgatggaggaccagggtgtgtgggaggcgattgaaccggcggccggggcggccgtcgaccctcggaaggacaagaaagcgaagtcgcacctactgcagtcgctgccagaggatctcctcatgcaggtggcgaagaaacggtcggcgaaggaaacgctgaagggcaaatttggcgccatggtgatggagccgggggaaaccctggatcagtacgcaggccgcatcaccgcgatgagcgtgcgccactcggtgttgggctcgacgttgaccgatgccgcgatggtgaagaagttgttcgacacggtgccagagaaattcgtcagccttgtcgcaggtattgagcagttttataatgttgatgacatgccatttgaggaggctgtgggccggcttaaggcttacgaggagcgggtgcgtaagaagaaggcagcagccggcggagtcaccgccgacgggcaggttcttctcactcaggctgagtgggaggcgcggtttaagaaggatggcggggagtcatcgtcgcctcagaaagggaaagcttccggcgagggagctaaaggcggccagagcggtcgcgaacgcgggcgaggccgtggtgcgggtgggcgcggtggcgctgctcgcggcaactctgcaagtggctcaggcggcggtggccgtgacaagagccacatcaaatgcttcaactgcgaggagtatggtcactattccaaccagtgtccgcacccgaagaagaagaaaggagaagcacacttggcccagaccgaggacgctggcgccgtgctgctgcttgcggtgaccgagaacgcgccggcgcgagcgacacaggagatggttgtgcacgaggatcgtgtgtggccaaagttgctgctggctgatagtggcgcaatggctggaaacgtctggtatttggacaatggcgctagcaaccacatgaccggagatcgcaagaaatttagggagctggatgaatcaatcaccggcagcgtcaggtttggggatgcatcatcggtgcagataaaagggaagggatctattctcttttcttgcaagaatggtgaccagtggcttctccaggatgtgtactacattcctagcctctgttgcaacatggtgagcttggggcaactcactgaaacagggcatcgagtggtgatggacgaggatgtcctcgaggtgttcgacaagtgtccttggcgactggtgatgaagctttgtcaggcgtgcttggtggcgaagcaaatcagggcgtccttccttgtggtggtgaactacagggcggaggaaccactggagctcattcacattgatctgtgcgggccgatctcgccggcgacgatggctggtaacaagtattttgttttaatcgttgatgacttcacacggtggatgtgggtgtttgtgattaaatccaaggatcaagcagtggaggccttcacaaagttcaaacccttggccgagaatgtggccgggcggcgcatcaagacgctgaggtcggatcgcggcggcaagttcctgtccggcgagtttgcacaagtgtgcgaatcggctggcatccagcggcatctcactgcgccgtactcgccgcagcagaacggggtggtggagcgccggaacagatcagtgatggtgatggcgcgctccctcttgaaggggatgagtgtaccaggcagactttggggggaggcggtgcgccacgcggtgtacatcctcaatcggctgccaaccaaggcgatgggcaatcgtactccgtacgaggcatggacggggaagaagccacatttggcacacttgcgtgtgttcgggtgtactgcacatgcgaagatcacaacgccacatcttaagaagctggacgaccggagtgcaccgtatgtgtacttgggggtggaagaaggaagcaaggcgcaccggctgttcgatccacgtcgcggtcgcatccacgtaagtcgtgatgtcatatttgaagaaaatgctgtttggcagtggcttggagatgcaggcgagcaagtctccgttgaatttgatgttgaagaaatcgttgagtcaccagccggctcggcgacatcgttgccaggcgcggtaccgaggtaccaggcgccatcacccggcaggcgtctaggcaaggagccggtggtggtagaagaggaagcttcctctccggcaggcacggcggaggcgtcaccgtcactgccgaccactcctgccacgcctatcggtgaacagagcacaccacactctgctggcgaaattgacaccgacggtgctcctgttcggtacaggcacattgctgatattttgagagatgcgcccagggtggatttggttgatgatgaacaagatggtgaggcattgcttgcagagacggaggagccgtcagcttaccgtgaagcagccggtcactcggcgtgggaggacgccatggctatggagatggatgccattgagcggaacgggacgtgggagctcaccacgttgccagctggccacagggcaattgggcttaagtgggtttataaactcaagaagaacactgcgggagaagtgatcaaacacaaggctcggttggtggcaaaaggatatgtgcagagacagggagtcgatttcgatgaagtctttgcaccggtggcaagacttgatacagtccaccaccttgatgtcaagtcagcctttctgaatggcgagctagaagaggaggagcaggctgtgtatacttggggcataggcagtggtggtgtcatcgttggcgtctatgtcgacgatctgattgtgactggtgaaaatcctgttgaattgaagatgttcaaggaacagatgatgggggagttcgagatgagtgatctcggtctgctctcgttctacctcgggattgaagttgatcagggagaaaatggaaccacgctcaagcaaactgcctatgccagaaaagtgctttctcagttcgggatgctggagtgtaattcaacctcaattccgattgatccaaggatgcagctgaacaaagatgcagatggtcacccggtgggatattactgggtatacagacagcgacccgctggggatgttgatgaccgccggagcacgggtggtatggcgttctacatcaatggcagtttggttgcttggagctcgcagaaacaaaagaccgtggcactgtcgtcgtgtgaagctgagtttatggcggccacgacagcagcttgtcatgcgctttggctaagagcactgctggttgagattgttggaggaccggcgaaggtggttaagctatttgtggataacaaattagcgattgctcttatgaagaatccagtgtttcatgggagaagcaagcatattgatacacgatatcacttcattcgtgagtgtgttgatggagggaaagtggttattgagtttgtccggactgaggaacagcaggcagacgctctgacaaaagttgcaacggttgaaggaataagtctgcgtttgttagcagatgcaaatgatgcggtgatcgagtcagaagaagaccgcgtcggtagcgttcgttacgcacgcaaggtgttcgatcgagggtctagcactaacacctacggcgtgcgcgtcgtcgccctgcacgccgacacggcggcggccaggacgatcgatctgccaccggggtgcgtcgacaggatgctgggctgcagcaacgccaagagcatgagcgagctcatgctggtcatgtcgcggggcggggcggtgttgagccttgtcatggcggagcgcgaggtgatctcggtgtggacgttggaggaggaggcagcggcggtggagaggtggagccggcaggtggtgatcgcgagggtggcgattgatcggagtgtggaagcacggagattgtaccagaccgtcttcttcgaggggttcggggagagaagcggcaccgtgctgatgaggatcgtcaacgtcgggctcgtgcagctcgccgtagcaacgaagaaggcgatcgttgtgcgggacagcggcgccggtaaatggtggggcaggtccatgtccagggcgtgcttgcacgagatgaatttgtactctttgctccaaagcatgaaacccttttga

SEQ ID NO: 14019 - DNA, 4302 bp, Oryza sativa
  Clone ID: TFbOSC400864j.C1.o6.fg
atggcgttggttccggcgggagcgggagcggatccggcgagggggagctcggggagtgctttctcctacccacaactcacggcaacgaactacaccagctggtgcattcgggttcaggcgatgatggaggaccagggtgtctgggacgccatcgagccggtggccggggtggccgtcgacccaagaagggacaagaaggcgaggtcccatctgttgcagtccctgccggaggacttgctgatgcaggtggcgaagaagagatcggcgaaggaagtgtgggattgcttgaagacaaggttcgtgggcgcggaccgcgttcgcgaagcgcgcttgcagacgttgaagggtgaatttggtgccatggtgatggagccaggggaaactctggatcagtacgcgggccgcatcaccgcgatgagcgtgcgtcactcggcgttgggctcgacgctgggtgattccgcgatggtgaagaagctgttcgacacggtgccggaaaaattcgtcagcctcgtcgcaggtattgagcaattttatgacattgatactatgccatttgaggaggcagtgggtcgactgaaggcctacgaggagcgcatgcggaagaagaaggctgccgccggcggggtcaccaccgacgggcaggtgctcctcactcaagcggagtgggaagctcacttcaagaagaacggcggggaatcctcgccaccacagaagaacaaaccttcaggtgaaggtgctgggcgtggccagggcggtcgcggtcgcggcagaggccgtggcgcaggcggacgcggcgggacgccgcggggcgactcaggtgcaggctctggcggcggtggccgtgacaagagtcacatcaagtgcttcaattgcgaggagtacgggcactactctaaccaatgcccacatccgaagaagaagaagggagaagcacatcttgcacagacggaggacgccgggcctgccctgttgcttgcggtgacggaggatgtgccagagcgcgcgtcgtgcggcttggtcgtacgcgagcagcgcgtgtggcccaagctgctgctggcagacgctggtggacatgctggcgatgtctggttcctggacaacggggccagcaaccacatgaccggcgatcgaagcaaattccgggagctggacgagtcgatcaccggacgggtgaagttcggcgacgcttccacagtgcagatcaaggggaaggggtcgattcttttttcatgcaagaacggtgatcaatggctgctacaggacgtctactacatccccagtctgcaatgtaacatggtgagtttgggccaactaacagagaccgggcatcgcgtggtcatggatgaggatgtactcgaagtgttcgacaaaagtccatggcggctggtgatgaaggtgaggcgcactgtaaatcgtctttaccgaattgagttgaagctggcgcatcccgtgtccctgctgtccagcctcgacgacccggcttggctgtggcatgcgcggctgggacacgtaaattttcaagcaatgaaactgctggtggacaaggagatggcggggggtgttctggcaatcgtccacccgaatcagctgtgccaatcttgcctggtgacgaaacaggccagggcgccgttcccggcggcggcgcacttcagggcggaggagccgctcgagctgctgcacatagatctgtgcggcccgattacaccgagtacgatgtctggtaatcgctatttttttcttatagttgatgattattcccggtggatgtgggtgttcgtactcaagacgaaggatcaatcgctcgatgctttcgtaaagttcaagccactggccgagaacacggctgggcggcgcgtgaagacgttgcggtcagaccggggtggtgaattcctgtcaggcgagtttgcacaggtgtgcgaggaggcggggattcaatgtcacctgacagcgccgtactcgccccagcaaaacggggtggtggagaggcgcaaccgcacggtgatggccatggcacgctcactactgaaggggatgcgcgtaccgggcaggttttggggggaggcggtgcgtcacgcggtgcatctccttaaccggctcccgacgaaggcaatgggtgatcgtactccgttcgaggcatggacggggaggaagccacagctgggacatctcaaggtgttcggctgcacggcacacgcgaaaaacacgcagccgcacctcaagaagctggacgacaagagtgcaccgtacgtgtatctcggtgtggaggaagggagcaaggctcatcgtctgttcgatccgcgtcgtgggcgcatacatgtaagtcgtgacgttgtatttgaggaaaatgtaccttgggagtggacatcagctgcaggacaggagccaacggatttcgcgatggaggaggagcctggtgagcagctgccgagcccggcaacagcggccggcgtagtaccgtcgtaccaggcaccgtctcctggcaggcgcaccgggaaggaagcagtggtggcggcagaagaagtaccgtcaccggcaagcccggtggcagcatcaccgactctgcctggaacgcccacgcccggttctccatcgacaaactctgccggggtggtgccgtcaccgggcacagatgacaacatcgatacagatgatgggcctaggcggtatagatcgctggcagatgtcctgcgtgaggccccgcgtgtggatttggtggaggacgaatgtgatggagaggcgctcctagctgagtcagaagagccatcaagctatcgagaagctgccggccaacctgcgtgggaagaagcaatgcagagggagatggaggcaatcgagaagaacaaaacgtgggagttggccatgttgccagccgggcaccgagcgattgggctgaaatgggtgtataagctcaagaagaacacggcaggggagataatcaagcacaaggcatggttggttgcaaaaggatatgtgcagaaacaaggggtcgattttgaagaggtgtttgctccggtagcgaggcttgataccgttcgtgttgtgcttgcagtggcggctgatcgccgctggcaggttcatcatcttgatgtcaaatcggcattccttaatggtgaacttgaagaagaggtgtatgttgcacagccggaagggtttgctagatcaggaaaagagcatcttgtgctcaagctgcataaggcattgtatggactctggcaggcaccgcgagcctggaatatacgcctggacagaagcttgagggagctcggctttgatcggtgtacgcaggagcaggcagtatacacccgaggtagaggaagtgatggcataattgtcggcgtttacgttgatgatctcattgtcaccggagaaaatccctctgaattgaaggttttcaaggaacaaatgatgggggagtttgagatgagtgatctcggtttgctcacatattatctcgggatagaggttgatcaggatgagagtgctaccacattgaaacagactgcatatgccaagaaattactgtctcagtttgggatgatggagtgcaactcagtttcaattccaatcgatccgagatcgcagctgagcaaggatccagaaggtcacccggtggatgcaactgagtatcggcggatcatcggtagtcttcggtatttgcttcacacgaggccggatctgtcatatgctgtcggggtggcaagcaggttcatggagaggccaaccgtgatgcatttcaaggctgtgaagcaaattctcagatacatcaagggaacgatggattatggtctcgtgtatgctgcaggcactggggcactgaagattacagggtatactgacagtgacctcgccggggacttggatgatcggcgcaacactggtggaatggcgttctacatcaatcagagtctggtggcgtggagctcgcaaaagcagaaaactgtggcactatcgtcgtgtgaagccgagttcatggcagccacgacggcggcctgtcaagcgctctggttaagagtgttgctagcagaagtggcgggagtggaggagaaagcagtgaagctcttcgtcgacaataggttagcaattgcattgatgaagaacccggtgtttcatgggagaagtaagcatattgacacccgttatcacttcatacgggagtgtgtggatggcgggcaaattgttgtggagttcgtccggactgaggagcagcgggcggatgcactgacgaaaggattgccggcggcgaagctggcgacggcgagacaccttcttggtgttcgttcactagggccacggcagaattaa

SEQ ID NO: 14020 - DNA, 4230 bp, Oryza sativa
  Clone ID: TFbOSC900029j.C1.o29.fg
atggcgttggttccggcgggagcgggagcggatccggcgagggggagctcggggagtgctttctcctacccacaactcacggcaacgaactacaccagctggtgcattcgggttcaggcgatgatggaggaccagggtgtctgggacgccatcgagccggcggccggggtggccgtcgacccaagaagggacaagaaggcgaggtcccatctgttgcagtcccagccggaggacttgctgatgcaggtggcgaagaagagatcggcgaaggaagtgtgggattgcttgaagacaaggttcgtgggcgcggaccgcgttcgcgaagcgcgcttgcagacgttgaagggtgaatttggtgccatggtgatggagccaggggaaactctggatcagtacgcgggccgcatcaccgcgatgagcgtgcgtcactcggcgttgggctcgacgctgggtgattccgcgatggtgaagaagctgttcgacacggtgccggaaaaattcgtcagcctcgtcgcaggtattgagcaattttatgacattgatactatgccatttgaggaggcagtgggtcgactgaaggcctacgaggagcgcatgcggaagaagaaggctgccgccggcggggtcaccaccgacgggcaggtgctcctcactcaagcggagtgggaagctcacttcaagaagaacggcggggaatcctcgccaccacagaagaacaaaccttcaggtgaaggtgctgggcgcggccagggcggtcgcggtcgcggcagaggccgtggcgcaggcggacgcggcgggacgccgcggggcgactcaggtgcaggctctggcggcggtggccgtgacaagagtcacatcaagtgcttcaattgcgaggagtacgggcactactctaaccaatgcccacatccgaagaagaagaagggagaagcacatcttgcacagacggaggacgccgggcctgccctgttgcttgcggtgacggaggatgtgccagagcgcgcgtcgtgcggcttggtcgtacgcgagcagcgcgtgtggcccaagctgctgctggcagacgctggtggacatgctggcgatgtctggttcctggacaacggggccagcaaccacatgaccggcgatcgaagcaaattccgggagctggacgagtcgatcaccggacgggtgaagttcggcgacgcttccacagtgcagatcaaggggaaggggtcgattcttttttcatgcaagaacgatgatcaatggctgctacaggacgtctactacatccccagtctgcaatgtaacatggtgagtttgggccaactaacagagaccgggcatcgcgtggtcatggatgaggatgtactcgaagtgttcgacaaaagtccatggcggctggtgatgaagcctcgacgacccggcttggctgtggcatgcgcggctgggacacgtaaattttcaagcaatgaaactgctggtggacaaggagatggcgggggtgttccggcaatcgtccacccgaatcagctgtgccaatcttgcctggtggcgaaacaggccagggcgccgttcccggcggcggcgcacttcagggcggaggagccgctcgagctgctgcacatagatctgtgcggcccgattacaccgaatacgatgtctggtaatcgctatttttttcttatagttgatgattattcccggtggatatgggtgttcgtactcaagacgaaggatcaatcgctcgatgctttcgtaaagttcaagccactggccgagaacacggctgggcggcgcgtgaagacgttgcggtcagaccggggtggtgaattcctgtcaggcgagtttgcacaggtgtgcgaggaggcggggattcaacgtcacctgacagcgccgtactcgccccagcaaaacggggtggtggagaggcgcaaccgcacggtgatggccatggcacgctcactactgaaggggatgcgcgtaccgggcaggttttggggggaggcggtgcgtcacgcggtgcatctccttaaccggctcccgacgaaggcaatgggtgatcgtactccgttcgaggcatggacggggaggaagccacagctgggacatctcaaggtgttcggctgcacggcacacgcgaaaaacacgcagccgcacctcaagaagctggacgacaggagtgcaccgtacgtgtatctcggtgtggaggaagggagcaaggctcatcgtctgttcgatccgcgtcgtgggcgcatacatgtaagtcgtgacgttgtatttgaggaaaatgtaccttgggagtggacatcagctgcaggacaggagccaacggatttcgcgatggaggaggagcctggtgagcagctgccgagcccggcaacagcggccggcgtggtaccgccgtaccaggcaccgtctcctggcaggcgcgccgggaaggaagcagtggtggcggcagaagaagtaccgtcaccggcaagcccggtggcagcatcaccgactctgcctggaacgcccacgcccggttctccatcgacaaactctgccggggtggtgccgtcaccgggcacagatgacaacatcgatacagatgatgggcctaggcggtatagatcgctggcagatgtcctgcgtgaggccccgcgtgtggatttggtggaggacgaatgtgatggagaggcgctcctagctgagtcagaagagccatcaagctatcgagaagctgccggccaacctgcgtgggaagaagcaatgcagagggagatggaggcaatcgagaagaacaaaacgtgggagttggccatgttgccagccgggcaccgagcgattgggctgaaatgggtgtataagctcaagaagaacacggcaggggagataatcaagcacaaggcacggttggttgcaaaaggatatgtgcagaaacaaggggtcgattttgaagaggtgtttgctccggtagcgaggcttgataccgttcgtgttgtgcttgcagtggcggctgatcgccgctggcaggttcatcatcttgatgtcaaatcggcattccttaatggtgaacttgaagaagaggtgtatgttgcacaaccggaagggtttgctagatcaggaaaagagcatcttgtgctcaagctgcataaggcattgtatggactccggcaggcaccgcgagcctggaatatacgcctggacagaagcttgagggagctcggctttgatcggtgtacgcaggagcaggcagtatacacccgaggcagaggaagtgatggcataattgtcggcgtttacgttgatgatctcattgtcaccggagaaaatccctctgaattgaaggttttcaaggaacaaatgatgggggagtttgagatgagtgatctcggtttgctcacatattatctcgggatagaggttgatcaggatgagagtgctaccacattgaaacagactgcatatgccaagaaattactgtctcagtttgggatgatggagtgcaactcagtttcaattccaatcgatccgagatcgcagctgagcaaggatccagaaggtcacccggtggatgcaactgagtatcggcggatcatcggtagtcttcggtatttgcttcacacgaggccggatctgtcatatgctgtcggggtggcaagcaggttcatggagaggccaaccgtgatgcatttcaaggctgtgaagcaaattctcagatacatcaagggaacgatggattatggtctcgtgtatgctgcaggcactggggcactgaagattacagggtatactgacagtgacctcgccggggacttggatgatcggcgcagcactggtggaatggcgttctacatcaatcagagtctggtggcgtggagctcgcaaaagcagaaaactgtggcactatcgtcgtgtgaagccgagttcatggcagccacgacggcggcctgtcaagcgctctggttaagattgttgctagcagaagtggcgggagtggaggagaaagcagtgaagctcttcgtcgacaataggtcagcaattgcattgatgaagaacccggtgtttcatgggagaagtaagcatattgacacccgttatcacttcatacgggagtgtgtggatggcgggcaaattgttgtggagttcgtccggactgaggagcagcgagcggatgcactgacgaaaggattgccggcggcgaagctggtgacggcgagacaccttcttggtgttcgttcactagggtcacggcagaattaa

SEQ ID NO: 14021 - DNA, 4083 bp, Oryza sativa
  Clone ID: TFbOSC900327j.C1.o10.fg
atggcgttggttccggcaacgtcggatccggcgagggggagctcggggagcgctttcttgtatccacaactcacggccaccaactacactagttgggtgatccgtgtccaggcgatgatggaggaccagggtgtgtgggaggtgattgaaccggcggccggggcggccgtcgaccctcagaaggacaagaaagcgaagtcgcacctgctgcagtcgctgccagaggatctcctcatgcaggtggcaaagaaacgattggcgaaggaaacgctgaagggcgaattcggcgccatggtgatggagccgggggaaaccctggatcagtacgcaggccgcatcaccacgatgagcgtgcgccactcggcgttgggctcgacgttgagtgatgccgcgatggtgaagaagttgttcgacacggtgccggagaaattcgtcaaccttgtcacaggtattgagcagttttataatgttgatgacatgccattcgaagaagctgtgggccggcttaaggcttacgaggaacgggtgcgtaagaagaaggcagcggccggcggagtcaccaccgacgggcaggttcttctcactcaggctgagtgggaggcgcggttcaagaaggatggcggggagtcatcgtcgccccagaaagggaaagcttccggagagggagctaaaggcggccaaagcggtcgcggacgcgggcgaggccgtggcgcaggtgggcgcggtggcgccgctcgcggcaactctgcaagtggctcaggcggcggtggccgtgacaagagccacatcaaatgcttcaactgcgaggagtatggtcactattccaaccagtgtccgcacccaaagaagaagaaaggagaagcacacttggcccagactgaggacgccggcgccgcgctgctgcttgcggtgaccgagaacgcgccggtgcaagcgacgcaggagatgtttgtgcatgaggatcgtgtgtggccaaacttgctgctggctgatggtggcgcggtggctggaaacgtctggtatttggacaacggcgctagcaaccacatgaccggagatcgcaagaaattcagagagctagatgaatcaataactggcagcatcaggtttggggatgcatcgtcggtgcagatcaaagggaagggatctgttctcttttcttgcaagaatggtgaccaatggcttctccaggacatgtactacattcctagcctctgttgcaacatggtgagcttggggcaactcactaaaacagggcatcgagtggtgatggacgaggatgtcctcgaggtgttcgacaagtgtccttggcgactggtgatgaaggtgaggcataccacgaatcgtctctaccggatcgagctcaaccttgcctatccagtgtccctgctatccagccttgatgatccggcgtggctgtggcatgcacgtttggggcatgtgaatttccaagcgatgaagctgttggtggacaaaggcatggaggtggacgtaccggccatcgttcacccgaatcagctttgtcaggtgtgcttggtggcgaagcaaatcagggcgtccttccctgtggtggtgaactacagggcggaggaaccactggagctcattcacattgatctgtgcgggccgatctcgccggcgacgatggctggtaacaagatcaagcagtggaggccttcaccaagtttcaaacccctggccgagaacgtggccgggcggcgcatcaagacgctgaggtcggatcgcggcggcgagttcctgtccggcgagtttgcacaggtgtgcgaatcggctggcatccagcggcatctcactgcgccgtactcgccgcaacagaacggggtggtggagcgccggaacagatcagtgatggcgatggcgcgctccctcttgaaagggatgagtgtagcaggcagactttggggggaggcggtgcgctacgcggtgtacatcctcaatcggctgccaaccaaggcgatgggtaatcgtactccatacgaggcgtggatggggaagaagccacatttggcacacttgcgtgtgttcgggtgtactacacatgcgaagatcacaacgccacatcttaagaagctggacgaccggagtgcaccgtatgtgtacttgggggtggaagaagggagcaaggtgcaacggctgttcgatccacgtcgcggtcgcatccactggcttggagatgcaggcgagcaagtctccgttgaatttgatgttgaagaaatcgttgagccaccagccggctcggcgacatcgctgccaggcgcgataccgaggtaccaggcgccatcacccggcaaccgtcctggcaaggagccggtggtggtagaagaggaagcttcctctccggcaggcacgatggaggcgtcaccgtcactgccgaccactcctgctacgcctatcggtgaacagagtacaccgcactctgctggcgaaattgacaccgatggtgctcctgttcggtacaggcacattgccgatattatgagagatgcgcccagggtggacttggttgacgatgaacaagatggtgaggcattgcttgcagagatggaggagctgtcagcttaccatgaagcagccggtcacccggcgtgggaggacgccatggctatggagatggatgccattgagtgcaacgggacgtgggaactcaccacgttgccagctggccacagggcaattgggcttaagtgggtttataaactcaagaagaacactgcgggagaagtccaccaccttgatgtcaagtcagcctttcttaatggcgagctagaagaggaggtatatgttgcacagccagaaggttttgtcaagcaaggcagagagcatctcgtgctcaggttgaacaaggcattatatgaactccggcaggcgccgcgagcctggaacattcgcctagatagatgtccgaaacagctcggttttgagcggtgcacgcaggagcaggctgtgtatactcggggcacaggcagtggtggtgtcatcgttggcgtctatgtcgatgatctgattgtgactggtgaaaatcctgttgaattgaagatgttcaaggaacaaatgatgggggagttcgagatgagtgatctcggtctgctctcgttctacctcgggattgaagttgatcagggagaaaatggaaccacgctgaagcaaactgcctatgccagaaaagtgctttctcagttcgggatgctggagtgtaattcaacctcaattccgattgatccaaggatgcagctgaacaaagtcgcagatggtcacccggtggatgcaactgagtatcggcgagtgatcagttgtcttcgatatctgttacacacaaggccagatctttcctttgctgttggagtggcaagcagatttatggagcggccaactcttatgcacttcaaagcagtgaaacaaattctcatatatctgaaagctggaaatggtgatatgcagattactgggtatacagacagcgacctcgctggggatgttgatgaccgccggagcacgggtggtatggcgttctacatcaatggcagtttggttgcttggagctcgcagaaacaaaagaccgtggcgctgtcgtcgtgtgaagctgagtttatggcggccacggcagcagcttgtcatgcgctttggctaagagcactgctggttgagattgttggaggaccgacgaaggtggttaagctgtttgtggataacaaatcatcgattgctctcatgaagaatccagtgtttcatgggagaagcaagcacatcgatacacgatatcacttcattcgtgagtgttttgatggagggcaagtggttattgagtttgtccggactgaggaacagcgagcagacgctctgacaaaagttgcaacggttgaaggaataagtctgcgtttgttagcagatgcgaatgatgcggtgatcgagtcagaagaagaccgcgtcggtagcattcgtgtgcgtgagtttagcgcggtgaatgaaaaccacagaaaattagccccacaaatttcctatctgctattgttctctgaaacttctcaatttcctgtgttcttgttctgctctgtattcctctga

SEQ ID NO: 14022 - DNA, 3003 bp, Oryza sativa
  Clone ID: TFbOSC401564j.C1.o4.fg
atggctggttttgctgatacactgagaccggataaattcaccggtgtgcactttaagagatggcagctcagggtcactctgtggctgacagctatgaaatgcttctgggtgagtactggcaaacctgaagaaattcttactgctgatcagcagaagcaattcgaggaagccactactctctttgtgggatgcattcttagcgttcttggcgatcgtctggtcgaggtatatatgcatatgaccgacgctaaggagttgtgggatgcactgaataataaattcggtgctattgatgctagcaatgatctgtatatcatggagcagtttcatgactacaagatggctgacaaccattctgtagtcgaacaggcccatgagatacaaaccatgactaagaaactcgaactccttaagtgtgtattactcgacaaatttgtggccagtgccaatgttgtgcacaaggcccaaaataagagtaaggggaaatacaaagctcaacagaccaccaacttcaagaagcagaagaagaacaacaacaatcctaatcaggatgagaggacttgctttgtgtctggccaacctggtcatctggctaggaagtgtccacagcgcaaggggatgaaggcacctgcagggcagacttctaagtctgctaatgtgaccattggcaacactggagatggaagcgggttggtcgcacggggtttcaccgtcctaatggggaatgggtcacatgcttatgtcatggtgttggcacgattttgctatgtgtacttgttgaaaacgaaagacgaggctctagactattttaaaatttataaggcagaaattgaaaatcaacttgacagaaagataaaaaggcttaggtctgatcgtgatggagagtttttctcaaacgagtttgacttattctatgaggaacatggcatcatacatgagaggacgcctccctattctcccgagtctaatgggattgctgaaaagaagaaccgcacactgactgacttggtgaatgccatgttggacaccgcgggactacctaaggcatggtggggggaggcattgttgacctcgaatcatgtgttaaacagagctcctaacagaaataaggacaaaacaccatataagatatggattgggagaaaaccatcactttcttatttgcgcacatgggggtgcttggcgaaagtcaatgtaccaataacgaagaagcgcaaactgggatctaagactgtggactgtgtctttctgggatatgctcatcacaacattgcctatagatttttaatagttaaatctaaggtacctaacatgcatgttggtacaattatggagtctcgtgatgctaccttctttgagagctttttcccaatgaaggatacacatagtagttcgagccaaccctctgaagtaattcccagttcaatcacaccaccagaacaaactgaacatacacatgaacatgtcactgaggaggatgaaagtgaagctcctcgaagtagtaagagacaaaggacggctaagtcctttggtgatgatttcactgtgtacctcgtggatgacactcctaagtcaatttcagaagcatatgcatcttctgatgtagactactggaaggaggctgtccgtagtgaaatggactccattatcgctaacgggacttgggaggtgacagagcgaccctatgggtgtaaacctgtggggtgcaagtgggtgttcaagaagaagcttaggcctaacggtactattgaaaagtacaaggcacgacttgttgctaagggctatactcagaaagaaggcgaaaatttctttcacacttactcacctgttgctagattgaccacaattcgtgtgctactttccctagcaacctcacatggtcttctcgttcatcaaatggacgttaagatagcttttcttaatggagagctagatgaggagatctatatggatcaacctgatgggtttgtagttaaaggctttgcagtcaatgaggcagataaatgtgtgtactatcgccatggtgggggtgagggagttattctgggcttgtatgttgatgacatactgatatttgggacaagccttgaggtgataaatgaggttaaatcattcttgtctcaaaattttgatatgaaggatttgggagtagctgatgttatcttaaacattaagctaattagaggcgagaatgggatcacactcttgcagtcccattatctggagaagatcttgaatcgctttggctacattgatagtaagccttctccaacaccttatgatcctagcttgttgcttcgcaagaacaagagaattgctaggaatcaactagaatactcccaaatcattggctcgctgatgtacctggctagtgcaactaggcctgatatctcctttgctgtgagcaagttgagccggtttacctctaattcgggagatgatcactggcatgcgcttgagcgagtaatgcactatctgaaaggtactatggaattggagcttcactattctgggtatcctgcggtactggagggatatagtgattctaattggatctctgatgtggatgagatcaaagccactagtggatatgtcttcacactaggtggtggtgctgtttcgtggaggtcttgcaaacagacaattttgacgaggtcaaccatggaagcagagctgacggcactggatactgctactgttgaggcagaatggctgcgtgatctattaatggatctgcctattgttgaaaaaccagtgccggctatccttatgaactgtggcaatcaaacggtaattgtcaaagtgaatagttctaaggataatatgaaatcgtctagacatgtgaaaagacgattaaagtctgtcaggaaattgagaaactctggagttataacgttggattacatccaaacagctagaaacctggcagatcccttcacgaaaggactatcacaaaatgtgatagacaatgcatcgaaggagatgggtttgagacccatgtga

SEQ ID NO: 14023 - DNA, 3918 bp, Oryza sativa
  Clone ID: TFbOSC900422j.C1.o26.fg
atgatacgggaaaggaaagatttcaagaggctcaccccaaatgacattcttggaagaattgtgtctcatgagatgcaagaagaggaagctcgtaaagtgaggcaaatggtgaagaatgctgccatgatcaaaaatcaagaagtagctttgaaggtaaaacaagaagaagagtcaagttgtgaagaaagtgaagatgaagaaatggcttttattgtcaagagattcaagcactttcttcgcaagagtggctatggcaaagggaggaagtatgatgataagggaaagaggcaatcaaagagagcttgcttcaattgtgacgaatatggccacttcgttgccgattgtcccaggtcaaatgaagctaaggctaagggaggcaagaagaagccggagcgtgctcatgtggcagaggcacacatggcggaggtgtggtactctgcagatgaagaagatctcgaggtcaagcccaagcccaagccaaaagacaaggttgaaggagaaggtggtgttgctaccgtcaccttcaagtcatcctcttcaagcaaggagcgtctcttcaacaacttgagtaatgacgacgaggactcctaccactactcttgtttcatggcccaaggctgcaaggtgatgactcaaaagccctctcacacctctcttgatgttgattctagtgatgaggaaagtgataatgaattagatgatgtgcttaagagctttagcaaacccgctatgcaacatttggctaagttaatgagagctttggatagtaaaaaacaatctctcgaaaggcaagaagaattacttattcttgagaagaaaagaaaccttgccttagaggagagcctagctaaagaatgtgctaaaaatgaacaactagctaatgagcttaatttggctaatggttctctagctagccttagggatgtcaatgaaactcttcaagagaagtttgctagtttagacaaaagtcataaagatcttgaagttcaatttgacactctttggaatagcacttctcaaccaaatgtggtttctaattcttccaacccatctactagcaatggttgtgctaggtgttacaatattgatttgaactctcatgctactaatgttgatgctatgcaagctcttaagaaagagaatgaaaggttgggcacattggtgagatatggatgcatgaagacataccattcaaaagatgccctttacaagaccatcaccgctcatcctaacaaggatagacacgggctcgggttttctggtggaagtcctgtgtctaagcgtgtgatggtaaatgggaaagaatgcttgatgtttgtaagagaaggaaaagctccacaagcaagtgaggcatactcctccggtggctcaagttgggttgtggacagtggctgcaccaatcatatgacgggagaggggagtatgtttacaagtcttgatgagaagggtggaagtcgtgaaaatattgtcattggagatgatggtaaaggaaatgtaatgggcctcggtaagattgccattttcaagaatcaatctctatctaatgtcctccttgtcaattcattaagctacaatttattatccgtgtctcaattgtgtaagttaggatttaattgcttgtttaccgatgtggatgtgaccatttttaggcgagatgactcttgcatagcattcaagggagtgttaaagggtgatctctgtctcgttgatttcgacgtaaatagagtgaatccggaggcatgcttgattgctaaatcctctatgggttggctatggcaccgtaggctagtccatgttggaatgaggaatttggcatctcttctaaaaggggaacacattcttggtctatctaatgtttcttttgagaaagatcgtgtgtttagtgcttgccaagccgggaagcaagttgggagtccacatcctataaaaaacatcatgactacaacaagaccactcgagcttcttcatatggatttatttgggcccgtggcctacataagcattggagagggtgcgaagcgacaatggaggagaatcaagaacactcaagtggaggaatttcttgatgaagaaggaatcaagcacgagttctccgccccctatgatcctccccaaaacggcattgttgagaggaagaaccgaaccctcattgaagccgcaagggcaatacttgatgagtacaagactttggatgtcttttgggcggaagccgtgagtaccgcatgtcatgccatcaaccgcttgtacccccacaagatcctaaagaaaacctcatatgagctcttgagtggtaagaagcctaatgtttcatattttcgtgtctttgggagcaaatgttttattttaagtaagaggcctcgctcatctaagttctcacctaaggtggatgagggattcttactttgctataaatcaaatgcacatgcctatcgtgtcttcaacaaaacctctggtattgttgaagtcactagggatgtgacatttgatgaatctaatgactcccaaggagagcaagttgttgtacatgttgtaggggatgtggatccaaatcaagctataggtaccaaggctattggagacatacgaccagtcgagacgcaggatgaccaagaagatagggatcaacctccgtcatcgacatccaatagccctacaagtgctgtatctgctgagccagaagttctgggtcctattgatcggaacctccggacatctccaggcccggaagttccgggttctacagtccggaacctccggatcaatggcagtgaagacgtgccaacggcacaagtggatgggatcgatgctgagggcactttagagcattctgatcaggctcaggtccccccagtgcaccatcctcaaggatacatcacactatccaaagagatcatcccggtggaagatgcgcttggtgatccggattgggtgatggctatgcaagaggagttgaataacttcactcgcaatcaagtatggactttggtggagagacccaagcaaaatgtcatcggcaccaagtggatctttcgcaacaagcaagatgaacatggggtggtcgtaaggaacaaagcccggttattccaaatggatgtcaaaagtgactttctcaatggacctatctcggagttagtctatgtggagcaaccaccggggttcgaggatccaaagttgccaaaccatgtgtacaagctccacaaggcgctctacgggctcaaacaagcccctagagcttggtatgaatgtctccgagattttcttttgaaaaatggttttgaaattggaaaggcggatactactctcttcactaaaaaatttaagagtgatttattcatatgccaaatttatgtcgatgacataatatttggttctactaatgcctctttttgtgaagaatttagtagaatcatgactaaaagtgtttgcatgtgtgcccattttcaagcggagcctaaagagtgccatttgattgctgtcaagagaattctaagatatttagttcacactcctaatcttggcttgtggtatcctaagggttgtggctttgagcttttgggctattccgattcggattatgccgggtgtaaggttgatagaaaaagtacaaccaggacttgtcaattccttgggcggtcccttgtttcttggtcctctaagaagcaaaattccattgccttatccaccaccgaagccgaatatgttgccgccggttcttgttgtgcccaacttctttggatgagacaaaccctaaaagactttggctacaacttcaccaagatcccactcctatgtgataatgagagtgccatcaaaatagccaaaaatcccgtccaacactcaagaaccaagcacatagacattcgccaccacttcttgagagatcatgagactaaggggacatatgccttacccatgtga

SEQ ID NO: 14024 - DNA, 5379 bp, Oryza sativa
  Clone ID: TFbOSC421503j.C1.o7.fg
atgaggggcgagcatgagggagagcgcttccgcccatccacctccaccgcggcgggcgtccactccggcatccgtcagccaccatccaaaccccaggtcggctcttggcgtgacatcattgttggcgttgggacccagggggcagtgggcgagaaggaacgggaagcggcatggattgaggtgagaagaaggaagggttcgcattcaagaggggctcatctgtctccacctaccagaccagctgcattgaagacgacgagggaggtcccccggtggttgcaaggacgctgcttcaagtgtctcggcttggggcaccagaaggctcactgcacgggtcaaatccgttgctttcgctgctggtacacgggccatcttgctagctcctgtgctgagaagggtgagcgtggtgagagggaggaaggcgaggtgcggggcgcaccgaaagagagcgttcaggggagagcgcaggtggagggcaggcgtctgccggcgcgccgacaagaaccccgccgtgcggtgcctcaggctcggcggcaggaggaaacctcgacagctgaacccggcgcgtctcgtcgtcccaaatccgaccaggcttcagcgagcgtcaaggagatggccggctttcagatctgcacagccaggccccatgagtacatggaggagttctggacgggcgagccggagctgcgtccggcgatcgggcactgcgttctgtcttggacggcgggcatggagcgcaacgaagcttggctcaaccaacacactctcatggcgtccgttctgaagacaaggccatcggtctcgtcgggggagctgcttgtggccatcgtgcagcaggccggcgtccgggaggagaacctgcgcgtcgacgtgactcacacagaggacttcctcctctccttccgcacgctgcgcgaccggaactcggtgttccgtcgctctcatgagatctacgtgcaagaagttcctgtctccttcaaactgtggagtaggcggagctgggctgacagctccgatctcaagttcttcaccaagatttcgcttgacgggctgccggctcacctgtgggaaagggagacggtgcgcaacaaggggagttggtggagattatcccggctgcagatgctagatgtctgggtcttttcgcttggttcaagaacccaaacaagcttccgcagttgcttcaggtcgaagtgccagagaagactggggcaggaggttcttggaggaaaggttcttcgagcacagctcctcctcgcgctcctcgggcacggccaacgcttctctatgacgttatccttcatgtcgaagaggtcatcgatcccactcccttgcacgctccggctacgaacgcaaccagtccgcttgctcgtccgcgaggggacggtggaggctgcgaactcggcagctgtggagctccatcatctagctcctgaggcccgcggaacctcggtcaagcagccggttgcacctgaccctttggaggcagaggtctgctcctatgggggcaagggttcgatgttggcgctgagcccggtgatagaggcggtgactggatcggcggagccgggccggatggtagcgggggcaatgatggcggcggggaccgagggcatggctccacgtccgaatgtctggttttcccctcagcagagccagggctcgccggcgcttgtggacgcatccacgccggtgttccaagatgttccactgccgctggagaacctggcgcattctccgggttcgacagtccttccctcgccgcggatcttccgctctatcagtcctttgcggctgtctgaagaggaccaggtagacgggctcatggctcaagccatgctgccaccaccggcacaagccttcgtcctcgcctcgccgggcacgatggattcacttctggtttcaccgaggttgcggagcactgcggacgcggtccgtgggtgcgcgtttcgaggctctgggcacgacccgagccctgcgtcgacgccaggccacgtcagctctgtccagactctacccccgctggccagacacctcagctttgaagatatgggtggagatccgccattaatggcgagagctgctgtcctggaagagattttcgaagcactgtcccccggcgggaacccggtcggggctcgcctgccctctccacctgcggacgggcagtcccatgctggtccttctacggctgatgggccgccctcgtctgctgataggctgtctccaccttggtcgcctgtacggtcggctctgctagttgggccggccttgggggtggcccatttcgaccgggtctatgtgtgccgcaaggagtccgttcccgctcctcaagtggttgagctggctcccagcccacagcctgctcgacgaagccctttaggagcggtgatcctgggccaggcctccccacttcggcccgtgatgagccagagccaggcttctcgggtaccagacggctcagcagtcgacgcgttcatcgtcaccatctcgaccccacctccatgctccctccttggcaccccacccgcctcagtcccggtcacaagaagtcgtcgccgcgtcgaacttccccgcgatttcacgccgtggagaagcccccggctggcgctacaaggggatggtgctcgtcgtcacaccatctccaaggtgcagcgggttaccatgaagaaattggggatcattgaggaagaagatgaggccactcaggagacggcggagcagtacatgtgcctcttcgacaatcccctgccgccgcatcacgtcgaggcgatggcggaactgctccagctggaccttgctgagccgatggatcccctgccggcagaaccgacgatggcactgttcagtgttctagtttggaatgtgagggggcttaataacactgctaagcgtgccctcgtgcaagagtctgttgtttcctctaatgcctctgtagtttgctttcaagagtctaaattagaagtggtgaacgctgtgcttatctttgagctctgtggtccgggtttcaattgtttcgaagtgctgcctgctgaacaaacaaggggaggagtgatcattgcttggaaaggcgacttgcttcagggaacactggtccataccggtcgttggtctttgattgttaatttgagttggggtgacagatcctggtctctttcctcggtgtatgggccgcaagccgacgacgagaagctcttattccttgacgagatgtcggcaatcagggatctctgtttggtggaatggataattactggggatttcaacctcatcactgcggccgcggacaagaataacttgagaatcaaccgtcgcctcatgaatgcctttcgcagcaaggtaaatgagttggaattgaaagaagtgtatttgttcgggaggcggtatacctggagcagcgagcaggcggttcccactttggtgaagctagatcggttgttcgcttcgacccagtgggaggacatgtttccggaagcgcatctccaagccttaagttcttcagggtcggaccactgcccgcagctccttacttgcggcgacagggtgcctagacagaggagattcaggttcgagtcctactggactagacttgagggttttgaggaagtggtgaaggagacttggcagatggcgaggctcagcaaatttttatctaagtggggtcaaaggcacatcagttccttcagactgcagttgcagatcgcgaacgaactcatccttcgctcgagcaactccatccgcttccaagacatccacatgccccggctgaacttggctgatttggatgctgctttcaatgaggaagcagtttgggaagccatcaagatcatgccaaatgagaaatcacccacgccagatgggttcacgggcctgttctatcagaaatgttgggagatcatcaagcaggatgtgatggcagcgttgcacaaattctgctccgggaataatcagaacttggagctgcttaacacggcaatcattactcttttgccaaagaaggaggcctcatctctcttgaaggattacaggcccattagcctcattcatagctttgccaagctagcagctaaggtgatggctttaagactcactccaaggatggcggacttggttgcttgcacacagtcggctttcatcagaggtcgctccattcatgagaattttatctttgtgaagggtctcactaagctcttccactgccgaaagaaggccatgatccttctaaagctagatatcttgaaagccttcgactcggtttcttggcccttcctgctagacttgttacagttcaggggtttcggtcccaactggagaaggatcaatcctacttctgttgtgcccaatatgtccttttacgccgacgatgcggttatcttcttcaagccagtgcatcacgaagcggcaaccattaaagcagtcttgaatctgttcggggatgccaccggtcttctctctaactttgctaaaagcgctattactcctattcgctgcacagaagaacagaggttgctggtgcaggaagtgttgggttgcagaatggaggatcttccaatcacctacctagggctgcctctttctataaggaatccaaccaaggctgagttgcaacccattatggatcgaatggctaagaaggtggcgggctggaaaccaaagttactgtctccggatgggcggttgtgcctgatcaagtcagtcctcatggcgattcctgttcatctcctctcagtggttcagctcccacgatgggtcatcaaagacattgaacgtcgctgtagggggttcttgtggaagggacaggaagagataagtggtggtcattgcttggtcgcttggcgggagatatgcatgccaatcggcaacgggggtttggggatcaaggatatcgacagttttgggaaagccttgcggctcaaatgggaattcaaacgtcaagaacaaagagacagaccatggacaatggcaaattgggaatcagagaaagatgttggagatcttttcaactccctggcaattcatatacttggggatggcagccacactgacttttgcaggggaaattggttacctcgagggggaagcatcgcaaacaattgccccacactcttcagctttgtcagcagaactaagctcatggttgcccaaggtttgatctcgcacagatgggtcagagaccttcagggttctctttccagcagagctctggctgaatacctttctctttgggatgaacttcaatcggtggctgtccaggagggtcctatgatctcttctttcttacctcaactaagtgcccttttggggaagcaatttggaagaccaaagcgccagcgagagtcagattttttctttggttggcagcaaagggtagatgtctaa

SEQ ID NO: 14025 - DNA, 715 bp, Oryza sativa
  Clone ID: TFbOSC13260j.C1.o1.np
taatcaacttgcagaataagcctaacatacatcataacagcaaaagacttagatctgttaaggtcctatccttagtttctaatctgtctctccccttcgttttccctctctccctctccaaacctttgcaacagatggctgacaatgagaaaggcaataaggtcaggagtcaagacattggtacctcaagctcccgagtgaatgaagcacaagacaccagttgtgcggcagtggtcccaacacctgattaaccagaacaaattgcttatagagatactacagcagcatcggatgccaattttgaacccgagtcagatgcaacctcaggtgcagttggaggcagtccaagcactcacaccacaagtcagcgcaccgccaacatcccagaaggcccctcatgccatgccacatgttgacccaaaagaagcaagtatcatctgttttatgtgtgatgagcaagggcactacgcaaggaactgtcctcagcagaaaagaaaagcaccaatgcgaaccgaaggtgaagttcgtaagatgatcattaccagcacagaatggccctcaccaggaatgacaagacgtcagagaagaaacaccttccgaggtgcaccacagttgacagagcatcttttagctaatggaggtagagtgtctgatagtgaagattcagatcaagtctctcaaaagatgaagatgagaaatctccccaagggttcaa

SEQ ID NO: 14026 - DNA, 884 bp, Oryza sativa
  Clone ID: TFbOSC18671j.C1.o2.np
taggtggagtcctgcttataccccagttgagcgcctgtgaagatggagccgtaggccgctagtccgctgcttactagatggtcaggtcagtgaagaagaagacatcgtcagttgtttgccgaagctccggaagactgcaggatccgctagcgaaatggaggaagtagtgaagccagctgttcataacagcaaaagacttagatctgttaaggtcctatccttagtttctaatctgtctctcccctttgttttccctctctccctctccaaacctttgcaacagatggctgacaatgagaaaggcaataaggtcagaagtcaggacattggtacttcaagctcccgagtgaatgaagcaccagacaccagttgtgtgacactagtccaacacctggttaaccagaaccgattgcttatagagatactacagcagcaccagacgccaattctgaacttgagtcaaatacaacctcaagtgcagttggaggcagtccaagcactcacaccacaagtcagcgcaccgccaacatcccagaaggcccctcatgccatgccacatgttgacccaaaagaagcaagtatcatctgttttatgtgtgatgagcaagggcactacgcaaggaactgtcctcagcagaaaagaaaagcaccaatgcgaaccgaagatgaagtccgtaagatgatcattaccagcacagaatggcctccaccaggaatgacaagacgtcagagaagaaataccttccgaggtgcaacacagttgacagagcatcttttagctaatggaggtagagtgtctggtagtgaagattcagatcaagtctcctccgatgatgaagatgagaagtctccccaaggttttaaccagtgatgagctactgtac

SEQ ID NO: 14027 - DNA, 987 bp, Oryza sativa
  Clone ID: TFbOSC20369j.C1.o1.fg
atggctgacaatgagaaaggcaataaggtcagaagtcaggacattggtacctcaagctcccgagtgaatgaagcaccagacaccagttgtgtggcagtggtccaacacctgattaaccagaaccaattgcttatagagatactacagcagcatcggatgccaattttgaacccgagtcagatgcaacctcaagtgcagttggaggcagtccaagcactcacaccacaagtcagcgcaccgccaacatcccagaaggcccctcatgccatgccacatgttgacccaaaagaagcaagtatcatctgttttatgtgtgatgagcaagggcactacgcaaggaactgtcctcagcagaaaagaaaagcaccaatgcgaaccgaagatgaagtccgtaagatgatcattaccagcacagaatggcctccaccaggaatgacagaacatcagagaagaaattccttccgaggtgcacaacagttgacagagcatcttttagctaatggaggtagagtgtctgatagtgaagattcagatcaagtctcctcagatgatgaaggaatgggtcatttcgccgacaagtgcccaaaaccgagaaacgtagctgccagcacgtcagtccacgcaaacccccgcaatcagaagcttgctcctcaacgaattgtcatccatgcatcccgaagcagtcctataacccgcgttgcaacagctccaattccaatgagtgcactaccacaaggtgtcaatgctcaatttcagccccagccaccagctgacaagacagaggccagtatctgcgttgtacctttggaagttccaatacagcagctgagaaatcaagtacaagatgaagaacccgagttgaagaagggcattactccaaaaactgtccccaaccaaggcaaaatcgacctccacattaccgccaatttacacgaagcagacattccaatcgtattgtggtcactggagcaaacgccgtacccgtaa

SEQ ID NO: 14028 - DNA, 598 bp, Oryza sativa
  Clone ID: TFbOSC25205j.C1.o1.fg
atggctgacaatgagaaaggcaataaggtcaggagtcaggacattggtacctcaagctcccgagtgaatgaagcacaagacaccagttgtgcggcagtggtccaacacctgattaaccagaacaaattgcttatagagatactacagcagcatcggatgccaattttgaacccgagtcagatgcaacctcaggtgcagttggaggcagtccaagcactcacaccacaagtcagcgcaccgccaacatcccagaaggcccctcatgccatgccacatgttgacccaaaagaagcaagtatcatctgttttatgtgtgatgagcaagggcactacgcaaggaactgtcctcagcagaaaagaaaagcaccaatgcgaaccgaaggtgaagttcgtaagatgatcattaccagcacagaatggcctccaccaggaatgacaagacgtcagagaagaaacaccttccgaggtgcaccacagttgacagagcatcttttagctaatggaggtagagtgtctgatagtgaagattcagatcaagtctcctcagaagatgaagatgagaaatctccccaaggtttcaaccaggataaaatggaac

SEQ ID NO: 14029 - DNA, 536 bp, Oryza sativa
  Clone ID: TFbOSC25668j.C1.o2.np
aacctctgcagagggggcacactttacccacacgacattactaacccggatcacccagcccgcatttcgagagccgacacaggtttaccatatgccgacgagaggggtcccagaccaacaacaggttaggtcccagaccatactgtgccaggaagcccaggggtcctccccgacaccaccctggcaaatccacttgtctctcggcatcaaggctcccctgattagctaattactcagccaggggtgtcccatttcacccatgtggtcgtacttgttatatgttcggatgaaattccaaaggaataggtccttaagtgcaagagcgggaaaccgtgctcccggcacgtcccccggtctgcgatttttggaaattcatttagttcgtaagcaccgacccaggtgtcggtgacatgggatcaggagtatcatgactagaggtttgaggcagacacaatcgcacacgtggcctggtacccccgagggacgtcgggcccgagggtgatgcgttcgccctcctcttagtccccccgaggggg

SEQ ID NO: 14030 - DNA, 1409 bp, Oryza sativa
  Clone ID: TFbOSC33041j.C1.o1.np
atgtcatggcacagggttggtgtcctgctgctaggggctcagtcctgcctgcctgtcccgggggttccggccgtaggtgggattgggtcggtactcttgtctatggctaggatgggttggaaactatgtcacgtcttccgtccgtataccgtggtgatgtttaacagagaaaaaggaaagaatgtcagcgggtatacctcaagtaactcaagttttcaactcaatccaccactggcccccagagagttaacaagggcacacccttggtccattccgagcatgctgtttagttcacagctaccattggttggaagtcaagaccaaaatcagtatgtgtttgatcgagcctttgccacccaagtcaatgagcttccaatgccagaagagcaggtccccttttgtcatgattgtagagagcaaggacactatgccctgaattgtccatgggtatatgtcaaagaagccccttccctggtttagcagggcagacatcgctaaaccagcctcctcacaccaagtcaagcttgcagcctagtgtgcaaagtagagagctcaacggagagaatccattgaatcccgggaaatgctttcctcctagcctctcgtaccacgtggggtcacatactaagcaagccaaaggcaagaagagtaagaatcagaagagaaaagcaccgatgcgaactgaagaagaagtacgtaagatgactattaccagcaccgaatggcctccagcagggataactattcctagacgtcaaagaggaaatactttccgaggtgcacgacagttgacccagcacctcttaagccatggtggcagagtatctgatagtgaagggtcagatcaagtctcctcggatgatgaagatgagtctccccgacatctcggcgaggaagagatggaatcaaaggcatgcacccgttgcggggaaattgaacacgttgctagcgtgtgtctcacactctgcactcattgtgaagaagaccatccaccaggggagtgtcccacccgcaaggtcacatgttttctgtgcgaaggtacaaaccatgtgcccaaggattgccaactcagtgtgttgttgaccaagaccgcagaaatccaacgaacaaccctacgattgtctcatcagctagtcagctccaacagcaacatcgacgatatcatccacagcaccaatgctcctctcgctgcacctgactctgcagtaagtcatagcgataataccttcagcaccaaccattctctgcaccgaccgcctcagcaaagaattgtcatcgatggaagaagttgtgtctctccccgacctactccaggccgagccaaggacaatcaacctccggagggcgataccaagcagaagaccgttattcgcctcaaccagcaatcagaaggaaacttctcctgtgaa

SEQ ID NO: 14031 - DNA, 1098 bp, Oryza sativa
  Clone ID: TFbOSC417491j.C1.o2.np
gaaccgtttttccgtgtttttccccccaaaagcgggagaaacccgtcatgtcgccagctcgtgtgccactatatgcgttcattgcgaggaagaccatccacccgacaggtgtccaacgagcaggatcacttgtttcttttgtgaaggaactgatcatgtaccaaaagattgtcaattcagttttctgctgacgaagaagatggctaaccaacccgccagttccaacggagagaagcatcaaggcaacaccaatcctcgccaagattacagtttcagcctaactccagtgccaggacagaggaatcaaaatgagaaaagaaaatgccgagtccgggaagatatctgttgcttcaattgtcaaggaatgggtcatttcgccgacaagtgcccaaaaccgagaaacataactgccagcacgtcagtccacgcaactccctgcaatctgaagcttgctcctcagcgaattgtcatccatgcatcccgaagcagtcctatagcccgcgttgcaacagctccaactccagcgagtgcattaccacaaggtgtcaatgctcactttcagccccagcaaagaattgtcgtcgatggaagaagttgtgtctctccccgacctactccaggccaagcaaagggcaatcgacctccggagggcgataccaagcagaagaccgtcatccgcttcaaccagcaatcagaaggaagcttctcctgtgaatgatagcaatatgcagtcctatcacatcatcacagaaccaatcaaggatgcagtcactagaacaatgccagctgcaaggagtgaaatcttcaactcggtatcagatgctacacggagtgaaaagtgcaagccccggttaccaggttgactccgaagatatgaatcatgagaagttctggaacggaagcatcattgaactaccgcaacctagtctgagtcagccaaaaggtgcaccctggtccaagtcaggtgaagagaagattccatccgcaacaggaggtcaagccaagcagttccgagtggtgaagttttgctggaagtttgtcaagacgcaacggaagaagtcagacaagaagagaagaccgcccaacctatcttcttgc

SEQ ID NO: 14032 - DNA, 1467 bp, Oryza sativa
  Clone ID: TFbOSC21297j.C1.o9.fg
atggacatctctaggacaaatgaaggctacacgagctgcggcccggtagtcgagatgtcatggcacagggctggtgtcctgctgctgggggctcattcctgcctacctgtcccggaggttccggccgtaggtggggttgggtcggtactcttgtttatggctaggatgggttgggaactatgtcacgtcttccgtccgtataccgtggtgatgtttaacagagaaaaaggaaagaatgtcagcgggtatgcctccagtaactcaagttttcaactcaatccaccactagcctcaagagagttaacaagggtacacccttggtccattccgagcatgctgcttggttcacagctaccattggttggaagtcaagaccaaaatcagtatgtgtttgatcgagcacttgccacccaggtcaatgagcttccaatgccagaagaggatgtccccttttgtcacgattgtagagagcaaggacactatgccctgaattatccatgggtatatgtcaaagaagccccttcctttggtttagcagggcagacatcgctaaaccagcctcctcacaccaagtcaagcttgcagcctagtgtgcaaagtagagagcccaatggagagaatccattgaatcctgggaaatgctttcctcctagcctttcgtaccacgtggggtcacgtactaagcaagccaaaggcaagaagagtaagaatcagaagaaaaaagcaccgatgcgaactgaagaagaagtacgtaagatgactattaccagcaccgaatggcctccagcagggataactattcctagacgtcaaagaggaaataccttccgaggtgcacgacagttgacccagcacctcctaagccatggcggcagagtatttgatagtgaagggtcagatcaagtctcctcggattatgaagatgagtctctccgacatctcggcgaggaagagatggaatcaaaagcatgccctcgttgtggagaaattggacacgttgctagcatgtgtctcacactttgccctcattgtgaggaagaccatccaccaggtggatgtcccacccgcaaggtcacatgttttctatgcgaaggtacaaaccatgtgcccaaggattgccaactcagtgtgttgttgaccaagaccgcagaaatccaacgaacaaccctacgattgtctcgtcagttagtcagctccaacagcaacatcgacgatatcatccacagcaccaatgctcctcttgctgcacctgactctgcaataaatcatagcaataataccttcagcaccaaccattctctgcaccgacggcctcagcaaagaattgtcgtcgatggaagaagttgtgtctctccccgacctactccaggccgagcgaagggcaatcaacctcaggaggatgataccaagcagaagaccgttattcgcttcaaccagcaatcagaaggaagcttctcctgtgaatga

SEQ ID NO: 14033 - DNA, 4734 bp, Oryza sativa
  Clone ID: TFbOSC422890j.C1.o1.fg
atgggcgtaccccgctcagagggatacgtcattgagctacaccggttgatgaggcgcctacggtaccccagatttccgatctaccgagtgagatggtgtggacccgtttgggaggctcgggttgaggttcatacacgagttcctttagagtcagactacagctttccgacacgccaccgtcacgacttaccggagaccgcgatgcaggatgcagcccgggaggccttcctccgacttagctctattcaacgagctgagttagcgagtaccgagtttgctcaccacccgtttcaagaggagagcaactccgtctgcacagtccaggacacaccttgctgctacaacccgatagtgactcgactgtcccgatgggctgaggcagtagacgacttctacgaggaggctctgttagagattgacgaccagcagagacgtgtgggagagttagagactgaggtgactaacctcacagtgcagcagcttcagctagaggaggagcaccaggcttggggcagtgagatagactcactgaaggcacagcttcagacagaggggaccgacactgagccagagatagagccggacatcactgatccttcagaggatgagactcctgtccaccgcatcacctttgtcggaggccctcataccctcagcactgctcgcaagagcacacgacctccgggcaagaagcccaagccagatccagagatggcaagccgacatagggcgtcaaccagcaatgaagaaactcaagtacccgacctaaccaccctggccggagttatggccactcaaacccaacttctgcaagctattgcaaacaatcaaggcaaccgcggaggatcgagctttggagagtttatgaggactaagccacccactttcgctacggcagacgagcctatgggggcagaagattggctacgcaacataaagaagaaactgacccttgtccggatgcgcgaagccgacaaagtgatcttcgcagtaaaccaactggagggaccagctggtgattggtgggatacttacaaggaagctcgagaagaagatgctggagaacccacttgggaagaattcactgcagcttttcgtgagaacttcgtgcctgccgcggtgatgcgcatgaagaagaacgagttcagaaggctgcgacaaggaaacacaacggtgcaagaatatctgaaccggttcactcagttggcccgctacgcaatcggagacctcgcagatgaagaggaaaagatcgacaagttggagaatgatcaaaggactgtagagcacaaccgcaagaggaggcttgctatgaatcgcccgcctcagggagtacctcagcgactcaagggggccacttcgtctggacggaagcccactattgtggcaaccaaccgtcccgctgcgcctagcaatttcaataggccagttgcggttcagaaccgcacccctacaccaaccctggctgcccctggagtcaagaagaatgtggactgcttcaactgcggggagtatgggcattatgccaacacctgcccacatccacgcaaaactcctgtccgtactggcgctaatgcaatgactgttcgtggaactgctacccctgctgtcggacgaggtctattcaagactccgcagactaacaggaccgctaccggatttggacgcggacaagtgaaccatgtccgagctgaagaggcccaggaagataagggcgtactaatgggtatgttctctatcaattctagcccggttaaagttctgttcgattctggtgcatcgcattcattcatatccctggaggctagtcaaaagcacaacttaaccctagtgggacttagaaagcctatgatagtacactcccctgggggcgagataaccgtaagtcatgcttgcatcaacatacctattcgccttagggatgtggtgtttccctccaaccttatagttgtgatacctcagaccctggatgtcatattgggtatggattggttaacaaagaacagaggagtaatcgactgtagacgtagagaagttaccctgaccacaccctggggatcggatataagagcaactatggatcaagatcctagactggccgaacgtgccggaggcatattcaccatgctacccatgaagggaatgcccatagtgcagcgattgcccgatgtgtttccagaagatttacctggaatgccaccagatcgtgacatagagttcattattgacctgatacccggaactgctcccatatccaagagaccatatcggatgccagtcaatgagttggaggaacttaaaaagcaaatcagagagttgcaagagaagggatttgtatgccccagttcgtcaccttggggagccccagtgttattcgtcaagaaaaaagatggtagcatgagaatgtgtgtaaactaccgttcactgaacgaagtaactatcaaaaacaagtatccactaccacggattgatgatctcttcgaccaacttaaaggagctaaggtgttctctaagatcgaccttcgatcaggataccaccaactgaaaattaggactggggatatacccaaaaccgcgttctcaacacgctatggattgtatgagttcacagaagagcatgcggagcacttgcgtttggtactcgagaaacttcggaagcataagttatatgcaaaatttagtaaatgtgagttctggttaaaggaagtcgcctttctaggccatgtgatctcagccggtggagtagcagtggatcctgctaaagtggaggctgttacggaatggaaggcacctaaatctgtgaccgagattcggagttttctaggtttggccggatactaccgaaggttcattgagggattctctaagatagctcgaccaatgacgcaactactcaaaaaggaaaaggagtttgtgtggtcagaacagtgcaaggagagctttgagcagctcaaagaaaagttgacctctgcgcctattctagttctccccgacaataggaaagactttgttatatattgtgatgcatcaaggcaaggactaggaggagtactgatgcaggacggaaaggttgtggcctatgcatcgcgacaactgcgaccacacgaggaaaattaccctacccatgacctagaactagcagctgtggttcatgcactaaagatttggagacactatttgattggaaaccattgcgatatctacactgaccacaagagtctgaagtatattttcacccagtcagatctcaacttgaggcaaaggcgatggttggaattaatcaaggactatgatctagaggttcactatcacccaggcaaggcaaacgttgtggccgacgctttgagtcgtaagagtcattgcaatcatctgagaatggaagagatggctcctgagcttaaagaggaaatagcccagctaaacctgcatatagtacttcgtgggcggataaacaccctggacattcgacctcttttgagaacccaaatagaagaagcccagagggagaacagagaaatccaagaggtgaaagaacgcttagctgcagggtttgcaaaggaattttcgaccgatgagaaagatgtcctatggtataaaaagcgaatctttgtactcgaacagggtggactgagaggattaatcctaaaggaagctcacgaatcggcatattcattgcaccccggaagtactgaaatgtaccaggatctgaaggaaggatactggtggcccaacatgaagagagatgtggcagaatacgtagcgctctatgacgtatgccagaaggtgaaggctgagcaccagagaccagcaggtttgttgcaaccccttagaattcccgaatggaaatgggatgaaataggtatggattttatagttgggttgcccaagaccgcaacaggatatgattccatctgggtgattgtggatcgactcaccaagacggcaagattcatccctgtcaagacaaactatagcggtgccaaactcgccgagttgtacatgaccaggatagtgtgtcttcatggtgtgcctaagagaattatatccgatcgaggcacacagtttacctcgcatttctgggaaaaagtacatgaagccctaagaagttatcttgcttttagcacagcttatcatccacagacagatggccagacaaagagaacaaatcagacggtagaacgggcggtatttggacctgacattatcaaagaggccgaagaaaaggttagcctgatccgtgaccatttaaaggtggcacaatcacgacaaaagagtcacgctgacacccgaagaagaaacctggaattcaaggaaggagattatgtttgtctgaaggtttctccgatgagaggcacaaaaaggtttaaggtcaaagagaaactagcgccaagatatgtgggacctttccaagtcatggctagacgaggagaagtcgcatatcagttacagctaccagaaaatatcgccgatgtacacccagtcttccgtgtgtctcaattaaagaagtgcttacgagtgccggaggaacaagctccgctggaagagattcacattagcaatgatctcacgtatccagaacacccggtccggatattggatgaagccgaaaagaggactaggagcaaagtgtggcgtatgtacaaggtacaatggagtaatcacactgaggacgaagccacctgggaaagcgaagaattcttgaggacggaatacctgcacctattcgaaaactggtaa

SEQ ID NO: 14034 - DNA, 3059 bp, Oryza sativa
  Clone ID: TFbOSC8199j.C1.o1.np
tgccctccgttcgcgtcctcgcgccgtcattccgacgtttccggagagtccgttttcgcaggagaagaatttgaagagttcctaggccagcaaggcaactcctggtttggaatggtatattcctgatttggagatagatctgtacagccgggtatggttgttcagaatggttgggcctatacaacaggatgccgcgctacaagcctgagtacttgtttggtgttgagggttttgtccaggagttgcgtacgatgtcctttgtcattggatttgggactgcccctttttatgcccagattcctcatgatcgacatgaagagaagtgccgagtcaaagtcaccttgaacagtaatagtgaggatatcccctcagtaatgttcgaagctggagggagaaactacatccatgcatgtcaggaggtggcaaggatcgccataggagagctccgcgatcgctacagtgatcggttggccgacactgagtatcgctatcatcctcgccaaccccagggaagtgaccgtggcagctaccttaagaccgaaggaattgagaatgatgctaccacaaggcatttggttgagatgctatgggctatggatgaaagtcgtgcggagactgtgttagcagctcaagatcgtgaagaccggaatcgtggtaagatttgcaagctagaagacaaggtggatcgtttggagaaggaactagccgcattgaagggagaagcaccgctgcagaaggccagggttcgtcttaccgcaaggaagagagctctatttgtccctcgctaccaattggcgccaaagatggtgctcactcgcagcaacaggaatggccccaacaacaacaataacaacaacaatggagagaatcccacacttgcccaagtcctggctcaacaggcacagcttatgaacatgatgatgcagcaactccagaaccagcagaaccagctcaaccaagggaacaaccatgcacctcctcagaataagttagcagaatttcttcgtgtgaggccgcctattttctctagtaccactaatcctgttgaagctggtgattggctgcatgccatagagaagaagttggatttgcttcagtgcaccgatcaggaaaaggtctcatttgcatcacatcagttgcatggccctgcctctgaatggtgggatcacttccgccttaataggactactgctgaacctatcacttggcttgaattcaccgctgctttccggaagacgcatataccatcgggagtggtgtctctcaagaagaaggaattcaggtcgctcactcagggatctcgctctgttacggagtatttgcacgagttcaatcgtctggctcgttatgctccggaagatgtgcgcactgatgaagagcgtcaggagaagttcttggaaggactcaatgatgagctttcttacccactcatgactggggattatcctgatttccagaagttggtggataaggctattcgccaggaggacaaatacaaccgtatggagcagaagaaacgccggattgctcaattcaagacacaacaggagaataatcagaagccgcgtcttactttaggaccccagtccatgccacagggaggttcttcatctgttgttcgtccgcagcgtcagttcttcaacaacaatgctggcaacaacatccacaatcaagctccacgccctgttgccgcttcgacacagcaacagcctgtcaagagggagcaaggcagtaagcccgtagtgtgcttcaactgtggagacccaggacattatgctgacaagtgtctgaagccccgacgtgtgaaggttgtccctgcccagagcaactctaccgcaccagcatcaaaggcccgtgtcaatcatgttgctgctgcagaagctcaagatgctccaaatgtgattttgggtacgttctttgttaactcagttcctgcaacagtgcttttcgattctggtgctacacattcattcttatctatgagttttgcgggaaatcatgggatggaagtagaagatcttagacgtcctttgatggttagtaccccaagtaatcaagcactttctttgcaacgtagcccctctgtccgaatagaaattcagggagtaccatttctggccaatcttatcttgttagaatccaaagaccttgatgttatcctagggatggactggttagccagacataaaggtgtgatagactgtgctaacagaaaagtaaccctcaccagcaatgatggtcgagttgtgactgttcatgcattgtcttctgagtctttaaggtcaagactaaaccaaataactttgaaagagattcctatagtccgggagtatcctgatgtgtttccagatgatttacctggtatgccgcctaaaagggatatagagttcagaatagatttggtaccaggaacaactccgatccataagagaccttgtagaatggcagccaatgagttggcagaagtcaaaaggcaagtagatgatttgcttcagaaaggatacatcagaccgagttcatcaccatggggagctcgagttatttttgtggaaaagaaagatcatacccagaggatgtgtgtggactatcgtgcactaaacgatgtgactatcaagaataagtatccgttacccagaattgatgatttgtttgatcagcttaaaggtgccaccgttttctccaagatagatcttcgatcagggtatcaccagttgagaatcaaagaggaagatatacctaagacagcttttaccactagatatggattgttcgaatgtactgttatgtcttttggacttaccaatgcccctgctttcttcatgaacttgatgaataaggcgtttatggaatacctagacaagttcgtggtagtctttatcgatgatattcttatctactctcgaaccaaagaagagcatgaagaacatctttgccttgcattggagaagctgcgagaacatcaactgtatgccaagtttagcaagtgtgaattttggttgtctgaagtaaagttccttggtcacgtcatctcagcaggaggagttgccgtcgatcctagt

SEQ ID NO: 14035 - DNA, 4057 bp, Oryza sativa
  Clone ID: TFbOSC900190j.C1.o15.np
gatcaccccaacttagcacaaatgctcgccaatcaaaaccaactcatcgcagctttgctccaccaaatgcaaaacccataagcacccgctgctcaagctcccataaacgctctaccgcagtcaaagttgtcggaattcttccgagtctgacctcccactttttcaagcacaaccaatcccgtcgaagcaaactactggctgcacgtggttaacaagaagttggacctcatccaatgtaatgatgaagagaaagtcgccttcgccgctcaccaactgcatggacctgcttccgagtggtgggaccacttccaggccacccagccagctggacaaattattacttgggctcgttttctactgcttttcgcagagctcatgtacctgctggagttgtagctctgaagaagaaagaattccgtgaactcaagcaagatggcaggaccgtcactgaatttttgcacgagttcaacaggttggcccgctatgctcccaaggatgttcgtacagatgaagagaaacaggagaaatttctcgaagggttgaatgacgagttgtcagtccagctcatctctggtgaatacgaagacttccaaaagctagtcgacaaggcgatccgcttggaggacaagcaccggaagatggaaagcaagaaacgcaagttggctaatgccaggatgtttcaaggaccaagtcagaaaccgcgttatgtgtttccccctcaagttggttcttcatcagcagcacagcgtgcatcctgtccacagatgaacaacaagctgcagaactcaggatggaacaacggtcagcgttctacccctgctcagggtggatccacacgcaaagatagctccgggaagatacttgtctgctacaactgctatgagcctggacactttgccgacaagtgcccaaagccaaagcgtccgcaagctcctgcacctgcacgcaatgccaaccagagcaacaatggcaaccgcaacaacaacaacctggtgaggggacgtgtgaatcacgtctcggctgaggaggcacaggctgcaccagaagtcatacttggagctacgcattcctttatatcaagagattttgtggcaaaacaccaaataaggatagaagatcttagcaaccctatgataatatcaaccccgggaagccagctaccgactaagctcttcagcccatcagtaaccatagagatccaaggagtcacttttctggctaatctcatccttctgagctctaagaacccggatgttattcttggaatgaactggttgaccaagcacagtggtattatagattgtgctatccgatccatatctttgattgggggtactggccaacgagtcactttccatgctaagctagcacttccttgtaagcaagttctgaaccaggtcagtatggaggaaatacccatcgtgaaagagtatccagatgtttttccagaggaactaccaggcatgccgcccaagagggacatcgagtttcgaattgacttagtgcccgggacagcgccaatctccaagagaccgtaccgcatggctgccaatgagctagctgaagttaaaaagcagttggaagaactcaaaggaaaaggccacatccgaccaagcacttcaccctaaggagatcccgttatcttcgtggaaaagaaagacaaaactaagagaatgtgcgtggattaccgtgcactcaacaaggtcaccatcaagaataaatatcctcttccgaggattgatgacctctttgatcaactgaagggagcaaccgtgttctcaaagattgatcttcgatccggctaccatcagctaaggattcgggaggaagatatccccaaaacggcattcacgaccagatatgggttatatgaatgcacagttatgtcgttcggactaacgaatgcaccagccttctttatgaatctgatgaataaagtgttcatggaatatttagacaagtttgtcgtggtcttcattgatgacatcttgatctattccaagatagcagaagaacatgagcagcacctccacctagcgctagagaagcttagagaacatcaattgtatgctaagttcagtaaatgtgaattttggcttttagaagtgaaatttctcggacacgtcatttcagctcaaggagtggcagtggatccaactaacgtagaatcggtgaccaattggaatcaacccaagtcagtgacccaagtccgtagtttccttggacttgcaggctattatcgcagattcatcgaaaacttctcaagaatagcaaggccaatgactcagctactaaagaaagaagagaaattcatatggacctcgcagtgtgaagatgcatttcaattcctcaaaaagaagctagatttccaggtatactgtgatgcctctaaacaaggactagggtgtgtcttaatgcaagaaggacaagtggtagcctatgcttcccgccaacttcgccctcttgagagcaactacccaacgcatgacttggaactagctgctgtggtgcatgctttaaagatctggcggcactatcttatcggtaaccgttgtgagatatatacggaccagaaaagtttgaagtatatattcactcaaccagatctgaatctccgtcagagaagatggttagagctcattaaagactatgatgtgggaatccgctatcatccagggaaagctaacgttgtggctgatgctttgagtcggaagagttactgcaatgctatcatccatgaacagtgtccgcctggattatgccgagagcttgaggccttgaatttgggaatagtcaattatggctacgtagcgaccttagaggcgaaacctctactccttgaccatattcgagaagcccaaaaaggtgattctgatatccaagagatcaagaagaatatgaggaggggaaaagcaattgggttttccgaacatgaacatgggaccatttggtacggggaacgtgtttgtgttcccaatgatcctgagatcaagaagcttattctacaagaggctcactagagtcaatactcaatacaccccggcagtacaaagatgtatcaagacttgaaaatgaaatattggtgggtcagtatgaaacatgaaatagcagaatttgtggcactctgtgatgtatgttaacgggttaaagccgaacaccaaagaccagtcggactgctacaaccactcaagatcctagaatggaagtgggaagagattgggatggatttcatcaccggtcttccaaggacccaacctggatatgactctatttgggttgttatcgaccgcctaaccaaagttgcacatttcatcgtagtcaaaaccacttatcccggcagaagaaatgggaactcgtttgaactttagcaccgcttatcaccctcaaacagatggccagatagagcgggttaatcagattcttgaagatatgctcagggcatgtgctgaattttcgtacaataatagctaccaagccagtcttcaaatggcaccttttgaagccctatatggccggaaatgtcgaacccccactcctttgggaccagaccggagaacgtcaagtttttgggaccgacattataaaagaagtagaggagaaggtcaaggttatccaagcaaatctgaaagttgcccagtctcgacagaaaagctacgcagatacgcgtcgaagggagttagcctttgaagaaggagactttgtatatctcagagttacaccgcttcgtggagtacgtcgtttccacaccaagggaaagttggcaccacgttttgtgggaccatacaaagttcttggtaggagaggggaagttgcttatcaattggaactaccggcatctctgggaggagttcatgatgtattccacgtgtcgcaactcaagaaatgcctccgagtcccgacagagcaagcagatacagaacagattgagattcaggaagacctgacttatgtggagaagcctataaggatcttggaaacatctgaaaggcatacccgaagccgggtgatccgtttttgtaaggttcaatggagcaatcactcagaagaggaagcaaca

SEQ ID NO: 14036 - DNA, 4839 bp, Oryza sativa
  Clone ID: TFbOSC400772j.C1.o71.np
atgtcgaacgaggtgaaccatgtagggaaggctcccatgtttaatggcacaaactactccacttggaaaattaaaatgtctactcacctaaaagctatgagcttccatatttggagtattgtggatgtaggctttgctatcaccgacacacccttgacggagattgatcaccgcaaccttcaactcaatgcccaagccatgaatgccttgttcaactctttgagccaagaggagttcaatagagtgagcaaccttgagaccgcatatgagatttggaacaagttggcggagatccatgagggtacaagtgagtacaaggataccaagcttcatttcctcaagatccaatatgagacattctccatgttgcctcatgagagtgtgaatgacatgtatgggaggcttaatgtcattgtgaatgatctcaaggggcttggggcaaactacaccgatcttgaggttgcccaaaagatgcttagagccctaccggagaagtatgagacccttgtcaccatgctcatcaactgcgacatgtcaagaatgacacccgcaagcctcttggggaagatcaacaccaatgacatgtacaagttgaagaagaaggagatggaggaagcctcaccctccaagaagtgcattgctctccaagccgaagttgaagacaagagcaagagcaaggtgaatgaagtcaatgaggacttggaggaagagatggtccttcttgctagaaagttcaatgatctcttgggaaggagaatggagagaggaagggactccaactcaaataggagaagaaatagaagacccaacaagactctctccaacttgaggtgttttgagtgtggtgagaagggacactttgcttccaagtgcccttccaaggatgatgatggagacaagtcatccaagaagaagagtggaggctacaagctcatgaagaagcttaagaaggaagggaagaagatcgaggctttcatcggggaatgggactcaaatgaggagagctccacctcatccgggtccgaggaagaaggtggtgatgatgcaagctccaagaagaagaagatggccgttgttgccatcaaggaggctccatcactcttcgctccactttgtctcatggcaaagagctcctctaaggtaacatctcttagtgatagtgagagtgatgatgattgtgatgatgtttcctatgatgaacttgtgagtatatttgaggagcttcatgcttatagtgaaaaggagattgtcaagttcaaggccctaaagaaggatcatgcttctttagaggtcttgtatgaggagctaaagacctctcatgagagactcaccatttctcatgagaagcttaactctagctctagctcttgtatttctatttgtgatgcctcacttgttgttgagaacaatgagcttaaggagcaagtggccaagctcaacaagagtttggagaggtgcttcaagggtaagaacactcttgacaaaattttgagtgagcaacggtgcatccttaacaaggagggacttggattcattccaaataagggtaagaaaccttctcaccgtgccactcgttttgtcaagagcaatggtaagtattgctccaagtgccgtgaggttgggcatttggtgaactaccgcaccgatggaagccattgggtgcttgatagtggatgcactcaacatatgactggtgatagggctatgttcaccacatttgaagtaggagggaaagaacaagagaaagtgacttttggagacaatagcaaaggaaaggtaattgggttagttgcaaaaacttcattgggttggctttggcataggaggctagcccatgttggcatgaatcaattgagcaaactttcaaaacgtgatctagttgtggtcttgaaagatgtgaagtttgagaaagataagctttgtagtgcttgtcaagccggcaagcaagttgcatgttctcatcctactaaaagtatcatatctacatctagaccattggagctcttgcatatgattttgtttggcccaccaacctataagagcattggtggtaatagtcattggcttgtgattgttgatgattattctcgctatacttgggagttctttttgcatgataagtctattgttgccgagcttttcaaaaagtttgcaaaaagggcccaaaatgaatttagttgcactcttgtgaaaattagaagtgacaatggttccgagtttaagaataccaatatcgaggactattgtgatgatcttggtattaaacacgaactttccgctacctactcacctcaacaaaatggtgtagtggagagaaaaaatcgtacattgattgagatggcaaggactatgcttaatgaatatggttatgcctcaaatagcaaggcataccgggtctacaacaagaacaaaggtattgtgtaagaaaccgccgatgttcaatttgatgagactaatggctcctaagaagggcacgagaatttggatgatgtaggtgatgaaggcttgatgagagctatgaagaacatgtcaataggagatgtcaagcctattgaagtggaagacaaaccatccacctccactcaagatgagccatctacttccgctacgccaagtcaagctcaagttgaagtggaggaggagaaggcacaagatccacctatgccaccaaggatacacaccgctctttccaaggatcacccaattgaccaagtgttgggtgacattagtaagggtgttcaaactcgatctcgtgtcgcttcgatttgtgaacattacttgtttgtttcttgtcttgagccaaaacatgtagatgaagctctttgtgatccggattggatgaatgccatgcatgaagagctcaacaactttgcaagaaacaaggtgtggactttggttgatagacctagagaccacaatgtcattgggacaaagtgggtctttaggatcaaacaagatgagaacgggttggtggtgagaaacaaagcaaggttggtggcacaaggtttcacacaattgaaggtttggactttggtgaaacttttgcccctgtggcaagacttgaggctattcgcatccttcttacatttgcatcatgctttgatataaaactatttcaaatggatgtgaaaagtgcttttctaaatggtgaaattgccgaacttgtctttgtttaacaacctcccggttttgaagatcctaaaaatcctaaccatgtttataaactctcaaaagttctttatggtttaaaacaagctcctagggcttggtatgaaagattgagagattttcttttgtcaaaggatttcaaaattggaaaagttgacaccacccttttcacaaaaatcattggtgatgatttctttttgtgtcaaatttatgttgatgacatcatattcggttctactaatgaggtattttgcaaggaatttggtgatatgatgtttagggaatttgagatgtccatgattggagagttgagcttcttccttggacttcaaatcaagcaactcaagaatgggacgttcgtgagccaaaccaagtacatcaaggatctactcaagaggtttggcttggaggatgcgaagcccatcaagacacctatggcaaccaacgggcatcttgaccttgatgagggaggtaaaccggtagatttaaagctttatcgttccatgattggtagcttgctttaccttaccgcatctaggccggatatcatgtttagtgtttgcatgtgtgcatggtttcaagccgctcctaaggagtgtcacttagtggccgtgaaaaggattctaagatatttaaagcattcctctactattggcttgtggtacccaaaaggtgaagcacgaggtgttcttcgatttgcaccaatagagggtagtttcttgtgatgcctccccgcactcgccatgatcgtcgtgcacccactccgaatcccgtgagtgagcctgaggaatcgagcggagatgagtacgctcaaaggggatagtgaggaggaaagtggagatgatgtcagtagaagtggagaggatgaggatgaaggaagtgatgatatatgcacattgatccctccatccagtttgttgtgaacatgaggaatccatcacaatataccatcttgaggcaccatgatcagtttttgaggcctcgggacaccccggatccccgttttcacaccgctttccagaagagtgtgtatgagcaagtttatgcagggaaagcttttgcagagcataaggggatttcttggagagacatcaatgtccagagtttgaggggttgcaggatctcttcaagactgttagcattgatcggattgttactctcaagcaagactacaatgaagatttgatccggcagttttatgctacattttatgaagatggagtgcggtacacacatgggaaggttgccggcttgaggaccatccccagtgtggttaacaggattgtgagagctaccatcctccctcgccttggcaacaatgatgacattatgggggcggattggcacgtcatcgatgccatcattcagggccgtcagttcgacattgtgtctcttatgatgcaagagattgccatctccaaggggaccttcacttagggaatctattatgccccttacatcatgaggttgattcaagacaagcttggggctgctgggcaaaatttgaagaagcacaagcagtacaagccccgcctttagcttggagctccccgtgctcctagggcggcgccctcctctcatcctggagctagctcaagctcagcacctcctcctcctcctgggtattatccaaatgctttcatccttccacttcatctttttaccgggagt

SEQ ID NO: 14037 - DNA, 1254 bp, Oryza sativa
  Clone ID: TFbOSC414535j.C1.o20.fg
atggctacagtttctgctgcaaattctgcttctaatatttctgctagcatcaattcaattcctgtgcttactggtgcaaactttaaagaatggaaagagaatgttttaatcgttcttggggttatggatctggaccttgcacttcggaaggaacaacctattctctcagacaaaagtactaaagatgaaaatatggaacatgagagatgggatcgttcaaatcgcatgagtcttatgatcatgaagcgttctataccggaagcttttcgagatagtacatctgaggaggtcactacagctaaggttttccttgaaacacttcagaagagatttgctagaaatgagaaggctgaaactagtactcttttagcaaagctcatctcaatgaggtataagggaaaaggaaacatgagggagtacatcatggagatgtctcatcttgcttcaaaattaaaggcacttaagttagacttatccgaggatttgctcatgcacttaattttgatatcacttcctacacaatttaaccagtttaaggtgagctataattgtcagaaggataaatggacagttaataagctcatctctcactgtgtgcaagaggaagaaaggttaaagcaagatagaatagaaagtgctcatttatctatgacctcaaataacaagaaaagaaagagcaaagaagctgtggatgtccaacctcctttgaagaaaagggaaaataactgtggcgaggagccctgttatttttgcaagaaggaaggacatatgaagaaaaactgcaccaaatatcacgcttggcgtgctaagaaaggggaaacagacgaatacaaggaaattaagtgcccaaagagctacagatgtcttagaactgattcatacagatatttgtgggccattccctacggcttcctggaatggtcaacgatattttatcacgttcatagacgatttctcaagatatggcaactcacaaccatggctacagtttctggcgatggctggtggaagaagcaactggaggcgggactcgggatgggagctcgccggttgacgatggagatgtttggaggctcgactcgaccccgtctcttcagcggttgggaatggcggcgacggctggtggcggaggcggggcttgggatgagagcggcggctggggcgaggctagcagcgggggcagtggccggtggcggaggccagggaggagaggcggtaattcgtactttttctattctaataatacgagagtag

SEQ ID NO: 14038 - DNA, 1659 bp, Oryza sativa
  Clone ID: TFbOSC10744j.C1.o11.fg
atggcaccagcacagccagctccaccagctcaagcaaaggagaccggggcaaagccagggccctgctacaactgtggcgagcatggccactttgctgacaagtgcccaaagccgtgccgtgccgggccaaggtttgttctagcccgcgtcaaccatgcgtctgcagaggaggcacaaacagcaccagaggttgtactagacctagatgtcattcgtgggatggattggctgaccatgttcaagggcgtcattgattgtgtgaatcgcacggtcaccttggtcaatgagaaaggagaaacagtggtgtacaagtctccagcctcacccaagcaaggagcctcattgaatctggttgaggcgaaaagttctgtgaccgcagaggagaagagttcgacgaaattggaagatattcctatcgtctatcaatatccagaagtgttccccgaggacctcactaccatgccacccaagagagagattgagttccggattgattttgcactgggaactgctccaatctacaagaggccgtatagaatggcagccaatgagctagcagaggtgaagaaccaagtcgacgaacagcagcagaaacgatacatccgaccgagtacttcaccttggggtgctccgatcatttttgtggagaagaaggacatgacgaagaggatgttcgtcgattatcgcgcacttaatgaggtcacgatcaagaacaagtatccgttgccgagaattgatgacctattcgatcagttgaaaggagctaaagtgttttccaagatagacctgcgatcaggctatcaccagttgagaatccgggaagaggatattcccaagtcgggagaagagcatgagcaacatcttcgtctggtactcgagaagttgcaagagtaccagctctatgccaagttcagtaagtgtgacttctggttgtcggaagtcaaatttcttggtcacgtcattactgctcaaggagtggcagtggacccatcgaatgtggagccagttacaaagtggaccccacctaagacagtgacccagattcgaagtttccatggacttatgggttattaccgtcggttcattgagaatttctccaggattgccaggcctatgactcagttgcttaagaaagatgagaaatttaagtggacagctgagtgtgataagagttttgaggaactcaagaggaaattagtgtctgctcaagaagaactactgcaacgccttgggtttgaagacatgagcgtcaaattgcaacaagagcttgaacatctcaatttgggaatcgtggaacataggtacgtggctgccctaaaagcacgacccacgctcgtggatcaagtccgagcacctcaggtaaatgatcctgaaatagctgaactgaaaaagaatatgaggttcggaaaagcccgtgatttccatgaggatgagcatggcacaatctggttgggagaaagattttgcgtacctgaagacaaggagttgaaagacctgatactcaccgaggctcatcagacccaatactccattcatcccggcagtaccaagatgtaccaggatctcaaagaaaaattttggtgggccagcatgaggagggaaatggcggagttcgtcgcagtctgtgatgtttgtcagcgagttaaggcagaacattag

SEQ ID NO: 14039 - DNA, 3282 bp, Oryza sativa
  Clone ID: TFbOSC31822j.C1.o2.fg
atgtgggatgcacttgaggccaagttcggagttctcgacgccggcagcgagctgtatgtcatggagcagttctgtgactacaagatgatgctggctaaggaacttgagaacaacaactgtgagttgccggacaagtttgtggcgggtggcattattgccaaattgccaccttcttggttggactttgccacttctctaaagcacaagagacaagagttcagtgtttctgatctcattggctctttgggtgttgaagagaaggcgaggataaaggacaaccggagcaaaaaggttgagggaggttctagtgccaatatggtacaaaagaagaaccctcatgcatcccacaacaacaagaaagtcaagcctgatgtcaaacccaaggctacaaccaattttaagaagaaaggcaagggaaaggcaaagggtgactactttgtgtgtggcaagtctgggcattgggccaaggactgtcctgagcgcaaagacaggaagtctaccaacatggtcattagcgaggagggcggaggaacatcggggtacggtaaattattacctacagttctctctgtttttcattcacctgattggtgggttgatactggtgctaatattcatgtcgggagaggttccttcttgttgatgggaaacgggtcacttgcggctgttcatggtgttggtacggtcgatctgaagtttacttcgggaaaggccgtgcagctgaagaatgtgcagcatgtcccttcaataaagaagaatctagttagcggctctctactgtgtagagaaggttttagacttgtgtttgaatccaataaatgtgtcgtatctaaatatggaacttttattagaaaaggttatgacaacggaggcttgttctgcttttctttggatgacatgtgtaataataataatgttgtgaaccatattagcgagaatgatgagtccaatgtgtggcattcgcgactctgtcatgtaaatttcggttgtatgatgcgcttggctaatatgagtttaattcaaaaattcactttggtcaaaggttccaagtgccatacttgtgttcaatcgaaacaacctcacaaacctcacaaggcatctgaggcaagggatttggcacctctagaacttgttcattccgatttgtgcgaaatgaacggcatgttgactaaagggggaaagaaatatttcatgacactgatagatgattgcactagattttgttatgtttatctattgaaaacaaaggatgaagcattgcattactttaagacctataaagctgaggtagaaaaccaacttgaaaggaaaatcaaacggttgaggtctaatagaggtggggagtatttctccaatgagtttacatccttttgcgaagagtttggaattattcatgagaggacgcctccctattcaccccaatcaaatggggtagccaaaagaaataactgtactctaactgagatggtgaatgccatgttagacactgcgggacatttcaaggaatggtggggtgaggcagttttgattgcgtgtcatgtcctgaataaaattccaatgaagcataaggaagtaaatgtacctatagccaaaaagcataaacttggaccgaatactgttgattgtgtgttccttggttatgctattcacagcgtgggttatagattcttaatagtaaactctggagtacccgacatgcgtgttggtacaattattgagtccagagatgctacattctttgagaatgaatttcccatgaaaaatacacctagcacttctagtcaagaaactgtcataccccatgagcactttgcaccgatagaacacaatgatcaaacgcttgagggaaatcctgaggaggataagattgtagatactcgtaagagtaagagacaaagggttgcaaaatcctttggagatgactacattgtataccttgtggatgacactccaagaaccatagaagaggcatattcatctcctgacgctgactactggaaggaagcagtacgcagtgagatggactcgattatgtccaatggtacttgggaagtctttgagcgtccatatgggtgcaagcctgtaggatgcaaatgggttttcaagaaaaagcttaggcctgatggtacaattgaaaagtacaaggcaaggcttgtggccaagggttatacccaaaaagaaggcgaggattttttcgacacctactcactagttgcccgtttgaccacgattcgagtactacttgctctggcagcctctcatggtcttctcgtccatcagatggacgttaagatagctttcctaaacggagagctagaggaggagatctatatggatcaaccagatgggtatgtactagaaggtcaggagggaatggtgtgtaaactgttgaaatccttgtatggccttaagcaagcacctaagcaaaggcatgagaagtttgacaccacacttacatttgcaggctttgttgtgaacgaagctgacaaatgtgtgtactatcgctatggtgggggagaaggagtgatcttgtgcttatatgtcgatgacatattgatctttgggaccagcctcaatgtgattgaggaggtcaaggactttctgtccaagagttttgaaatgaaggatttgggagaggctgatgttattcttaacattaagctactgagaggagatgagggtgggattacacttgtgcaatcccactatgtggacaaggctctaaaaagagtaatgcgctatctaaagggcactgagctatgggcactgagctatggaattcactataccgggtacccaaaagtactagaagggtatagtgactcaaactggatatctgatgctaatgagataaaagccacaagtggatatgtgttcacacttggaggtggcgctgtttcctggaagtcttgcaagaagaccatcttaacgaggtcaacaatggaagcagaacttacagcactagatactgcgacagttgaggccgaatggcttcgtgaactcctgatggatttgccggtggttgaaaaaccagtgccagctatcctaataaactgtgacaatcaaacagtgattattaaagtgaacagttcaaaggataacatgaagtcatctaggcatatcaaaagaagactgaaatctgtcagaaagcagaaaaactccggagtgatagcattggactatgtccaaacggctaaaaatctggcagatcagtttactaaggggctaccacgtaatgtgatagacagtgcatcgagggaaatgggcttgatacccacctaa

SEQ ID NO: 14040 - DNA, 4950 bp, Oryza sativa
  Clone ID: TFbOSC400722j.C1.o47.fg
atgaaggctttggtgtctagctcgtgcctgccgtcaagcgcctgtggtagtcgccctagtcttccgctgtttctcgtttgtctctgtgtgtgctgggccttcgctgcccatatggccggcagcgtcagccgtcgtggtttggacatgactggcttcgtcttggagctacggggcatgtgcgttgtcctggggtatccgcctggagtggactaccaggccaggccgcttccggagcaggagggtgacgatgcagagccccacgctgcgtgggaggttactgcagtgatcctcactggctctcccgagcggacttcgctggcagtcaccgcgggtggagattccttccccgccgcttgccagaacgccgctctcctcgccatcggcactcttcaccagcgctacccggacgagttgcagcactcgccctaccgctaccaccctcgctgcggaggagcccgcgacttcgccaccttccgggatgctagctcggaggatgacgctaccatcgtgcacctggcgcgcatggtggaggcgtacgacgcggctcgtatcgacttccaacagatggtgcgccgtgggatggtcgagaacaacatgaagatcctggagctgcgtcaggagaatctgcagctgaagaaggacctacacgcgttggaggcgcagctgtgtcagcttaaggtcgcccagggtgagatggtgatgaccaggagaagtgctaataccggtgatggcaaccaacctgagggcagcaaccacaacaaccatggcagcccacccccacctcctcctccgcctccaccaccaccaccagataccaacgctattctcacccaaatcctcgcccagcaggccaacatgatgactgctttcctccaccacctccaaaatccgccacaacataatgctccaccaccacctccccaacactcaaaactcgctgagttcctccgcatccgcccacctaccttctccagctccaacaaccccgtggatgcgttggattggttgcatgccgtggggaaaaagctagacactgtgcagtgcagcgatgaggagaaagtcgtcttcgccgcccaccagctgcaggggcccgcatctctatggtgggaccatttgcaggctacgcagccagagaggcagcctattacttgggcccgtttcaccgccgatttccggaggacccatgtgcccgccggagtcgtggcccttaagaaaagagaattccgagagttgaagcaaggcaaccgctccgatgtgcgggaagatgaggagaagcaagagaagttcttggcaggaatggaccctgagctgtccgtccgtctagtctccggggactatccggatttccaacgtctggtggacaagagcatccgcttggaagccaagcacaaggaactggagtcgcacaagcgccgcttggcgaatttccgcaatcaacagggtgctaaccaaagggtccgctacaccaatccctatccagggggatcctcctcgcagcagcaacaacagcagcagcaacctcgctccgcgcctcgacctcaattcgtggtgcgcgtcccacagccgcagcagcagcagaatcaacaagggactcgtgcgccccgtcctcctacgccaactgtgcagcctggtcaaggccgcagggacgctcaaggtccgcagcgtctgtgcttcaactgctacgagcccgggcactttgcggataaatgcccaaagccgaggcgccagcaaggcaaagcgcctccccgctccaacaatggtggtaacgatgtcattcggggtcgtgtgaaccacgtgacggccgagaacgtgctgacaactccagacgtcatcgttggtacgttcctcattcattccatccctgctaccattttgttcgactctggagcttcccactcgtttatatctgtgccattcgtggggagaaatcagttgggggtagaaaggcttaggaaccctctgctcatcaccacccctggagtggttatgacagcaaagtattatagccctgccgtccctatagaaattcaggggattccttttccctcggatcttattctgctagacaccaagaacttggatgtgatccttgggatgaattggttggctcaattccaaggagtagtggattgcgcgagacgcactgtcactctgtaccgagggccggaacaaccggttgttttctttgcgcccccaacctctgtcagtagttcagaacttcatcagataggactgtcagaaatccccatcgtcagagagttcggagacgtgtttccggaagaactactcggtatgccacccaagcgagagattgagttccggatagatcttgctccaggaaccactcctctgtacaagcgaccctaccgtatggcagcaaatgaactggctgaagtcaagaaacagttggaagagttgaaaggaaaggggtatatacgtccgagtacttcccccaggggtgctcctgtgatttttgtggagaagaaagacaagacgaagaggatgtgcgttgactacagaactctcaatgaagtcaccatcaaaaacaagtaccctcttccccggatcgatgatctgttcgatcagcttaaaggtgccactgtattctccaagattgatcttcgttccggatatcaccaattacgtattcgtgaagaagatattccgaagaccgcattcaccacacgatacggactcaattgtgagttctggttgtccgaagtcaaattcttagggcacatgatatctgctaaaggagctgctgtggaccccgaaacagtgaccgccgtcactgattggaagcaacccaagaccgtcactcaaattcgcagtttcttaggtttggcaggatactatcggaggttcatcgagaacttctcccaaatcgctcgacccatgacacagttgttgaagaaagaagagaaatttgtgtggagcccgcaatgcgagaaggcgtttcaaactctcaaggaaatgctggtttcctcgccagtgttagtcttgccagatactcgtaaggatttcatggtgtattgtgacgcttcgcgccaaggactgaggtgcgtgctcatgcaggaaggacatgtggtagcctatgcctcacgccagttacggccccatgaaggcaactaccctacccatgatttggagttagccgcggtggttcatgctctaaaaatctggcggcactatctcattgggaatcgctgtgaaatatatactgatcataagagtttgaaatacatcttcacccagtcggatctgaatcttcggcagaggagatggttagaactcatcaaggattatgatgtgggaattcactatcatcctggtagggctaacgtggttgccaacgctctaagccgaaaaagccattgcaacactcttaacatccgtggcattccacccgaacttaatcaacagatggcagccctgaaactaagcatagttagccgtggattcttggctgcgttggaagccaagcctaccttgctcgatcaaatccgcgaggctcagaagaatgatccggacatgcatggactcctcaagaatatgaaacagggtaaagccgctggtttcacagaggatgaacatggaaccctatggaacggaaatcgggtatgcgttccagataacagagaacttaaacagctgatacttcaggaagcccacgaaagtccttattccatccaccctggcagtacgaagatgtacttagacttgaaggagaaatactggtgggtcagtatgaagcgggaaattgcagagttcgtggccctttgtgatgtgtgccagcgtgtcaaggcagagcaccaacgaccggccggacttctccaacctctccaagtaccagaatggaaatgggatgaaattgggatggatttcatcaccggacttccaaaaacccaaggtggatatgattctatatgggtagttgtggatcggttaaccaaggtagctcgatttattcctgtgaagaccacctatggagggaacaaattagccgagctctacttcgctaggatcgtgagtctccatggcgttcccaagaaaatcgtatctgattggggaagccaattcacctctcacttttggaagaagctccaagaagagctgggtacccgattaaatttcagcaccgcatatcacccgcagacggatggacagaccgagtgtctaaatcagatcctagaagatatgcttcgcgcatgtgtcctagatttcgggaagacctgggataagagtctcccctacgccgagttctcctacaataacagctaccaagccagtatacaaatggcaccttatgaagcgttgtatgggcgcaaatgccggacaccgctcttgtgggaccaagttggggaaagccaagtgttcgggactgatatcttgagagaagctgaagcgaaggtcagaaccattcgggataatcttaaggtggcacagtcccggcagaaaagttatgcatataaccgtcgccgtgacctggaattcgcaatggatgactttgtgtatcttcgggtcacgccattgcgaggtgtacacaggtttcagacaaaagggaagctcgcacctcggttcgtgggtcctttccgtatcattgctcggcgcggagaagtcgcttaccagctggagctgcccgcctctttgggcaacgtgcatgatgtgttccatgtgtcgcaactcaagaaatgccttcgagtgccatccgagcaggccgactcagagcaaattgaagttcgcgaagacttgacctacgtggagaggccagtgaaaatcctggacaccatggaacgcaggaccaggaaccgggtaatccgtttttgcaaggtccagtggagcaaccacgccgaggaagaagctacttgggagcgtgaagacgagctgaaggcagcccatcccgatctcttcgccagttcttccgaatctcggggtcgagattccgtttaa

SEQ ID NO: 14041 - DNA, 6840 bp, Oryza sativa
  Clone ID: TFbOSC401013j.C1.o3.fg
atggtgaacaccgagggtactgaagaacaaagaaaggctgaggaggatgctgcactgcaggctgggaagaaggaaagtgtggcaggagaatcttcttttttcactaaaggtatgatgggtcttaggagtgggataggaccatctgagataaaattggaagtaatgccaaatgaagtgaggttggaggggaccaaaaactacttgagctggtctagaagggcaaggttgatgctgagagcaaaaggtgtagaacattatttggaggaaacttgtgttgaacctattgataaatctagtgtggaatggaagatgtggaatgccactaattctacagtggtagcatggctgatgacttcggtgtccccatctattgctaggatgatagaagctattcagaatgcaacaattatatggaagacattgagcaacatgtattcaggagagggaaatgttatgatgatggttgaggctcaagacaaggtagataatctgaagcaagaagggagaacagttcaagagtatgccagcgagttgcaacatttatgggcagatcttgatcattataatcccctacaattaaagcatgatgatgatattgtgattggaaataaatggctgcaaaggagaagagtcattcattttttaaaggggttgaacaaggagtttgaggatagaagagcagctatgtttcaccaagctacattacctaatatggaggaagctatttcagccatggttcaggaggagatgaggcagaaagtgatgaaaggaagtaatcctgtgaggtctgcatacatcacaattaatgacagggagtgttataattgtgggttaaaggggcatgtgagctacaattgtccttctcctaggaacaataatggtcggggtgtagctcgtggaggagcacgtggtggctatggtggcttcaatgggagccgtggtggctatggtggctatgtaggagaccgaggtggccgaggaggtgaacgtggaggccgtggtggaagtcgaggtagaggcctaggtggtcctagggccaatgttgtcatgggggagagctcatctatcactctaacaggtgaacaagctgcacaatgggaggaatggcaaaagaataagggccccgtggactccaatcaacaaaattctgctaaagcaacaaccagccacttcggtaactttgccaactacgcccacacgggcgaaggtactcaggcacatgcacttgcatccacatatagacatcatgtagactggataatagattcaggtgcatcaaaacatgtcacaggcttgcctaataatttctcctcatactcccctattgctccctctgaaactatccaaattgctgatggttcatctcaactcattcatggtatagggtcagtagagtgcactccatctattagcttgtcatctgttttgcatgtcccttcctttctagtcaacctcctctctgttagttctatcattgatcaattcaagtgcatcgttatatttgatgagaattcatgtctcttccaggagaaggggactgggaggaggattgggactggagtcaggcgtaatgggctgtggtacatcaatcaagaggagatgggattggctgtagtagtgggagatactgagaaggagattattttgcttcattgtcaattaggacatccatctttcgagagtttgagtaagctgtatcctgacctctttaccaaagtggacaagagtagacttgtttgtgatgcttgtgagtttggcaaacatacacggtctacatatgctggaattggtcttcgtagttgtgaaccttttatattaatacattctgatgtttggggaccatgcccagttacttctgtgagtggattcaaatggtttgttacctttattgattgttatactcgtatgacttggatttacatgcttagacataagaatgaggtccttcgttgctttcaagacttccacaaattggttaccaatcagtttgatgcaagggttcggattattcgaattgacaatgggacggagtatattaatagtgagtttgtgtcatatgtctcagatcatggaattattcatcaaaccacttgtcctggagccccccctcaaaatggtgtagctgagaggaagaatcggcatttgctagaggtggctcggtcattaatgtttcaaatgaacgtacctaagtatctgtggagtgaggcagtgatgacagccgcataccttatcaaccgcatgccatccaggatacttggtatgaaatcaccagctgaacttttacttgggaagcgagaatttaaagttcccccaaaggtatttggttgtgtttgttttgtgagagatcatcgaccttttgttggcaagttggatcctcatgcagtaaaatgtgtctttgttggctatgcatctaaccagaaaggttataagtgttgggaccctattgggaagaggttatttgttagtatggatgtaacatttcgagagtttgaaccttattacaggagtcgaggagaccttgatcaatttctagaggagttctcaactgtcatcgagatcgacagtcgagtgggggagatagttgaggttgatgcacataagcaaggtgatgaggatgtggttattgggtcaattccgagttttgttggtgatactattgagaaggttgtggacattggtgagaaggtagtagacattagttgtgacaaggatgagggggtagttgtcgggacaatcccatgtcctctggagcgtgtggaagtacaacaaactgaaatgagagtatatcaaagaaggaacaagaaccaagttgataaggtgacagggaaggagcaagtgcaccagaggagccaaattcagaatcagggggagagaagtggtgagcctatgcaagagcaagacaaggagtcacaacagctgcaacagtttgagtacccagtcccagattcctcctctagcctctctccaacaagttcctccctccttgagacaagtgtgcctattccaaaggactggagatgtgcaaaacaagatccaagatggaaggatgcaatgaaggaggagttgcgtgcccttgaaaagaataagacatgggaacttgtgaaactaccaatggggaaaagagcagtgggatgtaaatgggtatttacagtgaagcaaacccctgaagggaaagtggatagatataaagcaagattagttgcaaaaggttatagtcaaacatatggaattgactatgatgaaacatttgcacctgtggctaagatgagtacgatgtcaagaatgcttttctacatggtgatttacaagaggaggtttaggcgtgtattgtgcaatatgggatattcacaatgtaatggagatcacacagttttctatagacatagggggacacacatcactatcttggctgtttatgttgatgatatagtgatcactggagatgatgtagaagagatcaaatgcttaaagcagcgattaggagaggcctttgaggtgaaggatcttggacctcttcgatactttcttgggattgaggttgctcgatcatcaaaggggatagttctctctcaaagaaagtatgtccttgatttgttaacagaaaccggaatgcttggatgtcgtacaagtgctactcccattgataggaatcaccaattgagtgcacagtcaggtgatccagttgatagggaaacttatcagaggttggttggacgtttgatatatctatgccacactagaccagatatctcttatgcggtgagtgtggttagtaggtatatgcatgatcctagaacaactcatctagaggtggttcataggatcttgaggtacttgaaaggaactcctggtaaggggttgtggtttagaaagaaccaacacttggatgtggaaggatattgtgatgctgattgggcaagcagtgtggatgatagaagatctacatcaggatattgtgtatttgtgggtggcaatgttgtctgttggcgaagcaagaagcaggcggtagtggctcgatctaccgcggaagctgagtatagagccatggcattgagtttaagtgagatgttgtgggtgaagaatctattgttggagctacggttgttcagaaataataccgtggtgcttcattgtgacaacaaatctgctatcaacattgcaaacaatccagttcaacatgaccgcaccaaacatatcgaaattgataggttcttcatcaaagagaagatcgatagtggggctcttagactacaatacattaaatcttctgagcagctagctgattgtttaaccaagggattaggtcctagtgagagagatgagtgcatgattactgattatgccatcacaaagatatctaatatgtatagctcattaactgaagataagctcatatctagcttcttcacttgcgatgattctccaagtgagagttctattgggtcaccactaaagctttgtcagatttgtgaagcaaccaaggccaaccgtaggacgcagaagaagggtgatttcttcaatccccggtgtaatagctatctgaagccaactgttgagagaacttacattgatcttgccagaataacatattacaagcttgagtctcttcacaccaatgcccgagtggtttttcagaatgtggtcaactttgctagcgaaagcgcgtgctttaccaccctttcgacgtgcatcttgttccaagctcagtgtttcctcagtgaagatgagggcggctccggaccgttcaggaaaccgctttgcattgccctccaggctccaggcctcagccagtacggcccaactggagaagaggcagcccatgagacggacagcaacaaggcccagaagtcaacgtgtaggtccgatttgctcaccggagagatgcctcgtgtccaaacatcaaggttgggtaaaaatcccattgaagttgattctgatggaggtgaagattttcatgttgattatgaagttggtaatgatgttgatgaaggtcctgaacatggtgaaattgatggtttactctctgttgtgctcaggaaaatgattgttcaagaagtgaaaaagaatttggttgacacttcttctgtcaattttcacaatcccattgataagaaatctaaagttcattcgaagactgagccctcatatagcagattctcaacaaaatatttctcaacagttctatcttctttatctcctgatcagaagcgtattattggtgactatggttttaattctttgctgatgtttgacaatgcttatgtcccaaacaaatttgcttcttggattgcaaatcatgttgatgtgaagtcttctcaaattgttttgaaagataaagtcattgcaattaataaagaatgtgttcatcatattttgggtctgcctattggtggtatggagttcccaactgattgtgatgctggaaagtcttttattctttcaaagtttggcaagagcgctcttccatctgtgagattctttggtgatatgttcatccgaaaggaaactctctctgatgatgaagttattacttcatttttgattgttgcaatggcttgttttctttgtccaaactcttctttggtccctagcaccaagtatttgactgtgtttgagaatgttgatgagcttcggtcatatgattggtcaaaatttgtgtacgaatggatgatgacttccatcaaaaagatccaaaagtttaataccttgggtggatgctggtttctctgggcagtgctttatctggattatgttgagtttggtgacaagaatgttcctattggttttcctagaatttctcactggaagaataatatgattactttgtattctgaccttgacaaagttgatgaagaaaactttggccttaggcccattaaggatttcaatgatacaacttatttcaaggttgtaccccctgaaaatagaattaatacattcagagataaattggagtctgctattggtaccatgttacctgctttcattaaggagaaaatttattcaatggttgttagtcattgttctgccaatcacattgttgacagtgagtcttgtgaagatattgctatcagcattatgctcttgctatgtgaacatgctggttctagagatggtggtgatcctgatgaaaacttaatttttgatgatatcaaccctgggtttcagcctaactatgcaattgatgttgaaaatgaaatcccttgtgatgctcataacaatggaagtaccaataaatctgttgctagtaaagctaatgaaacaagttttcgccatacaccttctcatgataaggaattgggggtaaatgatgattctgttattgtctctaaatctgctgttagattttccctttcaccaaactttaaaaaagatcaaggcttactaacccctgaagttggatatgctaataactccaattcacgatttgaacattctcgatctgcttcaggtcctactgtatctgctgttgctgctgttaggaatgttgcaaataaaattaaatcaagattatctcaactcaacaatgatgacaaaagaggaccattgttccctgatttaattgattcttgtgaagatgaagctgttggttatgctaagtcactttcatgtcaaaaggaatatcttaaccctcgatatgtcacttcctcttcatcacagcctggtatatcttttcactgtcttgacaattcacctgttcaagtaattggtataaataataatgaaggaacaagcagaactcattgtattcagaatgtgaagaagaggcgttttgatgatgttactaattctcctgatgtggaatatcttggtcattctacatttcctgattgctgcaag

SEQ ID NO: 14042 - DNA, 4953 bp, Oryza sativa
  Clone ID: TFbOSC401018j.C1.o18.gm
atggttatgccgatggtgacgaccaggagaaatgctgccaccgatgatggcaaccaacctgagggcagcaaccacaacaaccatggcagcccacctccacctcctcctccgcctccaccaccaccaccagataccaacgccattctcacccaaatcctcgcccagcaggccaacatgatgactgctttcctccaccacctccaaaatccgccacaacataatgctccaccaccacccccacaacactctaaactcgccgagttcctccgcatccgcccacctaccttctctaactccaacaaccccgtggatgcgttggattggttgcatgcagtggggaaaaagcaagacactgtgcagtgcagcgatgaggagaaagtcatcttcgccgcccaccagctgcaggggcccgcatctctatggtgggaccatttccaggctacgcagccagagggacagcctattacttgggctcgcttcaccgccgctttccggagaacccatgtgcccgccggagtcgtggcccttaagaaaagagaattccgagagttgaagcaaggcaaccactccgtgatggagtatttgcatgagttcaacaacctggcccgttacgccccggaggatgtgcgggaagatgaggagaagcaagagaagttcttggcaggaatggaccctgagctgtccgtccgtctagtctccggggactatccggatttccaacgtctggtggacaagagcatccgcttggaagccaagcacaaggaactggagtcgcacaagcgccgcttggcgaatttccgcaatcaacagggtgctaaccaaagggtccactacaccaatccctatccagggggatcctcctcgcagcagcaacaacaacagcagcaacctcgctccgcgcctcgacctcaattcgtggtgcgcgtcccacagccgcagcagcagcagaatcaacaagggactcgtgcgccccgtcctcctacgctagccgtgcagcctggtcaaggccgcagggacgctcaaggtcagcagcgtctgtgcttcaactgctacgagcccgggcactttgcggataaatgcccgaagccgaggcgccagcaaggccaagcgcctccccgctccaacaacggtggtaaggatgtcattcggggtcgtgtgaaccacgtgacggccgaggacgtgctgacaactccagacgtcatcgttggtacgttcctcattcattccatccctgctaccattttgtttgactctggagcttcccactcgtttatatctgtgccattcgtggggagaaatcagttgagggtagaaaggcttaggaaccctctgctcatcaccacccctggaggggttatgacagcaaagtattatagccctgccgtccctatagaaattcaggggattccttttccctcggatctgattctgctagacaccaagaacttggatgtgatccttgggatgaattggttggctcaattccaaggagtagtgataggactgtcagaaatccccatcgtcagagagttcggcgacgtgtttccggaagaactactcggtatgctgcccaagcgagagattgagttccggatagatcttgctccaggaaccactccgctgtacaagcgaccctaccgtatggcagcaaatgaactggccgaagtcaagaaacagttggaagagttgaaagaaaaggggtatatacgtccgagtacttccccctggggtgctcctgtgatttttgtggagaagaaagacaagacgaagaggatgtgcattgactacagagctctcaatgaagtcaccatcaaaaacaagtaccctcttccccggatcgatgatctgttcgatcagcttaaaggtgccacggtattctccaagatcgatcttcgttccggatatcaccaattacgcattcgtgaagaagatattcctaagaccgcattcaccacgcgatacggactgtatgaattcacggtgatgtcgttcggtttaaccaatgcacctgccttcttcatgaacttaatgaacaaagtgttcatggaatacttggataagtttgttgtggttttcattgatgacattctgatatactcacaatcagaggaagaccatcagcaccatctccgtctggtgttgggaaagttgcgggaacatcaattgtatgccaaacttagcaagtgtgagttctggttgtccgaagtcacattcttagggcacgtgatatctgctaaaggagttgctgtggaccccgaaacagtgaccgccgtcactgattggaagcaacccaagacagtcactcaagttcgcagtttcttaggtttggcaggatactaccggaggtttatcgagaacttctccaaaatcgctcgacccatgacacagttgttgaagaaagaagagaaatttgtgtggagcccgcaatgcgagaaggcgttcaaaactctcgaagaaaagctggttgcctcgccagtcttaatcttgccggatactcgcaaggatttcatggtgtattgtgacgcttcgcgccaaggattggggtgcgtgctcatgcaggacggtcatgtggtggcctatgcctcacgccagctacggcctcatgaaggcaactaccctacccatgatttggagttagccgcggtggttcatgctctaaaaatctggcggcactatctcattgggaatcgctgtgaaatatatactgatcataagagtttgaaatacatcttcactcagtcggacctgaatcttcggcagaggagattgttagaactcatcaaggattatgatgtgggaattcactatcatcttggtaaggccaacgtggttgccgacgctctaagtcgaaaaagccattgcaacactcttaacgtctgtggcattccacccgaacctaaccaacagatggaagccctgaacctaagcatagttagtcgtggattcttggctacgctggaagccaagcctaccttgctcgatcaaatccgcgaggctcagaagaatgatccggacatgcatggactcctcaagaatatgaaacagggtaaagccgctagtttcacagaggatgaacacggaaccctatggaacggaaaccgggagaaatattggtgggttagtatgaagcgggaaattgcagagttcgtggccctctgtgatgtgtgccagtgtgtcaaggcagagcaccaacgaccggccggacttctccaacctctccaagtaccagaatggaaatgggatgaaattgggatggattttatcaccggacttccaaaaacccaaggcggacatgattctatatgggtagtcgtggatcgactaaccaaggtagcacggttcattcccgtaaagaccacctatggagggaacaaactagctgaactctacttcgctaggatcgtaagtctgcatggcgtccccaagaaaattgtatctgatcggggaagccagttcacctctcacttttggaagaagctccaagaagagctgggtacccgattaaatttcagcaccgcgtatcacccgcagacagatgggcagaccgagcgtctaaatcagatcctagaagatatgctttgcgcatgtgtcctagatttcgggaagacctgggataagagtctcccctatgccgagttctcctacaataacagttatcaagccagcatacaaatggcaccttatgaagcgttgtatgggcgcaaatgccggacaccgctcttgtgggaccaagttggggaaagccaagtgttcgggactgatatcctgagagaagctgaagctaaagtcagaaccatttgggataatctaaaggtggcacagtcccggcagaaaagttatgaaaataaccgtcgccgtgacctggaattcgcagtgggtgactttgtgtatcttcgggtcacgcccttgcggggtgtgcacaggtttcagacaaaggagaagctcgcacctcggtatgtgggtcctttccgtatcattgctcggcgtggagaagtcgcttaccagttggagctgcccgcctccttgggcaacgtgcacgatgtgttccatgtgtcgcaactcaagaaatgtcttcgagtgccatccgaacaggccgactcagaccaaattgaagtttgcgaagacttgacctacgtggagaggccagtaaaaatcctggacaccatggagcgcaggaccaggaaccgggtaatccgtttttgcaaggtccagtggagcaaccacgccgaagaagaagctacctgggagcgcgaagacgagctgaaggcagcccatcccgatctcttcgccaggccgccgccggcgaccataggggcgcgggcgcgccgcctcccgtcggccgtgtcggcgaggccgccttcgggcgcgccccgcggctgccaggtggggcccggccgtcagccgcccgcgccctcggcacctcggccatttaaggaccggtcttcgggcctctgttgcaaagcactaccgtacttccacatgtctagtggggcaaatgaaggctacacgagctgcggcccggtagtcgagatgtcatggcacagggccggtgtcctgctgctaggggctcagtcctgcctgcctgtcccgggggttccggccgtaggtgggattgggtggaccatcgtggctgctacaaacttggttgaatctggtagtcatgaaagctgtcaatcggccatccgtgaaaggagccgaatttccaagcttcgccgcatcctcgccgacctcgtccacccctccgtttcggtcgccgaccgccggagcaccgtcgaccccgtccacccgagccgcgccgccgccttcctccgctccggtcgccgtttccgtcgtcgccatcgacccggggggcgcgggcgcgccgcctcccgccgctgcgccggcgtggtcgccttcgggcgcaccgagcgcgtgccgcgtgggggcccgctgtcagccggcccgcgcccttag

SEQ ID NO: 14043 - DNA, 1992 bp, Oryza sativa
  Clone ID: TFbOSC401145j.C1.o2.fg
atgactggcttcgtcttggagctgcggggcatgtgcgtggtcttggggtatccacatggagtggattaccaggccaggccgctcccggagcaggagggtgaggatgcagagcctcacgctggttgggaggtcactgcagtgattctctccggctctcccgagcggacttcgctggcagtcaccgcgggtggggattccttccccgccgcttgccagaacgccgctctcctcgccatcggcacccttcaccagcgctacccggacgagttgcagcactcgccctaccgctaccaccctcgtcgcggaggagcccgcgactacgccaccttccgagacgccagctcggaggatgacgctaccgtcgtgcatctggcacgcatggtggaggcgtacgacgcggctcgtatcgacttccatcagatggtgcgccgtggcatggtggagaacaacatgaagatcctggagctgcgccaagagaatctgcagctcaagaaggacctcgacgcgttggaggcgcagctgcatcagctcaagatcgcccagggagaggacagccgtcccaagcgtcgccgcgtctgccgcagccagaagatcaccgcccgcaagagcacctccaggcctgagcttgtccgtcagtccctggcgtggacctgcttcgtcgagacccctcgtgccgagcctgcgcccgtggttccccaggagggggaagcctccggcgttggtagctcggaggctccttctctgtttgctggttctgggtggggttttcagatggtgacgaccaggagaaatgttaacaccggtgaaggcaaccaacccgaaggcagcaaccccaaccaccaaggcaatccacctccgccaccaccaccagacaccaacgccattctcacccaaatcctcgcccagcaagctaacctgatgaatgctttcctccaccaccttcaaaacccgccacaacagaatgctcccccaccacctccccaacactctaaactcgccgagttcctccgcatccgcccacctaccttctctagctccaacaaccccgtggatgctttggattggttgcatgccgtggggaagaagctagacacggtgcagtgcagtgatgaggagaaagtcaccttcgccgcccatcagctgcaggggcccgcatctctatggtgggaccatttccaggccacgcagccagaagggcaacctattacttggactcgcttcaccgccgctttccggagaacccatgtgcccgctggagtcgtggctcttaagaaaagggaatttcgggagttgaagcaaggcaaccgctccgtgatggagtatttgcatgagttcaacaatctagcccgttatgccccggaggatgtgcgggaagatgaggagaagcaagagaagttcttggcaggaatggaccccgagctgtctgttcgtctagtctctggggactatcctgattttcaacgactggtggacaagagcatccgcttggaagccaagcacaaggagctggaatcgcacaagcgccgcttggcgaatttccgcaatcaacagggtgctaaccagagggtccgctacaccaatccctacccagggggatcctcctcgcagcagcagcagcagcagcaacctcgcccagcgccccgacctcaattcgtggtgcgcgtcccacagcagcaacagcagcagaatcagcaggggactcgtgcgccccgtcctcctacgccaactgtgcagcctgttcaaggtcgcagggacgcttcaggtccgcagcgtctgtgcttcaactgcttcgagcccgggcactttgcggataaatgcccagagccaaggcgtcagcaaggccaagcgcctccccgctccaacaacggcgggaaggatgtcattcggggtcgtgtgaatcacgtgacggccgaggacgtgctgacaactccagacgtcatcgttggacggtcatgtggtagcctatgcctcacgccagctacgacctcatga

SEQ ID NO: 14044 - DNA, 2319 bp, Oryza sativa
  Clone ID: TFbOSC401769j.C1.o8.gm
atggcgcgcctggagctggagccgccggaggtggtgcgccaggagctggagccgcggagggccattctgcctggagctggagccgccggaggtggtgcgccaggagctggagccggtgccgtgaacaacaacatcaacggaggcaattctgcctcacaatccagcggagggccattctcgggtgtactcgctgacaacatagtggacgtgtacatgcacatgccttccgggaaggacatgtgggatgcacttgaggccaagttcggagtttctgacgccggcagtgagctgtatgtcatggagcagttctatgactacaagatagtcgatgatcgttctgtagtagaacaagctcatgagattcagatgctggctaacgaacttgagaacaacaactgtgagttgccggacaagtttgtggcgagtggcattattgccaaattgccaccttcttggtcggactttgccacttctgtaaagcacaagagacaagagttcagtgtttctgatctcattggctctatgggtgttgaggagaaggcgatggcaaaggatgtccggggcaaaaaggttgagggaggttctagtgccaatatggtacagaagaagaaccctcatgcatcccacaacaacaagaaagtcaagcctaatgtcaaacccaaggctgcaaccaactttaagaagaaaggcaagggaaaggcaaagggagactactttgtgtgtggcaagtctgggcattgggccaaggactgtcctgagcgcaaagacaggaagtctgccaacatggtcattagcgagggcggaggaacatcgggagatgctacattctttgagaatgaatttcccatgaaacatacacctagcacctctagtcaagaaactgtcatgccccatgagcactttgcaccgatagaacacaatgatcaaatgcctgaggaaaatcctgaggaggacaacattgtagatactcgtaagagtaagagacaaagggttgcaaaatcctttggagatgactacattgtatacctcgtggatgacactccaagaaccatagaagaggcatattcatctcctgacgctgactactggaaggaagcagtacgcagtgagatggactcgattatgtctaatggtacttgggaagtcgttgagcgtccatatgggtgcaagcccgtaggatgcaaatgggttttcaagaaaaagcttaggcctaatggtacaattgaaaagtacaaggcaaggcttgtggccaagggttatacccaaaaggaaggcgaggatttctttgacacatactcaccagttgctcgcttgaccacgattcgagtactacttgctctggcagcctctcatggtcttctcgtccatcagatggacgttaagacagctttcctaaacggagagctagaggaggagatctatatggatcaaccagacgggtatgtactagaaggctttgtcgtgaacgaagctgacaaatgtgtgtactatcgctatggtgggggagaaggagtgatcttgtgcttatatgtcgatgacatattgatctttgggaccagcctcaatgtgattgaggaggtcaaggactatctgtccaagagttttgaaatgaaggatttgggagaggctgatgttattcttaacatcaaactacaaagagaagatgagggtgggattacacttgtgcaatcccactatgtggacaaggttttgagtcgctttggatatagtgactgcaagctagctcctactccttatgatcccagcgtgctattaaggaaaaaccgaagaatagcaagggatcaactgagatactctcaaatcattggttcattgatgtacttggctagtgcaacgaggcctgacatctcatttgctgtaagcaagctgagccggtttgtctcaaatccgggagatgatcattggcaggctctggaaagagtaatgcgctatctaaagggcactatgagctatggaattcactataccggatatccaaaagtactagaagggtatagtgactcaaactggatatctgatgctgatgagataaaagccacaagtggatatgtgttcacacttggaggtggcgctgttttctggaagtcttgcaagcagaccatcttaacgaggtcaacaatggaagcagaacttacagcactagatactgcgacagttgaggccgagtggcttcgtgaactcctgatggatttgccggatggctcatgccttaatgtgatccgagtggcttttccaagcagagatgttgacctacagaacatctcggaaggaacacacctatatgagttcgactgctag

SEQ ID NO: 14045 - DNA, 6189 bp, Oryza sativa
  Clone ID: TFbOSC403382j.C1.o1.fg
atgtattcagaagagggaaatgttatgatgatggttgaggctcaagacaaggtagagaatctgaagcaagaagggagaacagttcaagagtatgccagcgagttgcaacatttatgggcagatcttgatcattatgatcccctacaattaaagcatgatgatgatattgtgattggaaataaatggctgcaaaggagaagagtcattcattttttaaaggggttgaacaaggagtttgaggatagaagagcagctatgtttcaccaagctacattacctaatatggaggaagctatttcagccatggttcaggaggagatgaggcagaaagtgatgaaaggaagtaatcctgtgaggtctgcatacatcacaattaatgacagggagtgttataattgtgggttaaaggggcatgtgagctacaattgtccttctcctaggaacaataatggtcggggtgtagctcgtggaggagcacgtggtggctttggtggcttcaatgggagccgtggtggctatggtggctatgtaggagaccgaggtggccgaggaggtgaacgtggaggccgtggtggaagtcgaggtagaggcctaggtggtcctagggccaatgttgtcatgggggagagctcatctatcactctaacaggtgaacaagctgcacaatgggaagaatggcaaaagaataagggccccgtggactccaatcaacaaaattctgctaaagcaacaaccagccacttcggtaactttgccaactacgcccacacgggcgaaggtactcaggcacatgcacttgcatccacatatagacatcatgtagactggataatagattcaggtgcatcaaaacatgtcacaggcttgcctaataatttctcctcatactcccctattgctccctctgaaactatccaaattgctgatggttcatctcaactcattcatggtatagggtcagtagagtgcactccatctattagcttgtcatctgttttgcatgtcccttcctttccagtcaacctcctctctgttagttctatcattgatcaattcaagtgcatcgttatatttgatgagaattcatgtctcttccaggagaaggggactgggaggaggattgggactggagtcaggcgtaatgggctgtggtacatcaatcaagaggagatgggattggctgtagtagtgggagatactgagaaggagattattttgcttcattgtcaattaggacatccatctttcgagagtttgagtaagctgtatcctgacctctttaccaaagtggacaagagtagacttgtttgtgatgcttgtgagtttggcaaacatacacggtctacatatgctggaattggtcttcgtagttgtgaaccttttatattaatacattctgatgtttggggaccatgcccagttacttctgtgagtggattcgaatggtttgttacctttattgattgttatactcgtatgacttggatttacatgcttagacataagaatgaggtcattcgttgctttcaagacttccacaaattggttaccaatcagtttgatgcaagggttcggattattcgaactgacaatgggacggagtatattaatagtgagtttgtgtcatatgtctcagatcatggaattattcatcaaaccacttgtcctggagccccccctcaaaatggtgtagctgagaggaagaatcggcatttgctagaggtggctcggtcattaatgtttcaaatgaacgtacctaagtatctgtggagtgaggcagtgatgacagccgcataccttatcaaccgcatgccatccaggatacttggtatgaaatcaccagctgaacttttacttgggaagcgagaatttaaagttcccccaaaggtatttggttgtgtttgttttgtgagagatcatcgaccttttgttggcaagttggatcctcatgcagtaaaatgtgtctttgttggctatgcatctaaccagaaagaggagttctcaactgtcatcgagatcgacagtcgagagggggagatagttgaggttgatgcacataagcaaggtgatgaggatgtggttattgggtcaattccgagttttgttggtgatactattgagaaggttgtggacattggtgagaaggtagtagacattagttgtgacaaggatgagggggtagttgtcgggacaatcccatgtcctctggagcgtgtggaagtacaacaaactaaaatgagagtatatcaaagaaggaacaagaaccaagttgataaggtgacagggaaggagcaagtgcaccagaggagccaaattcagaatcagggggagagaagtggtgagcctatgcaagagcaagacaaggagtcacaacagctgcagcagtttgagtacccagtcccagattcctcctctagcctctctccaacaagttcctccctccttgagacaagtggtaacatttctcctacctttaaacaagtagagttacctcttgcacaacgtagagaaactagatctaatgctggaagacctcctatacgccttggttttgaacaccttagttctagacatgacattgcaaactatatctcatactctcatatttcacctgcatataaagcattcattgcatcattgcaaatagtgcctattccaaaggactggagatgtgcaaaacaagatccaagatggaaggatgcaatgaaggaggagttgcgtgcccttgaaaagaataagacatgggaacttgtgaaactaccaatggggaaaagagcagtgggatgtaaatgggtatttacagtgaagcaaacccctgaagggaaagtggatagatataaagcaagattagttgcaaaaggttatagtcaaacatatggaattgactatgatgaaacatttgcacctgtggctaagatgagtacggtgaggattttgatatcatgtgcagttaactttggatggcctcttcatcagttagatgtcaagaatgcttttctacatggtgatttacaagaggaggtatatatggagattccccctggatttggaaatagccagactgttgggaaggtatgtaggctcaagaagtccttgtacggtttgaaacaatccccacgtgcatggtttgacaggtttaggcgtgcattgtgcaatatgggatattcacaatgtaatggagatcacacagttttctatagacataggggggcacacatcactatcttggctgtttatgttgatgatatagtgatcactagagatgatgtagaagagatcaaatgcttaaagcagcgattaggagaggcctttgaggtgaaggatcttggacctcttcgatactttcttgggattgaggttgctcgatcatcaaaggggatagttctctctcaaagaaagtatgtccttgatttgttaacagaaaccggaatgcttggatgtcgtacaagtgctactcccattgataggaatcaccaattgagtgcacagtcaggtgatccagttgatagggaaacttatcagaggttggttggacgtttgatatatctatgccacacgagaccagatatctcttatgcggtgagtgtggttagtaggtatatgcatgatcctagaacaactcatctagaggtggttcataggatcttgaggtacttgaaaggaactcctggtaaggggttgtggtttagaaagaaccaacacttggatgtggaaggatattgtgatgctgattgggcaagcagtgtggatgatagaagatctacatcaggatattgtgtatttgtgggtggcaatgttgtctgttggcgaagcaagaagcaggcggtagtggctcgatctaccacggaagctgagtatagagccatggcattgagtttaagtgagatgttgtgggtgaagaatctattgttggagctacggttgttcagaaataatactgtggtgcttcattgtgacaacaaatctgctatcaacattgcaaacaatccagttcaacatgaccgcaccaaacatatcgaaattgataggttcttcatcaaagagaagatcgataatggggctcttagactacaatacattaaatcttctgagcagctagctgattgtttaaccaagggattaggtcctagtgagaaaaaaatccccaaaactgaactttactatctaaggattgtgaaagggtattttcaagaattaagtctatccaacatcatttcaagattttatcacttgaggatccttgatgtacggcaatgcagtggtcactttaatttaccgagtgatatgagtaaccttataaagctgcggcattttcttgacccaaatgattcttttcactctgccattgctaatgtgggaaagctgaaatgcttacaagaattaaagagatttgaagtcaaaggacaagctgaggcatttgcattaagacagatagggcagttggaagagctaaaaggatcactgtgcatttataatcttgaaaatgcacagacaggggaggaagcaaaccttttaaacaaaaggcacttacacaagttagagctgcttggcataccacagctagcaaaatgggttggaaatgatgcttcccatgtgttctccctgctagaggtgttcattataagagattgcccagaacttatggagttgccattttcacattcaacttgccctcgatcaggacaggagatgaacttgacccaattccctacactaagggagcttgaggttgtaaattgtccaaagctgtcatcatttcctcacattccttggacaagctctccatgtcgtgttcttattgatgaagtgggatcagattttcagcggttggattactcaaaaaataaccaatctgaattttgcttgaaagttgtgggaaaggatggccatctagatatgtcattctggaatgtattggcatttagtaatctaactgaactgaaagtgttgtatttgaagaaatgtcctcctttgccactgaaacatctcctagtgctatcatgtttgaggagtcccacgatacatgattcaagtaatgtcttgttgaatgttgaagctgagaacactgtcggctaccaatttcagattgagggtctcagtatcgatgactgtagctgtagcgggaaggaactgacgctgttgctgtctcttttccccaagctgtcaatgttttcattacaaggttgtgggaagataagagtgcttggtgtggcgaaggagcagacaatggcaatgtcagcattgtcgtcgtcaccttctggtcataagttggaggatgcacatataggacaggagcaggagcaggagcaactaagaggagaggatgagaaagcagcagctgatgcaggactgctgctcttgcctcaccaacttcaggatttgtacatagagaatatctcaaagctgatcctgcagtttgattctctcgtagatggcatggcaggaggcttaagaagcataggaggaggattacaaggcctgcacttcctaagaacactcactattcggggttgccccaatttcctctcctcctactactcgtcctcctcctcgtcttgcttcccatttccatcctccctgcaatatctgcatcttgatggtgtgggaggcatggagactctggcgcctctctcaaacctcagctctctcaccagattaaccatacggaaatgtatggatttaagaggtgaggacttgtcttctctcctcgcccatggccaactcacaaacctgaacatcttcgagacccccaaattcttcgtcgggtgtggctctgactccttgcggctgcagtgcctccaaacagatgacatcacaaaggtccttgccgcgcccatctgcagcctccttgcttcctcactcaccagcctaaccattagttggaacgacgaggtggagcgcttcacaaaggagcaaagcgcggcacttctgctcctctcctccctccaggaccttgaattttggtactgctcggagctgcagtccctccccactgggttacacagactcaccagcctcaagagattaaagatctggtcctgtccagccatccgttcgctgcccaagggcggccttccgagttcactggaagtactagatgtccgttctagcaacaacgaggagctcaaaaggcagtgccgcgacctgagaggaaccattccgatcatcaaagacagacgatactactaa

SEQ ID NO: 14046 - DNA, 4914 bp, Oryza sativa
  Clone ID: TFbOSC420787j.C1.o26.fg
atggtgcattgctttgaattgtgttatgcagagggtattgtcacaatctctattcggtggtacatctctggccagagtaaaactattcaaatagccgtgcccgcggttatggcgggtctaacaatgtctttcgtgattagtttcacacctctcaccataataaatgatgttgtacttggtaataacttgtttagctcctggtttggaacgatgccgcgcttcaagcctgagtacttgttcagtactgagggatttgtccaggaattgcgtacgatgtccttcgccataggattcgggactgcccctttgtatgcccagattcctcatgatcgtgatgaagagaagtgccgtgtcaaaatcactctgaacagtaatcgtgaagatatcccatcggtggcaaggatcgccataggagagctccgcgatcgctacaatgatcagttggccgacactgagtatcgctaccatcctcgccaaccccagggaagtgactttggcagctaccttgaacctgcaggaattgagaatgatgctaccacaaggcatttggttgagatgctgtgggccatggatgagtcccgcgctgaagtcgtgatagctgctcaagatcgcgaaaaccggaatcgtggtaaaatttgcaagctggaggacaaggtggttcgtttggagaaggaactagccgcattgaagggagaagcaccaccacaaaaggccagggttcgtcttactgcaaggaagagagctctatttgtccctcgctaccagttggcgcctaaggttcgtgtggtggaagaagaagctgtcccagtcccagcgaatcctccgatcgttaacatggtgcttactcgcagcaatgggaatggccccaacaacaacaatcacaacaacaacaatggagagaatcccacgcttgcccaagtcctggctcaacaggcacagctcatgaacatgatgatgcagcaactccaaaaccagcagaaccaggggaacaatcatgcacctccccagaacaagttagcagaatttcttcgtgtgaggccgcctactttttctagcactaccaatccagtagaggctagtgattggctgcacgccatagaaaagaagttggacctgcttcagtgcactgatcaagaaaaagtctccttcgcttcacatcagcttcatggccctacctctgagtggtgggatcatttccgtctaaacaggaccactgcggaaccaattacttggcttgagttcactgctgctttcagaaaatctcacataccctcgggagtgttgtctctcaagaagaaggaattcaggaagctcactcagggatctcgctctatcactgaatacttgcatgaattcaatcgtctggcttgctatgctccggaagatgtgcgcactgatgaagagcgtcaagagaagttcttggaaggactgaatgatgagctctcttacccattaatgactggggattatcatgattttcagaagttggtggataaggccattcaccaggaggacaagtacaatcgtatggagcagaagaaacgcaggattgctcacttcaaagctcagcaggggaatagtcagaggccgcgtcttgctatgggacctcaggcagtgtcacagggaggatcttcgtctgttgttcgtccgcagcgtcagttcttcaacaacaatgctggcaacaacaaccacaaccaagctccacgtcctgttgcaactccaacccagcaccagcctgccaagagggagcaaggaaacaagccaggagtgtgcttcaactgtggtgaaccaggtcattattctgacaagtgtctgaagccccgccgcgtgaaggttgtccctgcacagaacaactccaccacaccagcgtcaaagtctcgtgtcaatcatgttgctgctgcagaagcccaaggtgctccagaagtgattttgggtatgttccctgttaactcagttcctgcaacagtgcttttcgattctggtactacacattccattttgtctatgagttttgcgggaaatcatgggatggagatagaagatcttagacgtcctttgatgatcagtaccccgagtaaccaagcactctcatcacaacgtagcccctctgtcagaatagaaattcaaggtgtaccatttctggccaaccttattttgttagaatccaaataccttgaagtcatcctagggatggactggttagccagatataaaggtgtgattgactgtgccaatagaaaagtaactctcaccagcaatgatggtcaagttgtaactgttcacgcattgccttctgagcctttaaggtcaagtttgaatcaaataactttggaagagattcccatactacgggactacccggatgtgttcccggatgatttacctggtatgccccctaaaagagatatagaattcagaatagatctggtaccaggaacaactccgatccataagagaccttatagaatggcagccaatgaattagcagaggtcaagaggcaagtagatgatttgcttcagaaaggatacattagaccaagttcgtctccatggggagctccagtcatttttgtggagaagaaagatcatacccagaggatgtgtatggattatcgtgcactaaatgatgtgaccatcaagaataagtaccctctgcctagaattgatgatttgtttgatcagcttaaaggagccaccgttttctccaaaatcgatcttcgatcggggtatcaccagttgaggattaaagaggaagatatacctaagacggcttttaccactcgatatgggttgtttgaatgtactgttatgtcttttggacttaccaatgcccccgctttcttcatgaacttgatgaataaggtgtttatggaatacctggacaagttcgtggtggtctttattgatgacatccttatctactaccgaaccaaagaagagcatgaagaacatcttcgccttgcactagagaagctacgagagcatcaactgtatgccaagtttagcaaatgtgaattttggctgtctgaagtaaagttccttggtcacgtcatctcagctggaggagttgccgttgatcctagtaatgtggaatccgtaaccaactggaaacaaccgaagacagtttcaaagattcgtagtttcttgggtcttgcaggctattaccgaaggtttatagagaatttttccaagattgctaagcctatgacacgactgcttcagaaagatgtgaagtacaagtggtcggaagaatgtgagcattgttttcaagagttgaaaaatcgcttgctatcagcacccattttgattttacctgatccaaagaagggtttacaagtgtactgcgacgcatctaagcttgggttaggttgtgttctgatgcaagatgggaatgtggttgcctatgcatctcgtcagttacgtccgcatgagaagaattaccctacccatgatcttgagttagctgcggtggttcatgcgttgaagatttggtgtcactacctctttggtactcgtacggaggtgtacacggatcacaagagtttgaagtatatctttactaagccggatctgaacatgagacagtggagatggttggaactgattaaggattacgacatgagaattcattatcaccccggaaaggttaatgttgtagcagatgctctcagcaggaaaggctattgcaatgctacggaaggacgacagttgccgtgggaattatgcaaggaatttgaaagattgaatttgggaattgtcagtagaggtttcgtagcagcattagaagcgaagcccactctcatagaccaggttagagaagctcaaatcaatgatcctgatattcaagagattaagaagaacatgagaagaggaaaggctattggatatttggaagatgagcaaggaaccgtatggttgggcgagagaatttgtgtcccagagaacaaggagttgaaagatgcaatcttgaaggaagctcatgacacgttatactccattcaccctggtagtaccaagatgtaccaagatctcaaggagaaatgttggtgggcaatcaaggcagaacatcagaaacccgcaggtttgctgcagcctttaaagataccaaaatggaggtgggaggaaattgggatggatttcatcaccggtctaccgacaacatcatcgggccatgactctatttgggtgatagtcgacaggcttaccaaggtggcccatttcatctctgtgagaacaacatattccggaagtcgtttggcagaattgtatatggcaaggattgtgtgtttgcacggtgttcctaagaaaatagtatccgatcgaggtagccagtttacttcaaagttttggaagaagcttcaggaagagatgggttccaagctgaactttactaccgcttatcacccgcagacagacagacaaactgaaagggtaaatcagattttggaagacatgttgagagcttgtgctttagacttcggtggaagttgggataagaatctgccttacgcggaattctcatacaacaacagttgtcaagctaggctccaaatggctccttatgaagcactgtatggtcggaagtgccgcactccgctttcgtgggatcaaacgggagaacgtcaggttttcgggaccgatattctaagggaagctgaagagaagttgaaaaagtgtttaagggtacctactgaagaagccagtcttgagcagatagaaatccaagaggatctgacatatgttgagaaaccaatccgtatcttggagacagatgagagaagaaccaggaatcgagttatgcgtttttgcaaggtccaatggagtaatcacttggaagaagaagctacttgggagcgagaagatgaattaaagtcagcccatccgcatcttttcgccagctcttcccaatcttga

SEQ ID NO: 14047 - DNA, 6047 bp, Oryza sativa
  Clone ID: TFbOSC874j.C1.o1.np
atggagcccgagagcgccgcgccggtttccttcccctccggccgccctctcccccttccaaccctatataaaccctccccgcacctcctccgttcgtttccgcctctcgccgcccttcctcctcgccggaatcgagcttgcgccgtcgctctctctctccgccgtcgccgccgagctccggtccgccgccgtcgtcgccccggaccacctcccacctcggcgccgcctccttcggcttcgccgcatcctcgtcgacctcgtccacccctccgtttcgctcgtcgaccgccggagcgcccccgtccccgtcgacccgagccgcgccgccgccttcctccgctccggccgccttttcgtcgtcgccgtcgacctagggtgagccgtggaccaccgcctcgtttccccctttccctcccttctctcggccgccgctccgccgtgcctatggccgccgccggcgaccataggggcgcgcgcgcgccgcctcccgccggccgcgccgccgtggccgccttcgagtgcaccgagcggctgccgcgtggggcccggtcgtcagccgcccgcgccctcgggtgcggctgacgcgtggggcccacggcgccggccggtgcgagcccgggtgcgcccggtccaccgtggacccgcctcggccatataaggaccggtcttcgggcctctgttgcaaagcactaccgtacttccacatgtctagtgggacaaatgaaggctacacgagctgcggcccggtagtcgagatgtcatggcacagggccggtgtcctgctgcaaggggctcagtcctgcctacctgtcccgggggttccggccgtaggtgggattgggtcgatgtacacctctgatcagagtataatctattcgaatagccgcgccctcggttatgggcaagccgagcaatgtacccaaatggccagcagcatcaaccgtcgtggtctggacctgactggcttcgttttggagctacggggcatgtgcgttgtcctagggtatccgcatggagtggattaccagggcaagcagctcccggagcaagagggtgacgatgcagagccccacgctgcttgggaggttactgcagtgatcctcactggctcacccgagaggacttcgttggcagtcaccgcgggtggtgattccttctccgccgcttgccagaacgccgcactcctcgccatcggcactcttcaccagcgctacccggacgagttgcagcactcgccctaccgctaccaccctcgtcgcggaggagcccgcgactacgccaccttccgggatgctagctcggaggatgacgctaccatcatgcacctggcgcgcatggtggaggcgtacgacgtggcccgtatcgacttccatcagatggtgcgtcgcgggttggtcgagaacaacatgaagatcctggagctgcgtcaggagaatctgcagctgaagaaggacctagacgcagtggaggcgcagctgcatcagctcaagatcgcccagggagaggtctatcgccccaagcgtcgtcgcgtctgccgcagcctgaagatcaccgcccgcaagagtacctccaggcccgagcttgttcgtcagtccctggcgtggacctgcttcgtcgagacccctcgtgccgagcccgcccccgttgttcctcaggaggatggagcctccggcgttggcagcacagaggatgcgttgctgctcaccttccatggtgacaaccaggagaagtgctgctaccggtgaaggcagtcacctcgaaggcagcaaccacaacaaccatggcagcccacctccacctcctcctccgcctccaccaccaccaccagacaccaacgccatcctcacccaaatcctcgcccagcaggccaacatgatgactggtttcctccaccacatccaaaatccgccacaacataatgctccaccaccacccccacaacattctaaactcgccgagttcctccgcatccgtccgcctaccttctctagctccaataaccccgtggatgcgttggattggttgcatgccgtggggaaaaagttagacaccgtgcagtgcagcgatgaggagaaagtcatcttcgccgcccaccaactgcaggggcccgcatctatatggagggaccatttccaggctacgcagccagaggggcaacctattacttgggcccgcttcaccgtcgctttccggagaacccatgtgcccgccggagtcatggcccttaagaaaagggaattccgggagatgaagcaaggcaaccgctccgtgatggagtatttgcatgagtttaacaacctggcccggtacgccccggaggatgtacgggaagatgaggaaaagcaggagaagttcttggcaggaatggaccctgagctatccgtgcgtctggtctccggggactatccggatttccagcgtttggttgacaagagcatccgcttggaagccaagcacaaggaactggagtcgcacaagcgtcgcttggcgaatttccgcaatcaacagggggctaatcaaagggtccgctacaccaatccctatccagggggatcgtcctcgcagcagcaacagcagcagcaacctcgctccgcgccgcgtcctcaattcgtggtgcgcgtcccatagccgcagcaacagcagagtcagcaagggactcgtgcgccccgtcctcctatgccagccgtgcagcctggtcaaggccgcagggacgttcaaggtcagcagcgtctgtgcttcaactgcttcaagcctgggcactttgcggataaatgcccaaagccgaggcgccagcaaggccaagcgcatccccgctccaacaacggtggtaaggatgtcattcggggtcgtgtgaaccacgtgacggccgaggacgtgctgacaactccagacgtcatcgttggtacgttcctcattcattccatccctgctaccattttgttcgactctggagcttcccactcgtttatatctgtgccattcgtggggagaaatcagttgggggtagaaaggcttaggaaccctctgctcatcaccacccctggaggggttatgacagcaaagtattatagccctgccgttcctatagaaatccagggaattccttttccctcggatctgattcttctagacaccaagaacttggatgtgatccttgggatgaattggttggctcaattccaatgtgtagtggattgtgcaagatgcactgtcactctgtaccgagggacggaacaaccggtcgttttctttgcacccccaacctctgtcggtagttcagaacttcatcagataagactgtcggaaatccccatcgtcagagagttcggagatgtgtttccggaagaactacccggtatgccgcccaagcgagagattgagttccggatcgatcttgctctaggaaccactcctctgtacaagcgaccctaccgtatggcagctaatgaactggccaaagtcaagaaacagttggaagagttgaaagaaaaggggtatatacggccgagtacttccccctggggtgctcctgtgatttttgtggagaagaaagacaagacaaagaggatgtgcgttgactacagagctctcaatgaagttaccataaaaaacaagtaccctcttccccggatcgatgatctgttcgatcagcttaaaggtgccactgtattctccaagattgatcttcgttccagatatcaccaattacgtattcgtgaagaagatatccctaagaccgcattcaccacgcgatacggactgtatgatttcacggtgatgtcattcggtttaaccaatgctcgtgctttcttcatgaacttaatgaacaaagtgttcatggaatacttggataagtttgttgtggttttcattgatgacattctggtgtactcacaatcagaggatgaccatcagcaccatctccgtctggtgttgggaaagttgcgggaacatcaattgtatgccaagcttagcaagtgtgagttctggttgtccgaagtcaaattcttagggcacgtgatatctgctaaaggagtcgctgtggaccccgaaatagtgaccgccgtcactgattggaagcaacccaagacagtcactcaaattcgcagcttcttaggtttggcaggatactaccagaggttcatcgagaacttctccaaaatcgctcgacccatgacacagttgttgaagaaagaagagaaatttgtgtggagcccgcaatgcgagaaggcgttccaaactctcaaggaaaggctggtttcctcgccggttttaatcttaccggatactcataaggacttcatggtgtattgtgacgcttcgcgccaaggattggggtgcgtgctcatgcaggaaggtcatgtggtagcctatgcctcacgccagctacggccccatgaaggcaactaccctacccatgatttggagttagccgctgtggttcatgctctaaaaatctggcggcactatctcattgggaatagctgtgaaatatatactgatcataagagtttgaaatacatcttcactcaatcggatctgaatcttcggcagagaagatggttagaactcatcaaggattatgatgtgggaatccactatcatcctggtaaggccaacgtggtcgccgacgctctaagtcgaaaaagccattgcaacactcttggcgtccgtggcattccacctgaacttaatcaacagatggaagccctgaacctaagcatagttggtcgtggattcttggctacactggaagccaagcctaccttgctcgatcaaatccgcgaggctcagaagaatgatccggatatacgtggactcctcaagaatatgaaacaaggtaaagccgctggtttcacagaggatgaacacggaaccctatggaacggaaatcggcgtgtcaaggcagagcaccaacgaccggccggacttctccaacctctccaagtaccagaatggaaatgggatgaaattgggatggatttcatcaccggacttccaaaaacccaaggcggatatgattctatatgggtagttgtggaccgactaaccaaggtagctcggtttattcctgtgaagaccacctgtggagggaacaaactagccgatctctacttcgctaggatcgtgagtctccatggcattcctaagaaaattgtatctgataggggaagccaattcacctctcacttttggaagaagctccaagaagagctgggtacccgattaaatttcagcaccgcgtatcacccgcagacagatggacagaccgaggtctaaatcagatcctagaagatatgcttcgcgcatgtgtcctagatttcgggaagacctgggataagagtctcccctatgccgagttctcctacaataacagctaccaagccagcatacaaatggcaccctatgaagcgttgtatggacgcaaatgccggacaccgctattgtgggaccaagttggggaaagccaagtgttcgggactgatatcctgagagaagctgaagctaaagtcaaaaccattcgggataatctaaaggtggcccagtctcggcagaagagttatgcagacaaccgacgccgtaatctggaattcgcagtggacgattttgtgtaccttcgggtcacgccattgcgaggtgtacacaggtttcagacgaaagggaagctcgcacctcggtttgtgggtcctttccgtatcattgctcgacgtggggaagtcgcttaccagttggagctgcccgcctccttgggcaacgtgcatgatgtgttccatgtgtcgcaactcaagaaatgccttcgagtgccgtccgagcaggccgactcagagcagattgaggttcgcgaagacttgacctacgaggagaggccagtgaaaatcctggacaccatggagcgtaggactaggaaccgggtaatccgtttttgcaaggtccaatggagcaaccacgccgaggaagaagctacttgggagcgtcaagacgagctgaaggcagcctatcccgatctcttcgccagttcttccgaatctcggggtcgagattccgtt

SEQ ID NO: 14048 - DNA, 291 bp, Oryza sativa
  Clone ID: TFbOSC874j.C1.o2.gm
atgacgaaaaggcggccggagcggaggaaggcggcggcgcggctcgggtcgaccgggacggcggcgctccggtggtcgacgagcgaaacggaggggtggacgaggtcgtcgaggatgtggcgaagccgaaggaggcggcgccgaggtgggaggtggtccggggcgacgacggcggcggaccggagctcggcggcgacggcggagagagagagcgacggcgcgagctcgattccggcgaggaggaagggtggcgagaggcggaaacgaacggaggaggagaactcggcatag

SEQ ID NO: 14049 - DNA, 5579 bp, Oryza sativa
  unsure (1)..(5579): unsure at all n locations
  Clone ID: TFbOSC900012j.C1.o13.np
acggccgggcccacctggcagccgcggggcgcgcccgaaggcggcctcgccggcacggccgacggaaggcggcgcacccgcgccccgatggtcgccgccggcgaccaacggcgcgacggagcggcgcccgagagaggggagggaagggggaagtgaaacaacggtcctcggctcaccccgggacgacgaggacggcggaaacgacgaccggagcggaggaaggcggcggcgcggttcggatcgacgaggacggcggcgctccgacggtcggcgggcgaaacggaggcgcggacgaggtcgacgaggacgcggcgaagccgatggaggtgacgccgagacgggaggaggtccggggcgacgacggcggcgaactgaagctcggcggcgacggcggagagagaggacgacggcgcgagcacgaatccgacggggagagtccttttttccccccttccctcttgggccggctcggcccacttccctccctctctctcctctcccccgcggcccaatcggcctcctccccgccgcgtgccgctgacgggcgggcccgcccgccaccctcgctgacgggtggggcccacccgcacgcacgtaaggaacgcccgttggtgatcctcgctggctctcccgagcggacttcgctgacagtcaccgcgggtggagattctttccccgccgcttgccagagcgccgctctcctcgccatcggcactcttcaccagcgctacccggacgagttgcagcactcgccctaccgctaccaccctcgccgcggaggagcccgcgactacgccaccttccgggatgctagctcggaggatgacgctaccatcatgcacctggcgcgcatggtggaggcgtacgacgcggctcgtatcgacttccatcagatggtgcgccatgggatggtcgagaacaacatgaaaatcctggagctgcgtcaagagaacctgcagctcaagaaggacctagacgcggtggaggcgcagctgcatcagctcaagatcgcccagggagaggtctgccgccccaagcgtcgccgcgtctgccgcagccagaagatcaccgcccgcaagagcacctccaggcccgagcttgttcgtcagtccctggcgtggacttgcttcgtcgagacccctcgtgccgagcccgcgcccgtggttccccaggagggggaagcctccggcgttggtagcacggaggatgcgctgttgctcaccttccgtcctggcccgtcgcagcagagaaatgctgccaccggtgatggcaaccaacccgaaggcagcaaccacaaccaccagggcagcccacctccacctccacctcctcctccgcctccaccaccgccagataccaacgccattctcacccaaatcctcgcccagcaggccaacatgatgactgctttcctccaccacctccaaaatccgccacaacataatgctccaccaccacctccccaacactctaaactcgccgagttcctccgcatccgcccacctaccttctctagctccaacaaccccgtggatgcgttggattggttgcatgccgtggggaaaaagctagacactgtgcagtgcagcgatgaggagaaagtcatcttcgccgccaaccagctgcaggggcccgcatctctatggtaggaccatttccaggctacgcagccagaggggcaacctattacttgggctcgcttcaccgccgctttccggaggacccatgtgcccgccggagtcgtggcccttaagaaaagagaattccgagagttgaagcaaggcaaccgctccgtgacggagtatttgcatgagttcaacaacctggcccgttacgccccggaggatgtgcgggaagatgaggagaagcaagagaagttcttggtaggaatggaccctgagctgtccgtccgtctagtctccggggactatccggatttccaacgtctggtggacaagagcatccgcttggaagccaagcacaaggaactggagtcgcacaagcgccgcttggcgaatttccgcaatcaacagggtgctaaccaaagggtccgctacaccaatccctatccagggggatcctcctcgcagcagcaacaacagcagcagcaacctcgctccgcgcctcgacctcaattcgtggtgcgcgtcccacagccgcagcagcagcagaatcaacaagggactcgtgcgccccatcctcctacgccaactgtgcagcctggtcaaggcagcaggcacgctcaaggtccgcagcgtctgtgcttcaactgcttcgagcccgggcacttcgcggataaatgcccgaatccgaggcgtcagcaaggccaagcgcctccccgctccaacaacggtgggaaggatgtcattcggggtcgggtgaaccacgtgacggccgaggacatgctgacaactccagacgtcatcgttggtacgttcctcattcattctatccctgctaccattctgttcgactctggagcttcccactcgtttatatctgtgccattcgtggggaggaatcagttgggggtagaaaggcttaggaaccctctgctcatcaccacccctggaggggttatgacagcaaagtattatagccctgccgtccccatagaaattcaggggattccttttccctcggatctgattctgctagacaccaagaacttggatgtgatccttgggatgaattggttggctcaattccaaggagtagtggattgtgcgagacgcactgtcactctgtaccgagggccggaacaaccggttgttttctttgcacccccaacctctgtcagtagttccgaacttcatcagataggactgtcagaaatccccatcgtcagagagttcggagacgtgtttccggaagaactacccggtatgccgcccaaacgagagattgagttccggatagatcttgctccaggaaccactcctctgtacaagcgaccctatcgtatggcagcaaatgaactggccgaagttaagaaacagttggaagagttgaaagaaaaggggtatatacgtccgagtacttccccctggggtgctcctgtgatttttgtggagaagaaagacaagacgaagaggatgtgcgttgactacagagctctcaatgaagtcaccatcaaaaacaagtaccctcttccccggatcgatgatctgttcgatcagcttaaaggtgccactttattctccaagatcgatcttcgttctggatatcaccaattacgtattcgggaagaagatatccctaagaccgcattcaccacgcgatacggactgtatgaattcacggtgatgtcattcggtttaaccaatgctcctgccttcttcatgaacttaatgaacaaagtgttcatggaatacttggataagtttgttgtggttttcattgatgacattctggtatactcacaatcagaggaagaccatcagcaccatctccgtctggtgttgggaaagttgcgggaacatcaattgtatgccaaacttagcaagtgtgagttctggttgtccgaagtcaaattcttagggcacgtgatatctgctaaaggagttgctgtggaccccgaaacggtgaccgccgtcactgattggaagcaacccaagacagtcactcaagtccgcagtttcttaggtttggcaggatactaccggaggttcatcgagaacttctccaaaatcgctcgacccatgacacagttgttgaagaaagaagagaaatttgtgtggagcccgcaatgcgagaaggcgttcaaaactctcaaagaaaagctggttgcctcgccagtgttaatcttgccggatactcgcaaggatttcatggtgtattgtgacgcttcgcgccaaggattggggtgcgtgctcatgcaggatggtcatgtggtggcctatgactcacgccagctacggcctcaagaaggcaactaccctacccatgatttggagttagccgcggtggttcatgctctaaaaatctggcggcactatctcattgggaatcgctgtgaaatatatactgatcataagagtttgaaatacatcttcactcagtcggacctgaatcttcggcaaaggagatggttagaactcatcaaggattatgatgtgggaattcactatcatcctggtaaggccaacgtggtcgccgacgctctaagtcgaaaaagccattgcaacactcttaacgtccgtggcattccacccgaacttagtcaacagatggaagcccctgacacctaagcaatagttggtcgcggatttttggctgcgtggaggnnnnnnnnnnnnnnnnnnnnnnnnnnnnnnnnnnnnnnnnnnnnnnnnnnnnnnnnnnnnnnnnnnnnnnnnnnnnnnnnnnnnnnnnnnnnnnnnnnnntagaattcacggagttncgnaccctttgtgatgtgtgccagcgtgtcaaggcagagcaccaacgaccggccggacttctccaacctctccaagtacctgaatggaaatgggatgaaattgggatggatttcatcaccggacttccaaagacccaaggtggatatgattctatatgggtagtggtggatcgattaaccaaggtagctcgattcattcctgtgaagaccacctatggagggaacaaactagccgagctctacttcgctaggatcgtgagtctccatggcgttcccaagaaaatcgtatctgataggggaagccaattcacctctcacttttggaagaagctccaagaagagctgggtacccgattaaacttcagcaccgcataccacccgcagacagatgagcagaccgagcgtctaaatcagatcctagaagatatgcttcgcgcatgtgtcctggatttcgggaagacctaggataagagtctcccctatgccgagttctcctacaataacagctatcaagccagcatacaaatggcaccttatgaagcgttgtatgggcgcaaatgccggacaccgctcttgtgggatcaagttggggaaagccaagtgttcgggactgatatcctgagagaagctgaagctaaagtcagaaccattcgggataatctaaaggtggcacagtcccggcagaaaagttatgcagataaccgtcgccgtaacctggaattcgcagtggacgattttgtgtatcttcgggtcacgccattgcggggtgtacacaggtttcagacaaaagggaagctcgcacctcggtatgtgggtcctttccgtatcgttgcccgacgcggagaagtcgcttaccaattggagctgcccgcctccttgggcaacgtgcatgatgtgttccatgtgtcgcaactcaagaaatgccttcgagtgccatccgagcaggccgactcagagcaaattgaagttcgcgaagacttgacctacatggagaggccagtgaaaatcctggacaccatggagcgcaggaccaggaaccgggtaatccgtttttgcaaggtccagtggagcaaccacgccgaagaagaagctatctgggagcgtgaagacgagctgaaggcagcccatcctgatctcttcgccagttcttccgaatctcggggtcgagattccgtt

SEQ ID NO: 14050 - DNA, 1782 bp, Oryza sativa
  Clone ID: TFbOSC900040j.C1.o2.gm
atggccctgcctctgagtggtgggatcacttccgtctcaacaggatcactgcggaaccaattacttggcttgagttcactgctgctttcagaagatgtgcgcactgatgaagagcgtcaagagaagttcttggaaggactgaatgatgagctctcttacccattaatgaccggggattatcatgatttccagaagttggtggataaggccattcgtcaggaggataagtacaacctgtcacaaggaggatcttcgtcagttgttcgtccgcagcgtcaattcttcaacaacaatgctggcaacaacaaccgcaaccaagctccacgccctgttgcaactccaacccagcaccagcttgccaagagggagcaaggaaacaagccaggagtgtgcttcaactgtggggaaccaggtcattattctgacaagtgtctgaagccccgacgcgtgaaggttgtccctgcgcagaacaactccaccgcaccagcgtcaaaggctcgtgtcaatcatgttgctgctgcagaagcccaatgtgctccagatgtgattttggccaatgaattagcagaggtcaagaggcaagtagatgatttgcttcagaaaggatacattagaccaagttcatctccatggggagctccagttatttttgtggagaagaaagatcataccaagaggatgtgtgtggattatcgtgcactaaatgatgtgactatcaagaataaatacccgttgcctagaattgatgatttgtttgatcaacttaaaggagccaccgttttctccaagatcgatcttcgtggttcatgcgttgaagtttggcgtcactacctctttggtactcatacggaggtgtacacggatcacaagagtttgaagtatatctttactcagccggatctgaacatgagacagcggagatggttagaactgattaaggattatgacatgggaattcattatcacccaggaaaggctaatgttgtagcagacgctctcagcaggaaaggctattgcaatgctatggaagtacgacagttgccatgggaattatgcaaggaatttgaaagattgaatatgggaatcgtcagtagaggttttgttgcagcattagaagcgaagcccactctcattgatcaggttagagaagctcaaatcaatgatcctgatattcaagagattaaaaagaatatgagaagaggaaaggctattgggtatttggaagatgagcaaggaaccatatggttgggcgagagaatttgtgtcccagagagcaaggagttgaaagatgcaatcttgaaggaagctcatgacactttatactccattcaccctggtagtaccaagatgtaccaagatctcaaggagaaattttggtgggcaagtatgaagcgtgagatagcagaccgtgcgccgccgccgctctggtcgtcgtcgtcgctcgggaaggccgccgtcgggatcgccaagtcatcaccgtcctcgtctcgtcctccatttccgtcgaagatcaccggagcaccgtcgtcgccgcttcaactcgtcgccgtcgccgtccgttgccgttcgccgtcgtttaaaccctcgattccgacgttcccggagagtccgaatttgcaggagaagactttgaagagttccaaggccagcaaggcaaaaactccggacgtaactggtcgcttgctcgctggtgggggcgcccggaaagagatgggcttgggaagccctgaagatggcttcgcccgcggcgtgtacgtgctcgccttgttcttgacctgttga

SEQ ID NO: 14051 - DNA, 2889 bp, Oryza sativa
  Clone ID: TFbOSC100369j.C1.o14.fg
atggatgccgaagactggctaagggctattgaaaagaaactaaccttggtcagaacaaacgaacaagagaagataacctttgcaacccatcaactagaaggaccagccaatgaatggtgggaagcatatcaagcttctatagaagatcctacacatattattacatggatggaatttactacagcttttagagatgcttttatacctacagctgtgatcaggatgaaaaagaatgaatttcgaagattgaggcaaggttttatgacaggacaagaatatttgaataaatttacacaactagctcgatatactgcctcagacattcaagatgaaaaagaaaagattgaaagatttatagaaggattacatgatgaacttcaaggatcaatgattagtcaagatcatgaaaattttcaaagcctagtcaataaagtggttaggctagaaaatgatcgtagaatggtggaaggactccgtaagagaagaatgaatttacaacgacaatcgccaactagaagttcactacaagttcggaggccttatccatttaaaccatctctacccaatccaaagccaggcatgccaccaatactaccaagacctggattaaaaatggaagactccccatgttatgtttgtgggaatattgggcatttcgcgagactctgccctaatcgtcaaaatatgggtggccaaacttcttatcagaaaccatctactacaggttttataaagaaaaatcctccaattattaagagtggacctaatattagacgtggtcaagtacatcatattaaagcagaagaagctcaacaagaccctaatatattgatggacatctatatgcgtataccaaaagaagaagttccagtagtgcaggaatatttggatatatttcctgaagaactaagttcattacctctagatcgggaaatagaatttattatagagttacttcctggaacgacacctatatcaaaaagatcctataggatgccaattaatgaattggaagaattgaagaaacagatagctgagctacaagaaaaaggttttattcgaccaagttcttcaccttggggagctcctgtattattcgtaaagaagaaagatggaagtttaagaatgtgtgtagactaccgagttctaaatgaagtaactattaaaaacaaatatcctctaccaagaattgacgatctatttgatcaattaaaaggagcaagtatattttctaaaatagatcttcgatcaggatatcatcagttgaaaattagacaagaggacataccaaagactgcttttgtgataaggtatggattatatgagtttacagtaatggcatttggattaaccaacgcccctgcttacttcatgaatcttatgaacaagatatttatggaatatctagatcaatttgtggttgtatttattgatgacattctgatatactccaagaatgaggaagaacataaacaacacctacgattggtattggagaagttaaggcaacatcagttatatgccaaattgagcaaatgtgaattttggctagatcaagttgcatttctaggacatataataactaaggaaggagttgccgtggatccgcaaaagattaaagcagtaatggaatggaaaacaccaacctcagtatctgagataaggagtttcttaggacttgctggatattatcgaagatttattaaagatttttctgctattgcaaaacccatgactagattacttaaaaaggacatgaaatttgaaaggacaccagaatgccagagtagttttcaaagattgaaacataagcttactactacaccagtattaatcttgccaaacatccaaaaagattttgagatctattgtgatgcctctcgacaaggattaggatgtgttcttatgcaagaagatcttaatcttcggcaaagaagatggttagaattaattaaggattataatttggaaattctataccatcctggaaaagctaacgtggttgatgatgctttaagtcgaaaagcttattgcaatttacaacaagaaataatatcagaacaattacaagcggaaatgcttaaactaaatttgggtattattaagtatggagaattaagcactttggagttaaaacctaccttgatggatcaaataaaagaatatcataaagaagattctgaaatacaaacttttaaggaatggaaggtgcatggaaaggctgcagatattaccgaagacttggaaggaatattatggtacggaaataggatcatcgtaccacaatcaggaaacttaaggaagataatactaaaggaagcacatgattcaccctactctttacacccaggtagtacaaaaatgtaccatgatttgaaagacttatactggtggcccaatatgaaacaacatattgcagaatatgttgcactatgtcatgtttgtcaacaagttaaagcagaacaccaaaagcctataggattactacagcctttacaaatacctgagtggaaatgggatgaaataggaatggattttatcactggattacctaaaacttctactggatatgactctatatgggtaatcattgatagacttacaaagactgctcgattcattcctgtaaaaacaacttatactggagcacaacttgcagaactctatatgacaaggatagtatgtttacatggagtgccaaaaacaattatttctgatcgcggtactcaatttacttcacatttttggcaaaaacaacattatgaattaggaagttatttggatttcagtacaacatttcatccacaaaccggaggacaaacgaaaagactgaatcaaacattagaagatataataagagcctgtgctctagattttgctgctagttag

SEQ ID NO: 14052 - DNA, 2358 bp, Oryza sativa
  Clone ID: TFbOSC32874j.C1.o1.fg
atggccggcagcgtcacccgtcgtggtttgcacatgactggcttcgtcttggagctgcgaggcatgtgcgtggtcttagggccgctcccggagcaggagggtgaggatgcagagcctcacgctggttgggaggtcacagcagtgatcctctccggctctcccgagcggacttcgctggcagtcaccgcgggtggggattccttccccgccgcttgccagaacgccgctctcctcgccatcggcacccttcacccgcgctacccggacgagttgcagcactcgccctaccgctaccaccctcgtcgcggaggagcccgcgactacgccaccttccgggatgctagctcggaggatgacgctaccgtcgtgcatctggcacgcatggtggaggcgtacgacgcggctcgtatcgacttccatcagatggtgcgtcgtggcatggtggagaacaacctgaagatcctggagctgcgtcaggagaacctgcagctcaagaaggacctcgacgcgttggaggcgcagctgcatcagctcaagatcgcccagggagaggacagccgtcccaagcgtcgccgcgtctgccgcagccagaagatcaccgcccgcaagagcacctccaggcccgagcttgttcgtcagtccctggcgtggacttgcttcgtcgagacccctcgtgccgagcctgcgcccgtggttccccaggagggggaagcctccggcgttggtagctcggaggttgtgtggggcatggttacaccgatggtgacgaccaggagaaatgttaacaccggtgaaggcaaccaacccgagggcagcaaccacaaccaccaaggcaatccacctccacctccacctccgcctccaccaccaccgccagacaccaacgccattctcacccaaatcctcgcccagcaagccaacatgatgaccgctttcctccaccacctccaaaacccgccacaacagaatgctccaccaccacctccccaacactctaaactcgccgagttcctccgcatccgcccacctaccttctccagctccaacaaccccgtggatgcgttggattggttgcatgccgtggggaagaagttagacacggtgcagtgcagcgatgaggagaaagtcgtcttcgccgcccatcagctgcagggacccgcatctctctggtgggaccacttccaggctacgcagccagagggacagccgattacttgggctcgcttcaccgccgccttccgaagaacccatgtgcccgccggagtcgtggccctcaagaaaagagaattccgagagttgaagcaaggcaaccgctccgtgatggagtatttgcacgagttcaacaacttggcccgttacgctccggaggatgtgcgggaagacgaggagaagcaggagaagttcttggcaggattggaccccgagctgtccgtccgtctagtctctggggactatccggattttcaacgactggtggacaagagcatccgcttggaagccaagcacaaggaactggagtcgcacaagcgccgcttggcgaatttccgcaatcaacagggtgctaaccagagggtccgctacaccaatccctacccagggggatcctcctcgcagcagcagcagcagcagcagcagcagcaacctcgctccgcgcctcgacctcaattcgtggtgcgcatcccacagccgcagcagcagcagggtcagcaagggactcgtgcgccccgtcctcctacgccagctgtgcagcccgttcaaggccgcagggacgctcaaggtcagcagcgtctgtgcttcaactgcttcgagcccgggcactttgcggataaatgcccgcagccaaggcgtcagcaaggccaagcgcctccccgctccaacaacggcgggaaggatgtcattcggggtcgtgtgaatcacgtgacggccgaggacgtgctgacaactccagacgtcatcgttgagaagaaagacaagacgaagaggatgtgcgttgactacagagctctcaatgaagtcaccatcaaaaacaagtaccctcttccccggatcgatgatctgttcgaccagcttaaaggtgccactgtattctccaagattgatcttcgttccggatatcaccaattacgtattcgtgaagaagatattccgaagaccgcattcactacgcgatacgggctatatgaattcacgagtttgtggctctatgtgatgtgtgccagcgtgtcaaggcagaacaccaacgaccggccggacttctccaacctctccaagtgccagaatggaagtgggatgaaattgggatggatttcatcaccggccttccaaaaacccaaggtggatatgattctatatgggtaa

SEQ ID NO: 14053 - DNA, 3969 bp, Oryza sativa
  Clone ID: TFbOSC400697j.C1.o7.fg
atgtcgaacgaggtgaaccatgtagggaaggctcctatgtttaatggcacaaactactccacttggaaaattaaaatgtctactcacctcaaagctatgagcttccatatttggagtattgtggatgtaggctttgctatcaccggcacgccattgacggagatagatcaccgctacctccaactcaatgcccaagctatgaatgctttgttcaactctttgagccaagaggagttcgatagagtgagcaaccttgagaccgcatatgagatttggaacaagttggcggagatccatgaggtcacaagcgagtacaaggatgccaagcttcatttcctcaagattcaatatgagacattctccatgttgcctcatgagagtgtgaatgacatgtatgggaggctcaatgtcattgtgaatgatctcaaggggcttggggtaaactacaccgatcttgaggttgcccaaaagatacttggggctctaccggagaagtatgagacccttgtcaccatgctcattaactccgacatatcaaggatgacacccgcaagcctcttggggaagatcaacaccaatgatatgtacaagttgaagaagaaggagatggaggaagcctcatcaccttccaagaagtgcattgctctccaagccgaagttgaagacaagggcaagggcaaggtgaatgaagccaatgaggacttggaggaagagattgcccttcttgctagaaggttcaatgatctcttgggaaggagaaaggagagaggaagaggctctaactccaataggagaagaaatagtagacccaataagactctctccaactttaggtgctttgagtgtggtgagaagggacactttgcttccaagtgcccttcgaaggatgatgatggagacaagtcatccaagaagaagagtggaggctacaagctcttgaagaagctcaagaaggaagggaagaagattgaggccttcatcggggaatgggactcaaatgaggagagctccgcctcatccgggtccgaggaagaaggtggtgatgatgcaagctccaagaagaagaagatgaccgttgttgccatcaaggaggctccatcactcttcgctccactttgtctcatggcaaagggctcctctaaggtaacatctcttagtgatagtgagagtaataatgattgtgatgatgtttcctatgatgagcttgtgagtatgtttgaggagctccatgcttatagtgagaaggagattgtcaagttcaagactctaaagaaggatcatgcttctttggaggtcttgtataaggagctaaagacctctcatgagagactcaccatttctcatgagaagcttaaggaagctcatgacaacctccttttcactactcaacatggagctcatattgatgttggcatatcttgtgatttgcttgatgatagtactacttgccatattgctcatgttgcatcatctagcatttctacctcttgtgatgatcttgtggatatgcctagctctagctcttgtgtttctatttgtgatacctcacttgttgttgagaacaatgagcttaaggagcaagtggctaagctcaacaagagtttggagagatgcttcaagggaaggctcatgatggtagcattgttgctagatatgtgggttcccctatactcggtggtgaactaccgcaccggtgggagccattgggtgcttgatagtggatgcactcaacacatgaccggtgatagggctatgttcaccacatttgaagtaggagggaaagaacaagagaaagtgacatttggagacaatagcaaaggaaaggtaattgagttagttgcaaaaacttcattgggttggctttggcataggaggctagcccatgttggcatgaatcaattgagcaaactttcaaaacgtgacctagttgtgggtttgaaagatgtgaagtttgagaaagataagctttgtagtgcttgtcaagccgaagccataaacaccgcttgccatgcaaccaataggctttatttgcatcgtctcttgaaaaagactttctatgagctaattgttgggaggaagcctaatgttgcctattttcgaatttttggttgcaagtgttatatttaccgaaagggtgttagactaaccaaatttgaaagtcggtgtgatgaagggtttcttctaggtaatgcctcaaatagcaaggcataccgggtctacaataagaacaaaggtattgtggaagaaaccgccgatgttcaatttgatgaaactaatggctcccaagaggggcacgagaatttggatgatgtaggtgatgaaggcttgatgagagctatgaagaatatgtctatcggagatgtcaagcctattgaagtggaagacaagccatccacctccactcaagatgagccatctacttccgctacgccaagtcaagctcaagttgaggtggaggaggagaaggcacaagatccacctatgcctccaagtatacacaccgctctttccatggatcacccaattgaccaagtgttgggtgacattagtaagggtgttcaaactcgatctcgtgtcgcttcgatttgtgaacattactcgtttgtttcttgtcttgagccaaaacatatagatgaagctctttttgatccggattggatgaatgctatgcatgaagagctcaacagctttgcaagaaacaaggtgtggactttggttgaaagacctagagaccacaatgtcataggtacaaagtgggtctttaggaacaaacaagatgagaatgggttggtggtgagaaataaggcaagattggtggcgcaactcaaggatgggacgttcgtgagccaaaccaagtacatcaaggatctactcaagaggtttggcctggaggatgcgaagcccatcaagacacctatggcaaccaacgggcatctcgaccttgatgagggagtgatgcctccccgcactcgccatagtcgtcgtgcgcccactccggatcccatgagtgagcctgaagaatcgagtggagaggattacgctcaaagtgatgaagaggttgaggcaaatgttgagggggctagtgaggaggcaagtagagatgatgtcagtgatagtggggaggatgaggatgaacaaagtgatgagatgaaaattgatccctccatccagtttgtggtgaacatgaggaatccatcgcagtataccatcttgaggcatcatgatcagttcttgaggcctcgggtcaccccggatccccggtttcacaccgttttccagaagacagtgtatgagcaggtttatgtagggaaagcttttgcagagtataagtggatttcttggagagacatcaatgagactccagagtttaagagcttgcaggatctcttcaagactgttggcattgaccggattgtgaccctcaagcaagactataatgaagatttgatccggcagttctatgctacagtgtgggtggctggagactatagtgatatgaagtggatgtccgacacccttcagtgttctatctctcggaggcagttccggcggctccttaacatacgcttggattttggacatgatttgcatgaggcgcacacccacaatccgctctccatagactatctctctcagttctatgaagatggagcgcggtacacacatgggaaggttgccggcttgaggactatccccagtgtggttaacaggattgtgagagccactatcctccctcgccttggcaacaatgatgacatttggggggtggcttggcacgtcatcgatgcaatcattcagggtcgtcagttcgacattgtgtcttttatgatgcaagagattgccatctccaaggggaccttcactcagggaatctattatgccccttacatcatgaggttgattaaagacaagcttggggctgctgggcaaaatttgaagaagcacaagcagtacaagccccgcctttag

SEQ ID NO: 14054 - DNA, 1920 bp, Oryza sativa
  Clone ID: TFbOSC401826j.C1.o26.fg
atggctcgagccctcctccgaataacccgcagctattgcccgctctccccgtccccacgcctcccgccgccgctccaccaccgcggcgccgcgcctcctctccgcttccgcttcctctccctctcatcttcctcggccccatcctcctctgctgcggcgaccgcgaatagctcggatggtcccggtgagaagggcggcggcggcggcgggtgggatgactacctggggatgagcgacgacgagctgatggggcagtgcgagatgggcacgttcaaggcgtccggccccggcggccagcaccgcaacaagcgcgagtccgccgtccgcctccgccaccgccccactggcatcatcgcccaggctgtggaggatagatcacagcatatgaatcgagcatctgccttgtctcggcttcgaaccttgattgctctcaaaggttttgccatcaccggtagccccttaacggaagctgatcaccacaacctccaactcaatgctcaagccatgaatgcattgttcaactctttgagccaagaggagtttgatagagtgaacaaccttgagaccgcatatgagatatggaacaagttgagtgagattcatgagggcactagtgagtacaaggatgcaaagcttcatttcctcaagatccaatatgaggcgtttgccatgatgttgaatgcgatagtcaatgatctcaaggggcttgaggcaatctactccgacattaaggtggctcaaaagatgctatgggctctatcggacaagtatgagcacttagtcaccttcgtcatcaactccgacatgtcaaggatgacaccagaagagattgctcttcttgctagaatgttcaatgatctattaggaagaaatgagagaggaaagggctctaactccaatagaagaagaaataggagacccaacaagactttctccaactttagatgctttgagtgtggtgagaagggacactttgcttccaagtgtccttcaaaggatgatgatggagacaagtcatccaagaagaagagtggaggctacaagctcatgaacaagcttcagaaggagagaaagaagattaaggcattcattgggcaatgggactcaaatgaagagagctccgcttcatccgggttcgaagcagaagatagtgatgatgatgcaagctccaagaagaagaagatggccgtagttgctatcaaggaagctccatcactcttcgcttcactttacctcatggcaaagggttcttttaagcttgtgagtatgatcatgcgtagtgagaaagagattgtcaagttcaaggctctaaagaaggatcatgcttctttcgaggtcttgtatgaggagctaaagacttcacatgagagactcaccatttctcaggagaagattaaggaagctcatgacaccctcctttccattactcaacatggagctcatattgatgttggcatatcttgtgacttgcttgatgatagtactacctgtcatattactcatgttgcatcatctagcatctctacttcttgtgatgatcttatggatatgcctaactctagctcttgtgattctatttgtgatgcctcacttgttgttgagaacaatgagcttaaggatgcggaacaatacgctcagagtgagaaagaggaagaagaagaggttaagggggctgaggaagaagaaaatgatgatggtaacgatgatggcgaggatgatgagggacctcttgatccttccattcagtttgtgctcaacttgaggaatcccactcaatacaccattcttcgccatcatgatcagttccgggtgcccagagactcagatgatccaagattccacacagtttcagaaggccgtattatagagtgctatgaagtggatgtcagggcctatgcagtgttctatcactcggcgtga

SEQ ID NO: 14055 - DNA, 1392 bp, Oryza sativa
  Clone ID: TFbOSC27819j.C1.o1.fg
atggcaagccgacgtcgggcgtcaaccagcaatgaagaagcttcgacacctgacctaaccaccctggccagagttatggccactgaaacccaacttctacaagccattgcgaataaccaaggcaaccgcggcggatcgagctttggagagtttatgaggaccaagccacccacgttcgctacggtagacgagcctatggaggcagaagattggctacgtatcatagagaataaactgacccttgtccggggacccgctggtgattggtgggatacttacaaggaagctcgggaagaggatgatggagaacccacttgggaagagttcactgcagcatttcgcgagaacttcgtgcctactgcggtaatgcgtatgaagaggaacgagtttagaaggctgcgacaagggaacacaacggtgcaggaatatctgaaccgattcactcagttggcccgctatgcaattggagacctcgcagatgaagaagaaaagatcgacaagttcatagaagggctgaatgatgagttgcgtggacctatgattgggcaagatcaagagagtttccagagcctaatcaacaaggtcgttaggctggagaacgatcaaaggactgtagagcacaaccgcaaaaggaggctttctatgaatcgcctacctcagggagtgcctcagcgactcaaggaagccacttcgtctgggtggaaaacccctattgtggcaaccaaccgccccgctgcacctagcaaattcaacaggtcggttgcgattcagaaccgcacccctacaccaaccctggctgcccctggagccaagaagaatgtggactgcttgaactgcggggagtatgggcactacgccaacaactgccctcatccacacaaaactcctgtccgtactggcgctaatgcaatgattgttcgtggaactactacccctactaccggacgaggtctattcaagactccgcaaactaacaggaccgctaccggatttggacgcggacaagtgaaccatgttcgagctgaagaggcccaggaagatcagggcgtactaatgggtatgttctctgtcaattctaccccggttaaagtcctcttcgattctggtgcatcgcattcattcatatctctgaaggctagtcaaaagcacaacttaaccctagtgggacttagaaagcctatgatagtacactcacctgggggcgagataactggttgtggtgtttccctccaaccttatggttttgataccccagaccctggatgttgtcacgcccagaaattcccgaatagaattccaagcagaatgtgcattaaaatccccgtccaggaccagccggggtacacaaacgacaatgttgacattcagatccacgtcttacaaacatcataa

SEQ ID NO: 14056 - DNA, 1992 bp, Oryza sativa
  Clone ID: TFbOSC420879j.C1.o2.np
atgggcgtacctcgcttagagggatacgtcattgagctacaccggctgatgaggcatctgcgataccccagatttccgatctaccgagtgagacagtgtggatctgtttgggaggctcgggtcgaggttcacacacgagttccttcagagtcagactaccgcttcccgacccgccaccgtcacgacttaccggagaccgcgatgcaggatgcagcccgggaggccttcctccgacttagctctatccaccgagctgagttggtgagtactgagtttgctcaccacctgtttcgagaggagagcaactccgtctgcacagttcaggacacaccttgctgctacaacccgatagtgaccctactgtcacgatgggctgaggcagtagacgacttttacgaggaggctctgttagagatcgacgaccagcagaggcatatgggagagttagagaccgaggtgactgacctcacagtgcagcagcttcagctggaagaggagcaccaggcttggggcagtgagatagactcactaaaggcacagctccagctgggttccagtttggagactccgatccaagtcgactccgagacagaggggaccgacaccgagccagagatcgagccagacatcactaatccttcagaggatgagacccctgttccccgcatcaccttcctcggaggccctcgcaccctcagcactgcccgcaagagcacccgacccccgagcaagaagcccaagccagatccagaggccactacttccgagccgtggggactcaggatcatagagaataaactgacccttgtccgggtacgcgaagccgacaaagtgatcttcgcagtaaattaactggagggacccgctggtgattggtgggatacttacaaggaagctcgggaagaggatgatggagaacccacttgggaagagttcactgcagcatttcgcgagaacttcgtgcctactgcggtaatgcgtatgaagaggaacgagtttagaaggctgcgacaagggaacacaacggtgcaggaatatctgaaccgattcactcagttggcccgctatgcaattggagacctcgcagatgaagaagaaaagatcgacaagttcatagaagggctgaatgatgagttgcgtggacctatgattgggcaagatcaagagagtttccagagcctaatcaacaaggtcgttaggctggagaacgatcaaaggactgtagagcacaaccgcaaaaggaggctttctatgaatcgcctacctcagggagtgcctcagcgactcaaggaagccacttcgtctgggtggaaaacccctattgtggcaaccaaccgccccgctgcacctagcaaattcaacaggtcggttgcgattcagaaccgcacccctacaccaaccctggctgcccctggagccaagaagaatgtggactgcttgaactgcggggagtatgggcactacgccaacaactgccctcatccacacaaaactcctgtccgtactggcgctaatgcaatgattgttcgtggaactactacccctactaccggacgaggtctattcaagactccgcaaactaacaggaccgctaccggatttggacgcggacaagtgaaccatgttcgagctgaagaggcccaggaagatcagggcgtactaatgggtatgttctctgtcaattctaccccggttaaagtcctcttcgattctggtgcatcgcattcattcatatctctgaaggctagtcaaaagcacaacttaaccctagtgggacttagaaagcctatgatagtacactcacctgggggcgagataactgtgagtcatgcttgcatagatgtacctattcgtcttagggttgtggtgtttccctccaaccttatggttttgataccccagaccctggatgttgtcatttatctctccaaactaacccgaagattttccggcatcgattcctctcgtttggagtccgatctctctagtcca

SEQ ID NO: 14057 - DNA, 3156 bp, Oryza sativa
  Clone ID: TFbOSC25185j.C1.o23.fg
atgtcgggccaaacgggggatggcaaagatggtgataagggagctacgtttccttatgactatccatccacatctacctcttatgtgagtacctatagcggcaaagctccatacttcaatggcacggactatgccgcttggaaacataagatgaagatgcatttgaagtctattaatccatctatttggagaatagtcgaaaaaggctatgttttgcagaaacccgaggatcccaccaaggaggatgacgagaacgaacacaagaacgctcaagccgctaatgtaatacttagtgccttgagtggaagtgagttcaaccgcgtggacgacattgagagtgccaaggtgatttgggacacgcttcggaatttgcatgaaggcacggatagtgttcgcgagtccaaggtggagatcctcaaagggcaatttgagaggtttgtgatgttggatggagagagcccaagcgacatgtatgaccatttgagcaagatcgtcaatgagatcaagggacttggctccaaggacatgaccgatgaggttgtggtcaagaagatggttcgagcaatcactctaaggaactctaccttggtaactatcattcgtgagcgtccggactacaagactctcacacctcatgatttgctcgggcgcatccttgcccatgacatgcttgtgcaagagtccaaggaggtcattcaatacatcaaccaaagctcaacgacaagcatcaagaaggaagacttggcattgaaggcaaaggaagaagaagaagagagccgcaagagcaagagcaaggaggagatcgatgatgaagaaatgactctcttcgtcaagaagtttggcaagttcatgaggcgaagcggcttcttcaagggaagttcttccaagcatcactccaacaagttaagtggaagacattccgcaagggtgtgctacgtgtgcaaagagcccggacacttcattgcggattgcccttacctcaaggatggttcccacatcaaggaagataagatgggcgagaagaaggatgagaagaaggagaagcacaagcatagcaagcgggaacgttatggccaagctcaccttgggaagattttcggctccgactccgagtcaagctcaagtgatgaagaaggaattgccacgttcgccgtcaagccttcatcaccaccgaggctcttcaactactcaagtgatgaggatgctcccatttgcctcatggcaaaggagcctaaggtaccttcctccctcaagtcattcaatgttgatcttgttagtgatgaggaggatgatgttgaggatgaggttatggatgaggaattgttcaagtccataaccaaggagtctctaccacacttgagtgagttgcttgggagaattgaggatcaatatgcaacccttgagaggcaagaggcattactcattcgtgagaaagagcggtctcatgaactcaagggtgagcttgctaaggagagagagaaaaatgaggctttggtacggctttacaagcaaaccaaagagtctcacgctaatcttgaggtgacgaatgctcaacttcaagagagagtggatggcttggataaagcttatctctctcttgaagagaagttcgaaaccttaaagaatagtgtctctctccctagcgaggcatcttgttccaaaattgttccaagcaatgaaccatgtgctaggtgtaaggatattgatattgatgcatgtgctactaactctacttccttgagtgccttgcaaaagcaaaatgagaagcttatgggactccttcacaatggcttgcttaagtgccatatgggtagtaaggccctaaaggagtacctaggctatcaaagggaccacttcaaccatgaaggccttgggtatgttcctccaccaaaaggaaaggtggacaagagtgtgttgatcaagaagccccaaggtcttagcaactttgttaaggccaaaagtatccttcccaatggtcatgcatcacattgtttttttgatgcatcttatgttcttaggaagaatgctagtggtcgtgtggttgctaaatatgttggacctaggggcaaaaatgtttccatcaagagagttctttgggtacctaaggcacttgtcactaacatgagaggacccaagcaagaatatcactccggtggaagaagttgggtgattgatagtggatgcacaaatcacatgaccggagaagaatcaatgttttcttcccttgatccaaatggctcttcgcaagagaacatagtcttcggggacgatggaaagggaaaagtaatgggattgggtaagattacaatctccaatgatctttccatctccaacgtcctcttgtctttaagggtgttctcaaggacaagcttttatcttgtggatttttcctcaactaaagccaaacataagacatgcttagtggctaagtccgacatggggtggctttggcatcggaggctagcctatgtcggtatgaggaatcttcacaagcttctaaagcacgatcacatccttggactaacaaatgttcaatttgagaaagataggatgtgtagtgcatgtcaagccgggaaacaaattggagcacatcacccggtcaagaacgtaatgactactacaagaccgttggagcttcttcacatggacctcttcgggccaattgcttatctaagcattggaggtaacaaatatggtcttgttattgttgatgacttttcacgcttcacgtgggtgttcttcttgcatgacaagagtgagacacaagccatcttcaagaagtttgaaagaagagcccaaaacgagttcgacctcaagatcaagaatattcggagcgacaacggcaaggagttcaagaacacttgcatcgagagtttccttgatgaagaaggcatcaagcatgagttctcagctccatactcacctcaacaaaatggagtagccgagaggaagaattggactctcatcgagatggcgaggacaatgttggacgaatacaagacatcggaccgcttttgggccgaagccgtcaacaccgcatgtcacgccatcaactgcctctatcttcaccgccttcttaagaagactgcctatgagcttcttaccggtgaagaggaggaccctagcgaagcaatcaaaaggttggctcttggagac

SEQ ID NO: 14058 - DNA, 4422 bp, Oryza sativa
  Clone ID: TFbOSC29459j.C1.o2.fg
atgaccaggaggagcgctaacaccggtgatggcaaccaacccgaaggcagcaaccaccaccaccagggcagcccacctccacctccacctcctcctccaccaccaccaccagataccaacgccattctcacccaaatcctcgcccagcaagccaacatgatgactgctttcctccaccacctccaaaatccgccacaacagaatgctccaccaccacctccccaacactctaaactcgccgagttcctccgcatccgcccacctaccttctctagctccaacaaccccgtggatgcgttggattggttgcatgccgtggggaaaaagctagacactgtgcagtgcagcgatgaggagaaagtcatcttcgccgctcaccagctgcagggacccgcatctctatggtgggaccatttccaggctacgcagccagagggacagcctattacttgggctcgcttcaccgccgctttccgaagaacccatgtgcccgccggagtcgtggcccttaagaaaagagaattccgagagttgaagcaaggcaaccgctccgtgatggagtatttgcatgagttcaacaacctggcccgttacgctccggaggatgtgcgggaagatgaggagaagcaagagaagttcctggcaggaatggaccctgagctgtccgtccgtctagtctctggggattatccggatttccaacgtctggtggacaagagcatccgcttggaagccaagcacaaggaactggagtcgcacaagcgccgcttggcgaatttccgcaatcaacagggtgctaaccaaagggtccgttacaccaatccctatccagggggatcctcctcgcagcagcaacaacagcagcagcaacctcgctccgcgcctcgacctcaattcgtggtgcgcgtcccacagccgccgcaacagcagagtcaacaagggactcgtgcgccccgtcctcctacgccaactgtgcagcctggtcaaggccgcagggacgctcaaggtccgcagcgtctgtgcttcaactgcttcgagcccgggcacattgcggataaatgcccgaagccaaggcgtcagcaaggccaagcgcctccccgccccaacaacggtggtaaggacgtcattcggggtcgtgtgaaccatgtgacggccgaggacatgctgacaactccagacgtcatcgttggtacgttcctcattcattccatccctgctaccattttgttcgactctggagcttcccactcgtttatatctgtgccattcgtggggagaaatcagttgggggtagaaagacttagaaaccctctgctcatcaccacccctggaggggttatgacagcaaagtactatagccctgccgttcctatagaaattcaggggattccttttccctcggatctgattctgctagacaccaagaacttggatgtgatccttgggatgaattggttggctcaattccaaggagtagtggattgcgcaagacgcactgtcactctgtaccgagggccggaacaaccggttgttttctttgcacccccaacctctgtcaaaagttcagaacttcatcagataggactgtcagaaatccccatcgtcagggagttcggagacgtgtttccggaagaactacctggtatgccgcccaagcgagagattgagttccggatagatcttgctccaggaactactcctctgtacaagcgaccctaccgtatggtagcaaatgaactggccgaagtcaaaaaacagctggaagagttgaaagaaaaggggtatatacgtccgagtacttccccctggggtgctcctgtgatttttgtggagaagaaagacaagacgaagaggatgtgcgttgactacagagctctcaatgaagtcaccatcaaaaacaagtaccctcttccccggatcgatgatctgttcgatcagcttaaaggtgccactgtattctccaagattgatcttcgttccggatatcaccaattacgtattcgtgaagaagatatcccgaagaccgcatgcaccacgcgatacggactgtatgaattcacggtgatgtcgttcggtttaaccaatgcacctgccttcttcatgaacttaatgaacaaagtgttcatggaatacttggataagtttgtggtggttttcattgatgacattctgatatactcacaatcagaggaagaccatcagcaccatctccgtctggtgttgggaaagttgcgggaacatcaattgtatgccaaacttagcaagtgtgagttctggttgtccgaagtcaaattcttagggcacgtgatatctgctaaaggagttgctgtggaccccgaaacagtgaccgccatcactgattggaagcaacccaagacagtcactcaagtccgcagtttcttaggtttggcaggatactaccgaaggttcatcgagaacttctccaaaatcgctcgacccatgacacagttgttgaagaaagaagagaaatttgtgtggagcccgcaatgcgagaaggcgtttcaaactctcaaagaaaagctggtttcctcgccggtgttaatcttgccggatactcacaaggacttcatggtgtattgtgacgcttcgcgccaaggattggggtgcgtgctcatgcaggatggtcatgtggtggcctatgcctcacgccagctacggcctcatgaaggcaactaccctactcatgatttggagttagccgcggtgtcggacctgaatcttcggcaaaggagatggttagaactcatcaaagattatgatgtgggaattcactatcatcctggtaaggccaacgtggttgccgacgctctaagtcgaaaaagccattgcaacactcttaacatccgtggcattccacccgaacttagtcaacagatggaagccctgaacctaagcatagttagtcgcggattcttggctgcgttggaagccaagcctaccttgctcgatcaaatccgcgaggctcagaagaacgatccggacatgcatgggctcctcaagaatatgaaacagggtaaagccgttggtttcacagaggatgaacacggaaccctatggaacggaaatcgagtatgcgttccagataacggagaacttaaacagctgatacttcaggaagcccacgaaagtccttattccatccaccctggcagtacgaagatgtacctagacttgaaggagaaatactggtgggttagtatgaagcgggaaattgcagagttcgtggccctttgtgatgtgtgccagcgtgtcaaggcagagcaccaacgaccggccggacttctccaacctctccaagtaccagaatggaaatgggatgaaattgggatggatttcatcaccggacttccaaaaacccaaggtggatatgattctatatgggtagtcgtggatcgattaaccaaggtagcccgatttattcctgtgaagaccacctatggagggaacaaactagccgaactctacttcgctaggatcgtaagtctccatggcgttcccaagaaaatcgtatctgataggggaagccaattcacctctcacttttggaagaagctccaagaagagctgggtacccgattaaacttcagcaccgcgtatcacccgcagacagatgggcagaccgagcgtctaaatcagatcctagaagatatgcttcgcgcatgtgtcctagatttcgggaagacctgggataagagtctcccctatgccgagttctcctacaataacagctatcaagccagcatacaaatggcaccttatgaagcgttgtatgggcgcaaatgtcggacaccgctattgtgggaccaagttggggaaagccaagtgttcgggactgatatcctgagagaagctgaagcgaaagtcagaaccattcgggataatctaaaggtagcacagtcccggcagaaaagttatgcagataaccgatgccgtgacctggaattcgccgtggatgattttgtgtaccttcgggtcacgccattgcgaggtgtacacaggtttcagacaaaagggaagctcgcacctcggtatgtgggtcctttccgtatcgttgctcggcgcggagaagtcgcttaccagttggagctgcccgcctccttgggcaacgtgcatgatgtgttccatgtgtcgcaactcaagaaatgtctccgagtgccatccgagcaagccgactcagagcaaattgaagttcgcgaagatttgacctatgtggagaggccagtgaaaatcctggacaccatggagcgcaggaccaggaaccgggtaatccgtttttgcaaagtccaatggaacaaccacgccgaagaagaagctacttgggagcgtgaagacgagctgaaggcagcccatcccgatctcttcgccagttcttccgaatctcggggtcgagattccgtttaa

SEQ ID NO: 14059 - DNA, 3771 bp, Oryza sativa
  Clone ID: TFbOSC400261j.C1.o12.gm
atggccggcttttctttgatcagttgcgctgtgggtatcatcttcttctccgtttgctacctgcctgcggctcctgccgccgccttgtccttcaactactccaccttcagctcggacaaccaggaggacttcacattcgaaggcaacgcctccatccacgacgggtgtattgatttcgttgcgaacgggacctggggcaggggctacaggccctacagcaccggacgggtgtcctacaaattgccggtgcggctctgggacgctgccaccggcgaggtggccagcttcaccacaaccttctccttcaacatcacgccgatgaatattagcgacaagggcgatggcatggccttctttctcgtcagctatccatcaaggatgccgctgaccgccgacggcgacactctcggcctcgtgagcaacaaacccgaaaacgctccggccggcggcgaccaattcgtcgccgtcgagtttgacacctacccaaaccccggcttggaccctaacgctaccggtgaccacatcggcatcgacatcaactcagtccgatcgttgacgaccgaacccttgaccaactccagcctcatcggtaacatgaccgccatcgtccactacgatagcagttcgagcatcctgtcggtgaagctgtggataaatgacacgacgaagccgccttacaaccttagctacgaaattgttgatctcaagaaaaaattgccggagaacgtcaccatcggcttctcggcggcaacgggcgcatcagatgagctacaccagctgacttcttggtacttcaactcgagctcgtcgttcgagcataagcatggacgtgccggggttgtagcgggagccaccgtcggcgcgacgttgttcgttgtgctgctcttcactgctgcagctatcctcatacggcgacgtcggatcaaaaacaggaaggaggcagaggatgagcaggacataagctcggacagcgaagacaatgacggcgagcccatcgtggagattgagatggggactgcgccaaggcgattgccatactatgagctcgtcgaggcgaccaagaacttcgcggtggaggagaagctcgggcaaggcggcttcggttcggtgtaccgaggctacctaagagagcagggcctcgccgtcgccattaaacgcttcgccaaagattcctccaagcaagggaggaaggagtataagtcggagatcaaggtgataagccggctgcgccaccgcaatctcgtgcagctcgtcggctggtgccatggacgcaacgagctcctccttgtctatgagctcgtccccaaccgcagtcttgacgtccatctccatggcaatggcaccttccttacttggccaatgaggatcaagattgttctcgggctcggatcagcactactctacctccaccaagagtgggaacaatgtgtcgtgcaccgtgacatcaaaccaagcaacgtcatgttggatgaatccttcagtgccaagctaggtgacttcgggctcgcgaggctcatcgaccacaccatcggtataaagacaatgaccgccatgtcaggaacaccgggctaccttgaccctgaatgtgtgatcaccggtagagcgagtgccgagtcctacgtttacagtttcggcattgtcctactggaggtggcatgcgggaggagaccgatgagcctactagacagccagaataacggcgtcttccgactggttgagtgggcctgggatttgtatggcaagggagatgttctcatggccgccgacaagcgtctcgacggcgactacgattctgcggagatggagcgtgtcatcgctctcgggctctggtgcgtgcaccctgacccaagtgtgcgaccgtctatcagagacgccatggccatactccagtcgagtggaggccaactgccagtgctatcggccaagatgcccgtgccaatgtacgcgccgccgatggcctcgtttgacgggctagctgtttgcgtcatctacagggatgtcgtcgtcctcaggtgtgacgcagtcgtcgtccacatcgacgacgagcggccatgctattcacacctcgtgttcctcgactactccatcccgatcgtcagcgtgcaccggcaatcgggagagcaggtctccggaacctctgccttcgacgtcctgcaccgggagaaggcggcaataaggcgctgtgattttactatggctggttttgccgatgcactgaggccggataaattcaccggtgtgcactttaagagatggcagatcagggtcgctttgtggctgacagctatgaaatgcttctgggtgagtactggtaaacctgaaggaattcttgctgctgatcagcataagcaattcgagaaagccactactctctttgtgggatgcattcttagcgttcttggcaatcgtctggtcgaggtgtatatgcacatgaccaacgctaaggagttgtgggatgcactgaatactaaattcggtgctactgatgctagcaatgatctgtacatcatggagcagtttcatgactacaggatggctgacaaccgttctgtagtcgaacaggctcatgaggaatactccgttgaggggttgatagtgtctcttgatgttgaggagaaagctcgggaaaaggacgccgcgtctaagggcgacggtgggcagtccagtgccaatgttgtgcacaaggcccagaacaagagcaaggggaaatacaaagctcagcagaccaccaacttcaagaagcagaagaagaacaacaacaatcctaatcaggatgagaggacttgctttgtgtgtagccaacctagtcatctggctaggaagtgtccacagcgcaaggggatgaaggcacctgcagggcagacttctaagtctgctaatgtgaccattggcaacactggagatggaagcgggtatggtcgcacggggttccaccgtcctaatggggaatgggtcacatgcttctgttcatggtgttggcacggtagatctgaagtttacttcgggaaagatcgtgcagctgaagaacactactggaaggaggctgtccgtagtgaaatggattccattatcgctaatggaacttgggaggtgacagagcgaccctatgggtgtaaacctgtggggtgcaagtgggtgttcaaaaagaagctgaggcctgatgcctcacatggtcttctcgttcatcaaatggacgttaagacaacttttcttaatggagagctggatgaggagatctatatggatcaacctgataggtttgtagttgaaggtcaagaagacaaggcttcgcagtcaatgaggcagataaatgtgtatactatcgccatggtgggggtgaaggagttattctgtgcttccatcgccgtcgctcgggaagaccgccgtcgtggtcgccaagtcgtcgccgtcctcgtccgccccttcgctgtcgccggagatcgccggagcttcatcgccgccgtcgacccgaaggtttcctccgtttcctcctcgtcgccgtcgccgtccgttgatcttccgccgccgttttggtcaccggtgagttcgccgtgtcgtcctctacgtgctggtggcctccgtttgcgtcctagtgccgccgttcgccggcgagcgtgcgccgcccgagctgtccgctccgccgagcccccgccgctgtcggtgacgtcattgccgacgtcatcggggtcgtccgccgtgagccggtcgtggaccgttcgatctcggccgtccgttttggattggatcgatctcggccgtccgtccgcgtga

SEQ ID NO: 14060 - DNA, 5724 bp, Oryza sativa
  Clone ID: TFbOSC400690j.C1.o5.fg
atgtcgggccaaacgggggatggcaaagatggtgataagggagctacgtttccttatgactatccatccacatctacctcttatgtgagtacctatagcggcaaagctccatacttcaatggcacggactatgccgcttggaaacataagatgaagatgcatttgaagtctattaatccatctatttggagaatagtcgaaaaaggctatgttttgcagaaacccgaggatcccaccaaggaggatgacgagaacgaacacaagaacgctcaagccgctaatgtaatacttagtgccttgagtggaagtgagttcaaccgcgtggacgacattgagagtgccaaggtgatttgggacacgcttcggaatttgcatgaaggcacggatagtgttcgcgagtccaaggtggagatcctcaaagggcaatttgagaggtttgtgatgttggatggagagagcccaagcgacatgtatgaccatttgagcaagatcgtcaatgagatcaagggacttggctccaaggacatgaccgatgaggttgtggtcaagaagatggttcgagcaatcactctaaggaactctaccttggtaactatcattcgtgagcgtccggactacaagactctcacacctcatgatttgctcgggcgcatccttgcccatgacatgcttgtgcaagagtccaaggaggtcattcaatacatcaaccaaagctcaacgacaagcatcaagaaggaagacttggcattgaaggcaaaggaagaagaagaagagagccgcaagagcaagagcaaggaggagatcgatgatgaagaaatgactctcttcgtcaagaagtttggcaagttcatgaggcgaagcggcttcttcaagggaagttcttccaagcatcactccaacaagttaagtggaagacattccgcaagggtgtgctacgtgtgcaaagagcccggacacttcattgcggattgcccttacctcaaggatggttcccacatcaaggaagataagatgggcgagaagaaggatgagaagaaggagaagcacaagcatagcaagcgggaacgttatggccaagctcaccttgggaagattttcggctccgactccgagtcaagctcaagtgatgaagaaggaattgccacgttcgccgtcaagccttcatcaccaccgaggctcttcaactactcaagtgatgaggatgctcccatttgcctcatggcaaaggagcctaaggtaccttcctccctcaagtcattcaatgttgatcttgttagtgatgaggaggatgatgttgaggatgaggttatggatgaggaattgttcaagtccataaccaaggagtctctaccacacttgagtgagttgcttgggagaattgaggatcaatatgcaacccttgagaggcaagaggcattactcattcgtgagaaagagcggtctcatgaactcaagggtgagcttgctaaggagagagagaaaaatgaggctttggtacggctttacaagcaaaccaaagagtctcacgctaatcttgaggtgacgaatgctcaacttcaagagagagtggatggcttggataaagcttatctctctcttgaagagaagttcgaaaccttaaagaatagtgtctctctccctagcgaggcatcttgttccaaaattgttccaagcaatgaaccatgtgctaggtgtaaggatattgatattgatgcatgtgctactaactctacttccttgagtgccttgcaaaagcaaaatgagaagcttatgggactccttcacaatggcttgcttaagtgccatatgggtagtaaggccctaaaggagtacctaggctatcaaagggaccacttcaaccatgaaggccttgggtatgttcctccaccaaaaggaaaggtggacaagagtgtgttgatcaagaagccccaaggtcttagcaactttgttaaggccaaaagtatccttcccaatggtcatgcatcacattgtttttttgatgcatcttatgttcttaggaagaatgctagtggtcgtgtggttgctaaatatgttggacctaggggcaaaaatgtttccatcaagagagttctttgggtacctaaggcacttgtcactaacatgagaggacccaagcaagaatatcactccggtggaagaagttgggtgattgatagtggatgcacaaatcacatgaccggagaagaatcaatgttttcttcccttgatccaaatggctcttcgcaagagaacatagtcttcggggacgatggaaagggaaaagtaatgggattgggtaagattacaatctccaatgatctttccatctccaacgtcctcttgtctttaagggtgttctcaaggacaagcttttatcttgtggatttttcctcaactaaagccaaacataagacatgcttagtggctaagtccgacatggggtggctttggcatcggaggctagcctatgtcggtatgaggaatcttcacaagcttctaaagcacgatcacatccttggactaacaaatgttcaatttgagaaagataggatgtgtagtgcatgtcaagccgggaaacaaattggagcacatcacccggtcaagaacgtaatgactactacaagaccgttggagcttcttcacatggacctcttcgggccaattgcttatctaagcattggaggtaacaaatatggtcttgttattgttgatgacttttcacgcttcacgtgggtgttcttcttgcatgacaagagtgagacacaagccatcttcaagaagtttgaaagaagagcccaaaacgagttcgacctcaagatcaagaatattcggagcgacaacggcaaggagttcaagaacacttgcatcgagagtttccttgatgaagaaggcatcaagcatgagttctcagctccatactcacctcaacaaaatggagtagccgagaggaagaattggactctcatcgagatggcgaggacaatgttggacgaatacaagacatcggaccgcttttgggccgaagccgtcaacaccgcatgtcacgccatcaactgcctctatcttcaccgccttcttaagaagactgcctatgagcttcttaccggtgaagaggaggaccctagcgaagcaatcaaaaggttggctcttggagacgtacgtcctagggagccacaacaaggggcctcttcctcaacacaagtggagccacgtatatcgacccaagccgacaatccctctacttcaagcttggatcaaggtgaagaaggcgagcaagtgccacccgctccgataaatctagctcacccaagaatccaccaaagtatccaacgagatcaccctaccaacagcatcttaggagacatcaacaagggagtatccactcgttctcgtattgtaaatttttgtgagcattactcgtttgtgtcttctcttgaacctctaagggtaaaagaagctcttaatgatccggattgggtgatggcgatgcaagaggagttgaacaatttcacctggaatgaagtgtggactttggtggagcgatctcgtcaaaatgtgattggcacaaagtggatctttcgcaacaagcaagacgaggccggggtcgtgataaggaacaaggcgaggatgtattttagagtcgttttgggacgtgacaagatcgggaaagctgattcaactctttttactaagaggcataataatgatatttttgtgtgccaaatatatgtcgatgacattgtatttggttctactaacaagtcttttagtgaagagtttagtaggatgatgaccaagcgttttgagatgtccatgatgggtgaattgaagttcttcctcggccttcaaatcaagcaactcaaggaaagaactttcatttgccaaacaaagtatttgaaggacatgctcaagaagtttggaatggagaatgcaaagccaatccacactcccatgccatcaaatggccacctcgacctcaacgagcaaggtaaagacgtcgaccaaaagggagcgaggtttgatctcattggctatgccgatgcggattatgccgggtgcaaagtggataggaaaagcacatcgggtacttgccaattcttgggtaggtcccttgttttttggtcttccaagaagcaaaactccgtcgctctatccaccgccgaagcggaatacgtttcggcggggagttgtgctcaacttctttggatgaagcaaaccttgagagactatggcctcaatgtgtccaaaatcccactcctatgtgacaatgagagcgccattaagatagccaataatctcgtccaacattcccgaaccaagcatatagatattcgccaccatttcttgagagaccattccacaagtggcgacatagacatccaacattgtatcctcatgatcaagggtcagttcaagaatcaagtttactctcgccgtggatcaatgagttctcgaggtcgctctccctcttccaaggctcgtcatgctatacggcgtatgtccgaatcccgcaaagatgccattgacgcgcaagctcaagcctctgaacaagcagctcaagtggctaatgtggagcgaggtgctccccttactcctcgccgcagccgagtcaatggagaaggatcaagtgcacctgctagcaaagtgaggagaggcaatcctacgggttcttctgagcagggtcaagtatatgaggagttgcatgatccaattattgatgaagtcattgaagcttgtgcttggcaaaacttgaaggaactcatgggcttgcaatacccatggtgcaaagagatcatcgcacaattctatgccaccgtttactttgagccaatcaaagaaaagactattcattggatgacagatggcatcatatactcagtgacatatgccaagtttgctgccattttggggtttccggctcgctctcgcaccaatcatgtcaagattcatgatgagaagcccatggacacaaattctcttcacttcttgtaccaagatgtggactatgagttaggaaccatcaaaggtcttcgtcccttctatgcctatctcaacaagcttttgcacaaaactctctatcccaaggaaggtgatgctagcaacgtccttgcctatacaagaaatttgctttacaagatgaaggctcacccacagctctttgacgcctttgacttcatctttgaagaaatccggcttatctccatgatgccgaaacgaggacttggctatgggccctacataatgaagatgattgagattgtgtcaaagaggaagtttcacaaggaagtggctcacaccggttaccaagtccgtcccatcaaggctgctgctgtgccggctggacgaaccactcgtgcttcttctcatgccggtccctccactactgtcaccacgtcggactccaactcttccttgaggttcttcaagtctatcttcaacttatgcaagaccatctcagtttggcaagccaaggaacgcagagcaaggaagaaggacactcggcggatcaagaacctccttcacaacgccaatttgccatgttctcccgatggttctgaggttgaggacagtggggaggatgtgattgaggacccttttgcagctgaggcaagctcctctcgtgcggatcgtggcaaggctcctttggaggaagaagaggaggaggaaggtgactatgctgaggagtcaagtgaggaggatgaggattctgatgaagatgagtga

SEQ ID NO: 14061 - DNA, 3672 bp, Oryza sativa
  Clone ID: TFbOSC401006j.C1.o6.fg
atggcatttaaagcagctcatgatagagaaaactggaatgggggcaggatttgcaagttggagagcaaggtgtaccatctgcagaaggaactggccgagcttaagggagaagcaccaccgccagcacccaagcttcgtctcaccatggtgaacacccgcactggaagtggaagtggaagtggaagtggtcacaatgaaggagatcccacacttgctcaagttttggctcagcaaacccagttgattaatttactagtacatcaagcgcagaaccagcaagcaaataacaacaatcaaccaccacctccacagaacaagttggcagattttcaacgtgtgagaccacctaccttctcaagcaccactaacccacctccacagaacaagttggcagattttcaacgtgtgagaccacctaccttctcaagcaccactaacccagtagaggcaggtgattggctgcatgctattgaaaagaagttagatttgattcagtgcaccgagcaggagaaggtttcctttgcttcgcatcagttgcatggtcctgctgctgagtggtgggatcactttcgtcaaaacagagctgtgggagagcctatcacttggcgggagtttactgctgctttcaagaagacacatataccatcaggtgttgtggcacttaagaagagagagttcagagcactcaatcagggatcctgttctgtcatagagtacctccatgactttaatcgcttagctcgttatgccccagaagatgttcgcactgacgaagaacgtcaggagaagtttttagagggactgaatgatgagttgtcttatgcattgatggctatggagtaccgggatttccagcagttggtggacaaggcgattcgtcaagaagacaagtacaataggatggaacagaagaagcgtagggctgctcatttcaaggctcaacaggctccaactcagaatcagcctgtcaggaaggaacagggaagcaagccaggggtgtgcttcaattgtggtcatccaggacattatgctgataagtgtccaaaggctcgacgtgtgaagaatgctcctgtccagaacaactccaatgctacagcactgaaggctcgtgttaatcacgttgcagctgcagaagcccagaattcacctgatgtggttttgggtacatttcctgttagctctgtacccgcaactgtgctttttgattccgttgctttgcaagagatcccaatagtacaagactacccagatgtgttccctgaggatttgccaggtgctacagtcttctccaagataaatctttgttccggatatcaccaactccgaatccgtgaggaggatataccaaagaccgcctttacaacacggtatggtttgttcgaatgtattgttatgtcgtttggactcactaatgccccggcctttttcatgaacttgatgaacaaagtgtttatggaatatctggagaagtttgtcgtggtgtttattgatgacatccttatctactccaagactaaagaagagcatgaagagcatcttcgtcttgctttagagaaactacgtgagcatcagctctatgccaagtttagtaaatgtgaattttggttgcccgaagtgaagttccttggtcatgtcatctcagctggaggagttgccgtggatccaagcaatgtggagtcagtgctaaattggaagcagcccaagacggtttcagagattctccttggtcttgcggggtattaccgaaggtttattgagaacttctcaaagattgctagaccagtgactcgactgcttcagaaggatgtgaagtataagtggacggaagagtgtgagcagagttttcaagaattgaagaaaaggctagtgactgcgctagtgttagtcttgcctgatccaaggaaaggtttccaggtgtattgtgatgcatctagacttggtttgggttgtgttttgatgcaagatgggaaggtggtggcctatgcatctaggcagttacgctctcatgagaataactatccaacgcatgacctagagttggcaactgtggttcatgcatcgaagatttggcgtcattacctttttggtaaccgtacggagatctatacggatcataaaagtttgaagtacattttcactcaacctgatctaaacatgcgtcaacatagatggctagagttgatcaaggactatgatatggaaattcattatcatccagaagctaaacctactctgtttgatcaagttagagaggctcaagtgaatgatcccgatatccaagaaatcaaaaagaacatgagaagaggaaaagccatcggttatatagaagatgagcaaggaattgtgtggctaggagaaagaatttgcttgcccgataataaggagttgaatgatactatcatgaaagaagctcatgaaactttgtattccattcatcctgggagcactaagatgtatcaagacctgaagcaacaattctggtgggccagcatgcgacgagagatagcggaatatgtggctttatgtgatgtgtgtcagcgagtcaaggcggagcatcggaagccagccggtctgctgcaaccgttgaagattccaaagtggaaatgggaggaaataggaatggattttatcaccggtctacccagaacatcggcaggacatgattctatttgggtagtggttgacaggcttactaaagtcgctcatttcatacctgtcaaaacaacttacacgggaaataagcttgcagagttatatatggcaagagttgtatgtttacatggtgctcccaagaaaatagtatcagacagaggtagtcagtttacttcgaagttttggcagaaactacaagaagagatgggtactcgtttgaattttagtactgcttatcaccctcaaactgatggtcagacagaaagagtaaatcaaattttagaagacatgttgagagcctgtgttctagatttcggtggaagttgggataagaatctgccgtacgctgaattctcttataacaacagttatcaagctagtcttcaaatggctccatatgaagcattgtatggtcggaagtgtcgtacaccgctcctttgggatcaaatcggtgagcgtcaagtttttgggacagatatattgcgagaggcagaagaaaaagtgaagattatccaagaaaggttgcgtattgcccagtcgcgtcagaagagctatgcagacaattgtcgtagggatttgactttcgaagaaggggattatgtatacctatgggttacaccgctgcggggagttcatcgttttcagaccaaagggaaattggcaccgcgatttgtgggaccttttaagagagagttgaagaaatgtttgcgtgtacctacggaggaagcagatcctaagcatatagagcttcaagaagatttaacttatgttgagaagccaatcagaattctgcagtttccgatgttccggaggagagcgtttacgtttagaaaggttcaaaagcgtttgaagaaggtcaaggtgggttgtgagcacatggttttgatggtcgtgctcatgacaattaaggaccggttcgcgagctactattgtgaaacatttaccatgccaaccacaagtcagtgtgggcaacggctttaccttttgtatagcatggttcattacggggtgccagactga

SEQ ID NO: 14062 - DNA, 4608 bp, Oryza sativa
  Clone ID: TFbOSC900295j.C1.o18.fg
atggccggcttttctttgatcagttgcgctgtgggtatcatcttcttctccgtttgctacctgcctgcggctcctgccgccgccttgtccttcaactactccaccttcagctcggacaaccaggaggacttcacattcgaaggcaacgcctccatccacgacgggtgtattgatttcgttgcgaacgggacctggggcaggggctacaggccctacagcaccggacgggtgtcctacaaattgccggtgcggctctgggacgctgccaccggcgaggtggccagcttcaccacaaccttctccttcaacatcacgccgatgaatattagcgacaagggcgatggcatggccttctttctcgtcagctatccatcaaggatgccgctgaccgccgacggcgacactctcggcctcgtgagcaacaaacccgaaaacgctccggccggcggcgaccaattcgtcgccgtcgagtttgacacctacccaaaccccggcttggaccctaacgctaccggtgaccacatcggcatcgacatcaactcagtccgatcgttgacgaccgaacccttgaccaactccagcctcatcggtaacatgaccgccatcgtccactacgatagcagttcgagcatcctgtcggtgaagctgtggataaatgacacgacgaagccgccttacaaccttagctacgaaattgttgatctcaagaaaaaattgccggagaacgtcaccatcggcttctcggcggcaacgggcgcatcagatgagctacaccagctgacttcttggtacttcaactcgagctcgtcgttcgagcataagcatggacgtgccggggttgtagcgggagccaccgtcggcgcgacgttgttcgttgtgctgctcttcactgctgcagctatcctcatacggcgacgtcggatcaaaaacaggaaggaggcagaggatgagcaggacataagctcggacagcgaagacaatgacggcgagcccatcgtggagattgagatggggactgcgccaaggcgattgccatactatgagctcgtcgaggcgaccaagaacttcgcggtggaggagaagctcgggcaaggcggcttcggttcggtgtaccgaggctacctaagagagcagggcctcgccgtcgccattaaacgcttcgccaaagattcctccaagcaagggaggaaggagtataagtcggagatcaaggtgataagccggctgcgccaccgcaatctcgtgcagctcgtcggctggtgccatggacgcaacgagctcctccttgtctatgagctcgtccccaaccgcagtcttgacgtccatctccatggcaatggcaccttccttacttggccaatgaggatcaagattgttctcgggctcggatcagcactactctacctccaccaagagtgggaacaatgtgtcgtgcaccgtgacatcaaaccaagcaacgtcatgttggatgaatccttcagtgccaagctaggtgacttcgggctcgcgaggctcatcgaccacaccatcggtataaagacaatgaccgccatgtcaggaacaccgggctaccttgaccctgaatgtgtgatcaccggtagagcgagtgccgagtcctacgtttacagtttcggcattgtcctactggaggtggcatgcgggaggagaccgatgagcctactagacagccagaataacggcgtcttccgactggttgagtgggcctgggatttgtatggcaagggagatgttctcatggccgccgacaagcgtctcgacggcgactacgattctgcggagatggagcgtgtcatcgctctcgggctctggtgcgtgcaccctgacccaagtgtgcgaccgtctatcagagacgccatggccatactccagtcgagtggaggccaactgccagtgctatcggccaagatgcccgtgccaatgtacgcgccgccgatggcctcgtttgacgggctagctgtttgcgtcatctacagggatgtcgtcgtcctcagatctaatgatgtgttactgctagtatacatctgcaatgttatgatttatttatggaatatattaaatcattatatgcctatattctcaacaatccaaaaaccttattataggcgctgtgattttactatggctggttttgccgatgcactgaggccggataaattcaccggtgtgcactttaagagatggcagatcagggtcgctttgtggctgacagctatgaaatgcttctgggtgagtactggtaaacctgaaggaattcttgctgctgatcagcataagcaattcgagaaagccactactctctttgtgggatgcattcttagcgttcttggcaatcgtctggtcgaggtgtatatgcacatgaccaacgctaaggagttgtgggatgcactgaatactaaattcggtgctactgatgctagcaatgatctgtacatcatggagcagtttcatgactacaggatggctgacaaccgttctgtagtcgaacaggctcatgaggtacaaaccatggctaaggaactcgaactccttaagtgtgtcttacccgacaaatttgtggccgggtgcattattgcgaaactacctctatcttggagaagtttcggtactgcactcaaatacaagagacaggaatactccgttgaggggttgatagtgtctcttgatgttgaggagaaagctcgggaaaaggacgccgcgtctaagggcgacggtgggcagtccagtgccaatgttgtgcacaaggcccagaacaagagcaaggggaaatacaaagctcagcagaccaccaacttcaagaagcagaagaagaacaacaacaatcctaatcaggatgagaggacttgctttgtgtgtagccaacctagtcatctggctaggaagtgtccacagcgcaaggggatgaaggcacctgcagggcagacttctaagtctgctaatgtgaccattggcaacactggagatggaagcggatttttctatgtgtacttgttgaaaacgaaagacgaggctctagactattttaaaacttataaggcagaagttgaaaatcaacttgacagaaagataaaaagacttaggtctgatcgtggtggagagtttttctcaaacgagtttgacttattctgtgaggaacatggcattatacatgagaggacgcctccctattctcccgagtctaatgggattgccgaaaggaataaccgcacactgactgacttggtgaatgccatgttggacaccgcgggactacctaaggcatggtggggggaggcattgttgacctcgaatcatgtgttaaacagagttcctaacagaaataaggacaaaacaccatatgagatatggattgggagaaaaccatcactttcttacttgcgcacatgggggtgcttggcgaaagtcaatgtactaataacgaagaagcgcaaacttggacctaagactgtggactgtgtctttctgggatatgctcatcacaacattgcctatagatttttaatagttaaatctgaggtaccagacatgcatgttggtacaattatggagtctcgtgatgctaccttctttgagagttttttcccaatgaaggatacacatagtagttctagccaaccctgtgaaataattcccagttcaatcacaccaccagaacaaactgaacatacacatgaacatgtcactgaggaggatgacagtgaagctcctcgaaggagcaaaagacaaaggacggctaagtcttttggtgatgatttcactgtgtacctcgtggatgacactcctaagtcaatttcagaagtatatgcatctcctgatgcagactactggaaggaggctgtccgtagtgaaatggattccattatcgctaatggaacttgggaggtgacagagcgaccctatgggtgtaaacctgtggggtgcaagtgggtgttcaaaaagaagctgaggcctgatgcctcacatggtcttctcgttcatcaaatggacgttaagacaacttttcttaatggagagctggatgaggagatctatatggatcaacctgataggtttgtagttgaaggtcaagaagacaaggtgtgcaaattgttgaagtctttgtatggtctgaaacaagctcctaagcaatgccatgagaaatttgatagaacattgacatctgtaggcttcgcagtcaatgaggcagataaatgtgtatactatcgccatggtgggggtgaaggagttattctgtgcttgtatgttgatgacatactgatatttgggacaaactttgaggtgataaatgaggttaaatcattcttgtctcaaaaatttgatatgaaggatttgggagtagctgatgttatcctaaacattaagctaattagaggtgagaatgggattacactcttgcagtcccattatgtggagaagatcttgaatcgttttggctacattgacagtaagccttctccaatatcttatgatcctagcttgttgcttcgcaagaacaagagaattgctaggaatcaattggaatactcccaaatcattggctcgctgatgtacctggctagtgcaactagcctgatatctcctttgctgtga

SEQ ID NO: 14063 - DNA, 5361 bp, Oryza sativa
  Clone ID: TFbOSC400299j.C1.o17.fg
atggcgaggggcgtagcgcgcgcggcgtcgttcggtggccgcgccgcgaccgcgaggtggtgctcgtaccggcgcatcacggtagccgtctgcctcgggaacctcgtcgccgcgctcctcgtgctccgctccctcacctccctcgcccccacaccgcccaaacgtgaggaagtggtggagtatacggaggagcagattaggaaggcggaggagtcgatccggattcgccgcgaggcggagcccgtcgagcttgtcgaggcggtgaagaatctgcggaagattttcaggcgggaggagaagaggcggaaggagttgccactggagttgaagcagaaggtctcgtatgagattgtgcagctcctgctcgatttgggggataacagcagtttcgctcagcaacgagctcggttgagctctcagccagcagcagcaccggctgctcctccttcccctttccctcccccctctccacgcagcagccccccggaggtgcgccatttccgacgttcggttgcctcgagcactcggcgtcagcaggacgccgagctcgccgcagcagaagagcgcaggcgagcaacggctcagaccgctgcagcagcagcgagggcggctagactggcggcagcggagttggcagcagccagggcggaggcggaagcagaggtggcggaagatgcggcacgtgcggcggaggtagaggttgagaccttgcgcagcagcatcaatggctccatcgccggcgacatcaccgccgacagggagcttgaggagctagcaagaggaagggcacgggagcgggcagagcggtgggcagcagcccacctccacggcggcggcggcggccaaagggaccgtgcgcccgctgacgggaacccagatgggcgcgggcgtgtcggcggcagcacggagcccgcgcgctgccctcgcaggcagcgtgactctctctcccttgaccggcgccatggccaccacggcgtccagacggtggtcagggactttggtcccggcggtgggtggcctaccctcaccaaaaccaactacatcgagtgggccgcggtgatgagggtgaggctccaggtgcggcacatgtgggaggcagtatggtacggcgacgtcgactacgacgaggatcggcgggcactggatgccctcatcgctacagtcccgcccgagatgcagttctcgctttcccagaagcggactgccaaggaggcctgggatgccatcgctgcggcacgcatctgcagtgaccgcgcccgcaagtccacactgcaggcactccgcaaggagtgggagaacatggccttcaagccagagaagtacaggcagatcgctcgctcgatcgagtctcagctggacctctccacgatgtcgatcgaggaggcgttaggtcgcctcaaggtcgtcgacggtgatgagccacagcctctctcggggcctatcaccattggcgggaagctccatctcactcgggaccagtgggaggcctctcagggtgacgggaggaagggggagtcatcttccccgacaggcggccgtaagctgcgcaaggtgcggggaggtgtccagctacggtgggcgcgaagacgtgccgagggtggcgcccgcagaggcgcccaaggcggcgccaccggcaaccacaagccggcacgagacgacgcctaccgcaactgtggcaagcttggccattgggccaaagactgtcgacagccacgacgcggccaggcccacgtcgcacgtgtggaggaggaagagccggctctgctcctggctcacgcaagcatcgagctacctccaacggcaccggccgcagcagtttttctccaccttgatgagccgaaggtactcgtctccctctgcaacggctctagcaacgacaaggctgatgggtggtacctcgacaccggcgccacccatcacatgaccggccgacgggagttcttcaccgagttcgactccagcgtccgaggctccgtcaagtttggggacgcctccggcgtggagatcaagggcgttggctccgtcaccttcaccgccaagtccggtgagcacaggttgctcaccggagtctactacatccccgcgttgaggaattctatcatcagcgtgggacagctggatgagaacggctcacgcgtgttggtcgaggacggtctcatgaggatttgggatcgccgtcgtcgccttcttgccaaggttgcacaaccagtttgcctcgccgctcgtcgagacgatgaggcgtggcagtggcacgagcgcttcgggcacctccacttcgaggcgttgaagcggctcaatgccaaggagatggtgcgaggcatgccgtgccttgaccacgtggagcaactctgcgacgtctgcgtggtaacgaagcaacggcgactcccctttccccagcagacgagcttccgagccaaggagcggctcgagctcgtgcacggggacttgtgtggcccagtgacaccggccacaccaggaggacgacgttacttcctgctgctcgtcgacgacctctcccgctacatgtgggtgatggtcctcgacagcaagggagaggctgcggacgccatcaggcgcgcgcaggctgctgcagaggcggagtgtggccgcaagctgcgcgtgctgcgcaccgacaacggcggcgaattcacggcggctgaatttgcttcgtactgcgctgatgagggcattcagcgccactacatcgcgccgtacagcccgcagcagaacgacgtcgtcgagcggcgcaaccagacggtggtggggatggctcgggctctcctcaagcagagggggatgccggccatcttctggggagaggcggtggtgacggccgtctatatcctcaaccgctctcctaccaagaccctcgatggcaggacaccgtacgaggcatggcatgggcgcaagccggcggtctcccacctgcgggtcttcggctacctcgcgttcgccaaggagcttggccacatcggcaagctcgacgacaggagcaccccaggggtgttcatcggctacgcggagggctcgaaggcctaccgcatcctcgacccggagacacatcgtgtgcgcacagcgcgcgacgtagtgttcgacgaagggcgagggtgggtatgggacaaggcggtggacgatggttcgactccgacgtacgacgacttcaccatcgagtacgtccacttcgagggagctgggggagtaggcagctcttcttcaccgagcgtgtctaccccagtccccgagcctccaccgactccgacatcaacacatcctcgggccacgacttcgactacgacgagctcttcgccgacaccaccccagccggtgaccccacgcactccagcaccaacagccactcctccaggcacgtatactcagacgccagctcgtgttgagcgcagcccggtggagttcgctactccgctctcccacgacggggagcgcatcgacgcataccacgacggcgagcagctacggtaccgtacgatggaggatcttctcggcgaccagccggtgccgggactggtgcctcgcgacctggaggcgcagttacaccttgcgtgcgacgacggtgagcctcggtcttttgcagaggccgagaaacacgcggcatggcgtgccgcgatgcagtcggagatggacgcggttcaggagaaccgcacctgggagcttgttgacctccctcgtggtcaccgcacgatcacccttaagtgggtgttcaagctgaagagggatgaagccggagccatcgtcaagcacaaggctcgcttggtggcacgcggtttcgtgcagcaagaggggatcgactacgacgatgccttcgctcccgtggcacggatggagtccgtgcgactccttgcgctggctactcaggaaggctggggcgtccatcacatggacgtcaagtcggcgtttctgaacggcgacttgaaggaggaggtctacgtgcaccagccgccgggatttgtgatccctggcaaggagggcaaggatgcggaggtcgcggcgttcaaggaggagatgaaggccaccttccagatgagtgatctcgggcctctctccttctacatggggatcgagaccgcctacgccaagcgcatcgttgagctggctgggctcaccgattgcaacccagctctcactccgatggaggagagactaaagctgagccgcgatagcacgacggaggaagtggatgctacacagtaccggcatcttgtggggagccttcgctacctcacccacacacggccggacttggccttctccgtcggctacgtcagtcggttcatgcagcgaccgacgacggagcaccagcaggctgtgaagaggatcatccgctacgttgcggggactctcgaccacggtctctactacccgaggtgtcctggcaaggcacacttcatcggctgcgaggccgagtacatggcggccttcgccgcttcgacccaggcgctctggcttgctcgactgcttagtgatctcctcggcagagacactggagcggtggagctcagggtggatagcaagtccgctctggccttggcaaagaaccccgtttttcacgaacagagcaagcacatccgggtgaggtaccacttcatccgaagctacttggaggaagggagcatcaaggcgagctacatcaacaccaaggaccagcttgcggacttgctcaccaagcctcttgggaggatcaaactaggagggtgcagcaataggcttgcagccagctatggttatatatatgtatccaacctccctcgggaagaagcagtggaatcatggcgtttcgagaagttaaaagatataaaaagtgcatctattcagaactcaacaaagttagacctctccaacgaggaagcaagaaccttaaagcgagcactacagttcaactggcatgtgctgctggaagacattggtctttggataccatcagaagtctcacacactgaacatgatgacaaacctgagaatgaaccagaagaagaagagataatagctggtccacctttgccctcacaatgcaatgctgagctacatactgattacgatggtgctgctgttagatggggcttaacacaccccaaagaatctgctgccgattgctgtcaagcatgtctagaccaggctaagaatgccaggccaggtgaactaaggtgtaatatatgggtttattgcccatcagagtttggatgtttctctccagataaatatgagcataaacatcaggagtgctggttgaaacaggctgaccaccctaaactcaacttcaaagacaagtattccgagtcatacagagattctcatcccactgcccctgtcgttgtgccctggatgtcaggtgtcatcagcgcatga

SEQ ID NO: 14064 - DNA, 4548 bp, Oryza sativa
  Clone ID: TFbOSC400321j.C1.o53.fg
atgtcgggccaagcgggggatgggaatgatggtgataagggagttaagattccttatgactatccccctacatctacatcttatgtgagtacatatagcggcaaagctccgtacttcaatggtacagactatgccgcttggaagcataagatgaagatgcatttgaagtctattaacccatctatttggagaatagtcgaaaaagtctatgttttgcagaatcccgaagatcccaccaaggaggacgacgagaacgagcacaaaaatgctcaagccgctaatgcaatacttagcgccttgagtggaagtgagttcaaccgtgtagatggcattgagagtgccaaaatgatttgggacacgcttcggaacttgcatgaaggcacagatagtgttcgtgagtccaaggtggagatcctcaaggggcaatttgagaggtttgtgatgttggatggacttggctccaaggacatgaccgatggggtggtggtcaagaagatggttcgagcaatcactccaaggaactctaccttagtgaccatcattcgtgagcgtccggactacaagactctcacacctcacgatttgctcggacgtattcttgcccatgacatgctcatgcaagagtccaacgatgtcatccaatacatcaaccaaagctcaaccacaagcatcaagaaggaagacttggcattaaaggcgaaggaagaagaagaagagaaccgcaagagtaagagcaaggcggagatcgatgatgaagagatggctctcctcgtcaagaagttcggcaagttcatgaggcgaagcggtttcttcaaaggaggttcttccaagcactactccaacaagtcaagtggaaaacactccgcaagagtgtgctacgtgtgcaaagagcccggtcacttcattgcggattgctcccacctcaaggatggttctcacatcaaggaagataagaagaagggtgagaagaaggagaagcacaagcatagcaagcaggaacattatggccaagctcaccttgggatgatcttcggctccgagtccgagtcaagctcaagtgatgaaggagtcgccacgttcgccgtcaagccttcatcaccaccgagactcttcgactactcaagtgatgaggatgctcccatttgcctcatggcaaagaagcctaaggtaccttctcctcccaagtcatttaatgttgaccttgttagtgatgaggaggatgaggttatggatgatgaattgttcaaatccataactaaggaatccctaccacacttgagtgagttgcttgggagaattgaggaccaatatgctactcttgagaggcaagaggttttgctcattcgtgagaaagagcggtctcatgaactcaagagtgagcttgctaaggagagagagaaaaatgaggctttgcaaaatgagaagcttatgagactccttcacaatggcctacttaagtgccatatgggtagtaaggccctaaagaagtacctaggctatcaaagggacaacttcaatcatgagggtcttgggaagaatgatagtggtcgtgttgttgctaagtatgtaggcccaaggggcgagaatatttctatcaagagagtactttgggtgcctaaggcacttgttactaacatgagaggacccaagcaagaatatgtttccggtggaagaagttgggtgattgatagtggatgcaccaatcacatgaccggagaagaatcaatgttttcaactcttgatccaaatggcacttcacaagataatatagtcttcagggatgatggaaagggaaaggttatgggattggtggctaagtccaacacgaggtggctttggcatcggaggctagcccatgttggtatgaggaatcttcacaagcttctaaagcacgatcacatccttggactaacaaatgttcaatttgagaaagatagggtgtgtagtgcgtgccaagccggcaaacaaattggagcacatcatcccgtcaagaatgtgatgaccacttcaagaccattggagcttcttcacatggacctcttcaggccaattgcttacctaagcattggaggtaacaaatatggtcttgttattgttgatgacttttcacgcttcacgtgggtgttctttttgcatgacaagagtgagacacaagccatcttcaagaagtttgcaagaagagcacaaaacgagttcgatctcaagatcaagaacattcgaagcgacaacggcaaggagttcaagaacacgtgcatcgagagtttccttgatgaagaaggcatcaagcatgagttctcggctccatattcacctcaacaaaatggagtagccgagaggaagaataggactctcattgagatggcgaggaccatgttggatgagtacaagacatcagaccgtttttgggtcgaagccgtcaacaccgcatgccacgccatcaaccgcctttatcttcaccgccttcttaagaagactctctatgagcttcttactggtaacaaaccaaatgtctcttactttcgtgttttcggtagtaagtgttacattcttaataaaaaggctagatcctctaagttcgctcctaaagtggatgagggattcttgcttgggtatgggtcaaatgaatgcgcataccacgttttcaacaaaacctccggtattgttgagatcgcgtgtgatgtgacatttgacgaaactaatggctctcaagtagaacaagttgactcacatgtgttaggtgaagaggacccgagcgaagcaatcaaaaggttggctcttggggacgtacgtcctagggagccacaacaaggggcctcttcctcaacacaagtggagccacctacatcaacccaagccgacgatccctctacctcaagcttggatcaaggtgaagaaggcgaacaagtgccaccctcaccgatcaatttagcttgcccaagaatccaccaaagtatccaaagagatcatcccaccgacaacattttaggagacatcaacaagggagtatccactcgttctcgtattgcaaatttttgtgagcattactcgtttgtgtcttctcttgaacctctaagggtggaagaagctcttaatgatccggattgggtgatggcgatgcaagaggagttgaacaacttcacccggaatgaatggatcttccgcaacaagcaagacgaggccgaggtcgtaataaggaacaaggcgaggttggtggcgcaagggttcacccaaatcgaaggattagatttcggtgaaacttttgcgccggtagctagacttgagtcgattcgcatattgcttgcttttgctactaacctcaattttaagctatatcaaatggatgtcaaaagcgccttcctcaacgggcctatcaacgagttggtatacgtggagcaaccaccgggcttcaaggatccaaagtatcccaaccatgtgtacaagctccacaaggcactctacgggcttaagcaagcccctagagcttggtatgagtgtcttcgcaattttcttgtgaaaaacggctttgaaatcgggaaagccgattcaactctttttactaaaagacatgataatgatatttttgtgtgccaaatatatgtcgatgacattatatttggttctactaacaagtcttttagtgaagagtttagtaggatgatgaccaaacgttttgagatgtccatgatgggtgaattgaagttcttcctcggccttcaaatcaagcaactcaaggaaggaaccttcatttgccaaaccaagtatttgaaggacatgctcaagaagtttgggatgaagaatgccaagccaatccacactcccatgccatcaaatggccacctcgacctcaacgagcaaggtaaagacgtcgatcaaaaggtataccgttccatcattggctcacttctttacctttgtgcatctaggcccgatattatgcttagtgtgtgcatgtgtgcaagatttcaagccactccgaaggagtgtcatcttgtggccgtgaagagaattcttagatatttggtgcacacacctaaccttggtttttggtatcctaagggagcgaggtttgatctcattggctatgccgatgcggattatgccgggtgcaaagtggataggaaaagcacatcgggtacttgccaattcttgggtaggtcccttgtttcttggtcttccaagaagcaaaactccgtcgccctatccaccgccgaagcggaatatgtttcagcggggagttgttgtgctcaacttctttggatgaagcaaaccttgagagactatggcctcaatgtatccaaaatcccactcctatgtgacaatgagagcaccattaagatagccaacaaccccgtccaacactcccaaaccaaacatatagatattcgccatcatttcttgagagaccattccacaaaaggcgacatagatatccaacatgtgagaaccgacaaacaattggcggatatcttcaccaaaccactagatgaaactaggttttgtgagttgagaagtgaactaaatatcttggattctcggaatgtggcttga

SEQ ID NO: 14065 - DNA, 1012 bp, Oryza sativa
  Clone ID: TFbOSC11150j.C1.o2.gm
atggcatccgtgcagcaggtgagggcagcagcggtgaagaacgcaccgacggtggacatcccaatagtgcctctggcaacgtccaagctgccggagttcttacgcgtcaggccacccaccttctccagcaccaccaaccctatggaggcaaatgactggctccacgctatagagaagaagctaaatctcctacagtgcaatgatcaggagaaggttgccttcgccacacaccagctccagggtcccgcgtcaacttggtgggacaatcacatggctacccgtccgccaggtacggaggtcacttgggcggagttctgtcgcagctttaggaaggcgcaggtgcccgacggggtcgtgccacaaaagaagagagaattctgggcactccaccagggcaaccggacggtgactgagtacctccatgagtttaatcgtctagcgcgatatgcaccagaggatgtccgcatcgacgccgagaaacaggagaagttcctagcaggcctggatgacgagctgaccaaccagttaatctctggagactacgccgactttgagaagctggttgacaaggccatccgtcaggaagatcagcacaacaaaatggacaggaagagaaaggcagcgcagttccggtccaaccaaggaagtcaccagcgaccgcgcttcgctcctggacagcagggtggacctaccaccatgatcgtccgccagcaccgccctttcaacacgagcagcttccaccagggtgccagtggcagccagaaccaccagggaggccagcccaaccgcagtacagctccgcgcccaccgatggcaccagcacagtcagctccatcagcccaagccaagaaggagactggagcaaagccagggtcctgtttcaattgtggtgagcatggccactttgctgacaagtgcccgaagccaagccgtgccggggcaaggtttgcccaagctcgtgtcaaccacgcatccgcagaggaggcgcaagcagcaccagaggtcgtactag

SEQ ID NO: 14066 - DNA, 3534 bp, Oryza sativa
  Clone ID: TFbOSC13105j.C1.o1.fg
atgatcgtccgccaacatcgccctttcaactcgagcagcttccaccagggcgctagtggcagccagaaccaccagggaggtcagcccaaccgcagtgcagctccacgcccaccattggcaccagcacagtcagctccatcagcccaagccaagaaggagactggagcaaagccaggatcctgcttcaactgtggcgagcatggccactttgctgacaaatgcccgaagccaaggcgtgccgggccaaggtttgcccaggctcgtgtcaaccacgcgtccgcagaagaggcgcaagtagcaccagaggtcgtactgggtacgtttcctgttaactcaatccctacaacagtacttttcgattctggtgcaacgcattcgttcattggaaagaagtttgttgggatacatgggttaataagggaagaacttagtacaccaatgcgggttcataccctagggaatagctccacttcggttcaattcagcccttctataacaatagaaatccaaagatcaccatttctagccaacctcattcttctcgaatccaaagacctagatatcaatcttgggatggattggctaaccaagttcaagggtgtcattgattgtgtgaatcgcacagtcaccttgaccaatgagaagggagaaacagtagtgtacaaatctccagtctcaccaaagcagggggtctccttgaatcagattgaggtggaaattccagtggtcaccgaggagaagagttcgaggaagttggaagatatccccatagtctgcaagtatccagaagtgttccccgaggacctcactaccatgccacccaagagagagattgaattccggattgatttggcaccgggaactgctccaatttacataagaccgtacagaatggcagccaacgagctagcagaggtcaagaagcaggttgatgagcagctgcagaaagggtacattcgaccgagtacttcactttggggtgctccagtcatttttgtggagaagaaggacaagacgaagagaatgtgtgtcgattatcgcacactcaatgaggtcactttcaagaacaaatacccgttgccgcggattgatgatctgttcaatcagctgaaaggagccaaggtgttttccataatagacctgcgatcaggctacaaccagttgaggatttgggaagaggatattcccaagtcagcctttaccacttggtatgggttgtatgagtgcacggttatatcttttggacttaccaatgcacctgcattcttcatgaacctgatgaacaaagtgttcatggaatttctcgataagtttgttgtggtattcattgacgacatacttatctattcaaagtctgaagaagaacatgagcaacatctccttctagtactcgagaagttgaaggagcaccagttatatgccaagttcagttattaccgtcggttcattgaaaatttctccaggatcgctagacccatgactcagttgcttaagaaagatgagaaatttaaatggacggccgagtgtgacaagagttttgaggagctcaagaagagattagtgtctgctccagttctgattctgcccgaccaaacaaaggacttccaagtctattgcgacgcgtcccgccacgggcttggatgtgttctaatgcaagacggcagagtggtcgcttatgcctcgcggcagttgcgtccacatgaagggaactatccaacacatgacctggaattggcagcggtggttcatgctttgaaaatctggaggcaatatctgattggcaaccactgcgaagtatatatagatcacaagagtctgaaatatatcttcacccaacctgatctaaatctccgacagcgaagatggttggagttaatcaaagattatgacatgagcattcactaccatccaggcaaagccaatgtggtggcagatgcattaagcaggaagagctactacaatgctttatgcaccgaaggcatgtgtaaggaattgcagcaagagcttgaacgtctcaacatgggaatcgtagaacacgggttcgtagctgctctagaggcacgtcctacgctcgtggatcaagtcagagcagctcaagtaaatgatcctgagatagctgaactgaaaaagaatatgtgggttggaaaagcccgggatttccttgaagatgaacatggcacaatctgcatgggagaaagattgtgtgtgcctgatgacaaagagctaaaagatctgatactcactgaggctcatcaaactcaatactccattcatcggggtagtaccaagatgtaccaagatctcaaagaaaatttttggtgggccagcatgaggagggaaatagctgaattcgtcgcgctctgcgatgtttgtcagcgagttaaagcagaacatcagaggcccgcaggattgttacaacctcttcagatcccggaatggaaatgggaagaaattgggatagatttcataacaggtctgcccaggacatcatcgggccacgattcaatctgggtggtcgtggatcgacttaccaaagttgctcatttcattcctgtgcatactacatatacaggcaaaaggttggcagagctctatctctcgagaatcatgtgtctgcatggagtacccaaaaagatagtatctgatcgagggagccaattcacttcaaagttctggcagaaattgcaagaggaattgggaacccggctgaacttcagcacagcctaccatccgcagaccgatggtcagaccgagcgggtcaatcaaatattggaggatatgttaagggcttgtgcgcttgattttagtggagcatgggacaaaagcttgccgtatgcggagttctcctacaacaacagctatcaggccagtctacaaatggcaccgttcgaagcgttgtatggccggaagtgccgcacacctctcttctgggatcaaataggcgaaagtcaactgttcggaacagaagtgttaacggaagcagaagagaaagtcagaaccgtcagagagaggctgagaattgcccagtctcgacagaagagctatgcggacaaccgccgaagggagctcacttttgaagcaggggattacgtgtactttcgtgttactccgctccggggagtacaccgtttccaaacgaaaggcaagttggcaccacgcttcgtgggaccatacaaaatcttggaacgaagaggagaagttgcttatcagctagaacttccacccaaaatgatcagtatccatgacgtgttccatgtgtcccagttaaagaagtgtttgagggtacccgaagaacaagccgattcggaggagcacatcgacattcaagaagatctaacctatgtggaaaagccagtttgtattcttgagaccagtgaaagaagaaccagaaacaaggtcactaggttctgccgggttcaatggagccaccactcagaagaagaagcaacctgggaaagggaagatgagttgaaggccgcccatccgcacctcttcaccggctcttccgaatctcggggtcgagattccgtttaa

SEQ ID NO: 14067 - DNA, 2742 bp, Oryza sativa
  Clone ID: TFbOSC13112j.C1.o1.fg
atgatcgtccgccaacatcgccctttcaactcgagcagcttccaccagggcgctagtggcagccagaaccaccagggaggtcagcccaaccgcagtgcagctccacgcccaccattggcaccagcacagtcagctccatcagcccaagccaagaaggagactggagcaaagccaggatcctgcttcaactgtggcgagcatggccactttgctgacaaatgcccgaagccaaggcgtgccgggccaaggtttgcccaggctcgtgtcaaccacgcgtccgcagaagaggcgcaagtagcaccagaggtcgtactgggtacgtttcctgttaactcaatccctacaacagtacttttcgattctggtgcaacgcattcgttcattggaaagaagtttgttgggatacatgggttaataagggaagaacttagtacaccaatgcgggttcataccctagggaatagctccacttcggttcaattcagcccttctataacaatagaaatccaaagatcaccatttctagccaacctcattcttctcgaatccaaagacctagatatcaatcttgggatggattggctaaccaagttcaagggtgtcattgattgtgtgaatcgcacagtcaccttgaccaatgagaagggagaaacagtagtgtacaaatctccagtctcaccaaagcagggggtctccttgaatcagattgaggtggaaattccagtggtcaccgaggagaagagttcgaggaagttggaagatatccccatagtctgcaagtatccagaagtgttccccgaggacctcactaccatgccacccaagagagagattgaattccggattgatttggcaccgggaactgctccaatttacataagaccgtacagaatggcagccaacgagctagcagaggtcaagaagcaggttgatgagcagctgcagaaagggtacattcgaccgagtacttcactttggggtgctccagtcatttttgtggagaagaaggacaagacgaagagaatgtgtgtcgattatcgcacactcaatgaggtcactttcaagaacaaatacccgttgccgcggattgatgatctgttcaatcagctgaaaggagccaaggtgttttccataatagacctgcgatcaggctacaaccagttgaggatttgggaagaggatattcccaagtcagcctttaccacttggtatgggttgtatgagtgcacggttatatcttttggacttaccaatgcacctgcattcttcatgaacctgatgaacaaagtgttcatggaatttctcgataagtttgttgtggtattcattgacgacatacttatctattcaaagtctgaagaagaacatgagcaacatctccttctagtactcgagaagttgaaggagcaccagttatatgccaagttcagttattaccgtcggttcattgaaaatttctccaggatcgctagacccatgactcagttgcttaagaaagatgagaaatttaaatggacggccgagtgtgacaagagttttgaggagctcaagaagagattagtgtctgctccagttctgattctgcccgaccaaacaaaggacttccaagtctattgcgacgcgtcccgccacgggcttggatgtgttctaatgcaaaacggcaaagtggtcgcttatgcctcgcggcagttgcgtccacatgaagggaactatccaacacatgacctggaattggcagcggtggttcatgctttgaaaatctggaggcaatatctgattggcaaccactgcgaagtatatatagatcacaagagtctgaaatatatcttcacccaacctgatctaaatctccgacagcgaagatggttggagttaatcaaagattatgacatgagcattcactaccatccaggcaaagccaatgtggtggcagatgcattaagcaggaagagctactacaatgctttatgcaccgaaggcatgtgtaaggaattgcagcaagagcttgaacgtctcaacatgggaatcgtagaacacgggttcgtagctgctctagaggcacgtcctacgctcgtggatcaagtcagagcagctcaagtaaatgatcctgagatagctgaactgaaaaagaatatgtgggttggaaaagcccgggatttccttgaagatgaacatggcacaatctgcatgggagaaagattgtgtgtgcctgatgacaaagagctaaaagatctgatactcactgaggctcatcaaactcaatactccattcatcggggtagtaccaagatgtaccaagatctcaaagaaaatttttggtgggccagcatgaggagggaaatagctgaattcgtcgcgctctgcgatgtttgtcagcgagttaaagcagaacatcagaggcccgcaggattgttacaacctcttcagatcccggaatggaaatgggaagaaattgggatagatttcataacaggcaaaaggttggcagagctctatctctcgagaatcatgtgtctgcatggagtacccaaaaagatagtatctgatcgagggagccaattcacttcaaagttctggcagaaattgcaagaggaattgggaacccggctgaacttcagcacagcctaccatccgcagaccgatggtcagaccgagcgggtcaatcaaatattggaggatatgttaagggcttgtgcgcttgattttagtggagcatgggacaaaagcttgagtattctatag

SEQ ID NO: 14068 - DNA, 1479 bp, Oryza sativa
  Clone ID: TFbOSC14148j.C1.o1.fg
atgccgcgctacaagcctgagtacctgtttggtgttgagggttttgtccaggagttgcgtacgatgtcctttgtcattggatttgggactgcccctttttatgcccagattcctcatgatcgtcatgaagagaagtgtcgagtcaaagtcactttgaacagtaatagtgaagaggaggtggcaaggatcgccataggagagctccgcgatcgctacagtgatcagttggccgacactgagtatcgctaccatcctcgtcaaccacagggaagtgaccgtggcagttaccttgagactgaaggaattgaaaatgatgctaccacaaggcatttggttgagatgttgtgggctatggatgaaagtcgtgcggagactgtgttagcagctcaagatcgtgaagatcggaatcgtggtaagatttgtaagctcgaagacaaggtggatcgtttggagaaggaactagccgcattgaagggagaagcaccgccgcagaaggccaggattcgtcttaccgcaaggaagagagctctatttgtccctcgttatcaattggcgccaaagatggtgaatactcgcagcaacgggaatggtcccaacaaccccaataacaacaatggagagaatcccactcttgctcaagttcttgctcaacagacacagctaatgaacatgatgatgcaacaacttcagaatcagcagaaccaaggaaataaccatgtacctcctcagaataagttagcagaatttcttcgtgagaaggtctcatttgcatcacaccagttgcatggccctgcctctgaatggtgggatcacttccgccttaacaggactactgctgaacctatcacttggcttgagttcaccgctgctttccggaagacgcatataccatcgggagtggtgtctctcaaaaagaaggaattcaggtcgcttacccagggatctcgctctgttacggagtatctgcacgagttcaatcgtctggctcgttatgctccggaagatgtgcgcaatgatgaagagcgtcaggagaagtttttggaaggacttaatgatgagctttcttacccactcatgactggagattatcatgatttccagaagctagtggataaggctattcgtcaggaggacaaatacaatcgcatggagcagaagaaacgtcggattgctcaattcaagacacaacaggggaataatcagaagccgcgtcttactttaagaccccagtccatgccacatggaggttcttcgtttgttgttcgtccgcagcgtcagttcttcaacaacaatgctggcaacaacatccgcaatcaagctccacgtcctgttgcagctccaacacagcaacaacctgccaagagggagcaaggcagcaagcccgtggtgtgtttcaactgtggagacccacgacattatgctgacaagtgtccgaagccccgacgcgtgaaggctgtccctacccagagcaactgtacg

SEQ ID NO: 14069 - DNA, 4393 bp, Oryza sativa
  Clone ID: TFbOSC26121j.C1.o1.np
ggccatgatgcagcagatgctgcagcagcaccagcagatgcaccagaggatgtagcagcaagtcgaacagtagcagcagcagtttggtccccctccccctcagtccaagctgccgaagtttctacgcgtcagtccacccaccttctctagcaccaccaaccccatggaggcgaatgattggtccatgccatagagaagaagctcaatcttctgcagtgcaatgatcagaagaaggtcacctacgccacacaccagctccagggtccctcgtcagcttggtgggacaatcacatggctacccgtccgccaggtacggaggtcacttgggcggagttctgtcgcagcttcaggaaggcacaggtgccagacggggtcgtggcacaaaagaagagagaattctaggcactccaccagggcaacagggcagtaactgagtacctccatgagttcaatcgccaagcgcgatatgcaccggaggatgtccgcactgacgcggagaagcaggagaagttcctagcaggcctggatgacgagctgaccaaccagttgatctctagggattacgctgacttcgagaagctggtagacaaggcaatccgccaggaggatcagcgcaacaaaatggacaggaagagaaaggcagcgcagttccggtccaaccaaggaagtcaccagcgaccgcgcttcactcccggacagcagggtggacctaccaccatgattgtccaccagtatcgcccgttcaactcaagtagcttccaccaggtcgccagtggcagccagaaccacccgggaggtcagcccaaccgcagtgcagctccgcgcccaccaatggccacagcacaggcagctccatcagtccaagccaagaaggagactggagtaaagccagggtcctgcttcaactgtggcgagcatggccactttgctgacaagtgcccgaagctaaggcgtgctgggccaaggtttgcccaagctcgtgtcaaccacgcgtccgcggaagaggcgcaagcagcactagaggtcgtactgggtacgtttcctgtcaactcaatttatgcaacagtacttttcgattctggtgcaacgcattcattcatttcaaagaagtttattggggaacatgggctaataagagaagagcttagtacaccaatacgggttcatacccccgggaatagttccacctcggtttaattcagcccttctgtaacaatagaaatccaaatatcaccatttctagccaacctcgtccttctcgaatccaaagacctagatgtcattcttgggatggattggctgaccaagttcaagggtatcattgattgtgcgaatcgcacggtcaccttgaccaatgagagaggggaaacagtggtgtacaagtcaccagtcgcactgaagcagggaatctccttaaatcagattgaggtggagaattcggtggtcaccgcggagaaaagttcgaggaaattggaagatatccccatagtctgcgagtattcagaggtgttccctgaggacctcactaccatgccacccaagagagagattgaattccggattgatttggcaccggggactgctccaatttacaagagaccgtacagaatggcagccaatgagctggcagaggtcaagaagcaggttgatgagcaactgcagaaagggtacattcgaccaagtacttcaccttggggtgctccggtcatttttgtggagaagaaggacaagacgaagagaatgtgcgtcgattatcgcgcactcaatgaggtcacaatcaagaacaaataccctttgccacggattgatgatctgtttgatcagctgaaaggagccaaggtgttttccaaaatagacctacgatcaggttaccaccagttgaggattcgggaagaggatattcccaagacagctttcaccactcggtatgggttgtatgagtgcacggttatgtcttttggacttaccaatgcacctgcattcttcatgaatctgatgagcaaagtgtttatggagtttcttgacaagtttgtcatggtgttcattgacgacatacttatctattcaaagtccgaagaagaacatgagcaacatctccgtctggtactcgagaagttgaaggagcaccagttatatgccaagttcagtaagtgtgacttctggttgtcggaagtcaaatttctgggtcacgtcattactgctcaaggtgtggcagtggatccatcgaatgtggagtcagttaccaagtggaccccacctaagacagtgtcacagattcggagtttccttggacgtgcgggttattaccgtcggttcattgaaaatttttccaggattgccagacctatgactcagttgcttaagaaagacgagaaattcaagtggacagccgagtgtgacaagggttttgaggagctcaagaagaaattagtgtctgctctagttctgaatttgcccgaccagacgaaagacttccaagtctattgcgacgcgtctcgtcatgggcttggatgcattctaatgagggcagagtggtcgcttatgcctcacggcagttgcgtctgcatgaaggaaactatccaacacatgacctggaattggcagcggtggttcacgccttaaaaatctggaggcattacctgattggcgatcgctgtgaagtatatacggaacacaagagtttgaaatatatcttcacccaacctgacctgaatctccgacagcgaagatggttggagttaatcaaagattatgacatgagcattcactaccatccgggcaaagccaatgtggtggcagatgcattgagcaggaagagctactgcaatgctttgtgcactgagggcatgtgtaaggaattgcagcaggagcttaaacatctcaacttgggaatcgtagaacacgggtttgtggctgctctagaggcacggcctacgctcgtggatcaagtcagagcagctcatgtaaatatcctgagatagctgaactgaaaaagaatatgagggtcggaaaagcccgggatttccacgaagatgaacatggcacaatctggttgggagaaagattgtgcgtacctgatgacaaagagctgaaagatctgatactcaccgaggctcaccagactcagtactccattcatccaggtagtaccaagatgtaccaagatctcaaagagaaattttggtgggccagtatgagaagagaaatcgctgaattcgtcgcactctgcgatgtttgtcagcgagtcaaagcagaacataagaggcccgcaggactgcttcaacctcttcagatcccggaatggaaatgggaagagattgggatggatttcatcacaggtttgcccaggacatcatctagccacgattcaatttgggtagtcatggatcgactcaccaaagttgctcatttcataccagtgcacgctacttatacaggcaaaaggttggtagagctctatctctcaagaatcatgtgtttggatggagtacccaaaaagatagtatctgatcgagggaggtagttcacctcaaaattttggcagaagttgcaagaagaattgggtacccgtttgaatttcagcacagcttaccatccgttgacagatggccagaccgagagcgtcaatcagattttggaggatatgttgcgagcctgtgcgcttgattttggaggagcttgggataaaagtctgccttatgcggagttctcctacaacaacaattaccaggctagtctgcaaatggcaccgttcgaagcgttgtatggccggaagtgccgcacacctctcttctgggatcaaacaggcaaacgtcaactgtttggaacagaagtgctaacggaagcagaggagaaagtcagaaccatcagagagaggctgagaattgcacaatctcgacagaagagctacgcagacaaccgccgaagggagctcacttttgaagcaggggattatgtgtaccttcgtgttactccgctccggggagtacaccgtttctagatgaaaggcaagttggcaccacgcttcgtgggaccatacaaaatttttgaacgaagaggagaagttgcctatcagctagaacttccatccaacatggtcggtatccatgacgtattccacgtgtcccagttaaagaagtgtttgacggtacccgaagaacaagccgattcggaacacattgacattcaagaagatctgacatatgtggagaagccagttcacatccttgagaccagtgaaaggaggactaggaacaaggtcaccaggttctgcagggttcagtggagccaccactcagaagaagaagcaacctgggaaaaggaagatgagttgaaggccgcccatccgcacctcttcaccagctcttccgaatctcggggtcgagattccgtt

SEQ ID NO: 14070 - DNA, 1188 bp, Oryza sativa
  Clone ID: TFbOSC31965j.C1.o1.fg
atggcgccgacagctcaacaaggagtttcaaaggctttgaagggtgtcaaaccggccaagatagaggatgacgattgggaggagatgcagttgcaggcggctgcgacaataaggctatgtctctcagatcgggtcatgtaccatgtgatggaggagacctcaccaaagataatttggaaaaagttggaagctcagtttatgtccaagactctgaccaataaactgtatctgaagcagaagttgtatgggttaaaaatgcaggaaggggcggatctgacagcacatgtgaacgttttcaatcaactagtcactgatcttgtgaagatggatgtggaagttgacgatgaagacaaggccatagttcttttgtgttcgttacctaaatcgtatgagcatgtggtgactactttgacgtacggcaaggagaccatcaaaactaaagatatcacttctgcgttgctggctcgtgatcagatgagaaagaataaagagggtgaaacatctcaagcggagggtttgctagtcaaagaagatcatgctgggcataaggtaaagaagaacaaaaagaagaagatggtgcaatgcttcagatgtgatgagtgggggcatataagcagggagtgtccaacactgaagggaaaagcaaaggctaatacagtgacttcttcaaatgactcggatagcgatggttgtgattttctcacgatgtcaagtgcacagtctaaggatgcagaagcgtggatattagattcagctagcttgtttcatatgacgccaaggaaggagtggttctcttcatacaagtctggtgagtttggttttgtctacttaggcgatgacacaagttatccggccatgggagtaggtgaagtcaaaatcaagctagaagatggaggtgaacatgttcttcagggagtcaggcatgtaccagggctaaagaggaatctgatttcgcttggaaccttgcatgaagaagggttaatattccgcggtaatcggaataggaagaccattgagatcatgaatggcaagatggctgtgatgactggagagaaggtggagtcgcatctttataagctgcgtgggtgcactgttgcaggtggagtccaggaggaagcggttgctgggatagcaattgcttttggtggcggcgggtctggcgcagactcgtcgggcggcttgcagtga

SEQ ID NO: 14071 - DNA, 3639 bp, Oryza sativa
  Clone ID: TFbOSC400481j.C1.o8.np
atgatcaacaccaggaatggcagccgtgcagcaggtgagggcagcaacggtgaagaacgcaccgacggtgggcatcccaacagcgcctccagcaatggtccgccaccgcttctcgagaacccgattcttgcacaagtgatggcccatcagacacagatgatggaagccatgatgcagcagatgcagcaccagcaccagtagatgcaccagaggatgcagcagcaagctgagcagcagcagcagcagtttggtccccctccccctctgtccaagctgccggagtttctacgcgtcaggccacccaccttctctagcaccaccaaccccatggaggcgaatgactagctccatgccatagagaagaagctcaatcttctgcagtgcaatgatcaggagaaggtcgccttcgccacacaccagctccagggtcccgcgtcagcttggtgggacaatcacatggctacccgtccgccaggtacggaggtcacttgggcggagttctgttgcagcttcaggaaggcgcaggtgccagacggggtcatggcacaaaagaagagagaattccgcgcactccaccagggcaacaggacagtaaccgagtacctgcatgagttcaatcgcctagcgcgatacgcaccggaggatgtccgcactgacgcattgaaacaggagaagctcctagcgggcctggatgacgagcgtaccaaccagctgatttctagagactacgccgactttgagaagctggttgagaaggcaatccgtcaggaggatcggcgaaacaaaatggacaggaagagaaagacggctcagttccggtccaacccaagaagtcaccagcgaccacgcttcacttccggacaacagggtggaccaaccatcatgattgtccaccaacatcgccctttcaactcaagcggcttccaccagggcgccagtgggagccagaaccaccaaggaggtcagcccaactgcaatgcagctccgcacccaccaatggcaccagcacaatcagctccatcagcccaagccaagaaggagactggggcaaagccagggtcctgtttcaactgtggcgagcatggccactttgctgacaagtgcccgaagccaacgcgtgccgggccaaggtttgcccaagcccgtgttaaccacgcgtccgcagaagaggcgcaagcagcaccagaggtcatactgggtacgtttcctgttaacacgatccctgcaacagtacttttcgattctggtgcaacgcattcattcatttcaaagaagtttgctggggtgcatgggttaagaaaagaagagcttagtacaccaatgagggttcataccccgggaaatagttcaacctcggtcagttatagcccttccgtgctaatagaaatccaaagatcaccatttctagccaacctcatccttctcgaatccaaagacctagatgtcattcttgggatggattggcttaccaagttcaaaggtgtcattgattgtgtgaatcgcacaatcaccttgaccaatgagaagggagaagcagtggtgtacaagtcaccagtctcactaaagcaggggatctccttaaatctgattgaggtgaaaaatccggtggccaccgaggagaagagttcgaggaaattggaagatatccccatagtatgcgagtatccagaggtgttccctgaggacctcactaccatgccacccaagagagagattgaattccggattgatttggcaccggggactgctccaatttacaagagaccgtacagaatggcagccaacgagctagtagaggtcaagaagcaggtggatgagcaactgcagaaagggtacattcgaccaagtacttcaccttggggtgctccggtcatttttgtggagaaggacaacacgaagagaatgtgtgttgattatctcgcactcaatgaggtcaccataaaaaacaaataccctttaccacggattgatgttctgtttgatcagctgaaaggaaccaaagtgttttccaaaatagagctgcgatcgggctaccaccagttgagaatccgggaagaggatattcccaaaacagccttcaccactcggtatgggttgtatgagtgcacggttatgtcttttggactcactaatgcacctgcattcttcataaacctgatgaacaaagtgttcacggaatttcgggataagtttgttgtggtattcatcgatgacattctaatctattccaagtcggaagaagagcatgagcaacatcttcgtctggtactcgagaagttgcaggagcaccagctttatgccaagttcagcaaatgcgacttttggttatcagaggtcaaattcttgggtcacgtcattacagctcagggcgtggcagttgatctatcgaatgtggagtcagttaccaagtagaccccgcctaagacagtgtcacagattcggagttttcttggacttgcgagttattaccgtcggttcattgaaaatttctccaggattgccagacctaggactcagttgcttaagaaagacgagaaattcaagtggacagccgagtgtgacaagagtttcgaggagcttaagaagaaattagtatctgctccagttctgattcttcccgatcagacgaaagacttccaaatctattgcgatgcatcccgtcacgggcttggatgtgttctaatgcaagagggcagagtggtcgcttatgcctcgcggcagttgcgcccgcatgaaggaaactatccaacacatgatttagaattggcagcggtggttcatgctttgaagatctggaggcaatctgattggcaaccgctgcgaagtatatacggatcacaagagtctgaaatatatcttcacccaacctgatctaaatctccgacagcgaagatggttggagttaatcaaggattatgacatgagcattcactaccatcctggcaaagccaatgtggtggcagatgcattaagcaggaaaagctactgcaatgctttatgcaccgaagacatgtgtaaggaattacagcaggagcttgaacacctcaacttggggctagtagaacacgggtacgtggctgccctagaggcacgacctacgctcgtggatcaagtcagagcagctcaggtaaatgatcctgaaatagcagagctaaaaaagaatatgagggtcgaaaaagcccgggatttccacgaagatgaacacagcacaatctggttgggagaaagattgtgcatacctgacgacaaggaactaaaggacctgatactcaccgaggctcaccagactcactactccattcacccaggcggtaccaaaatgtacccaagacctcaaagaaaagttctggtgggtaagcatgagaagggaaatagctgaatttgtcgcactctgtgacgtatgccaacgagtaaaggcagagcaccaaaggccagcaggtttgctacagcctcttcggatcccggaatggaaatgggaagagattgaaatggatttcataacaggtctgcccaggacatcatctggtcatgattcaatctaggtagtcgtggatcggctcactaaagttgcccatttcattccagtgcataccacgtatacgggaaagaaattggcagagctgtacttagcaaggatca

SEQ ID NO: 14072 - DNA, 2319 bp, Oryza sativa
  Clone ID: TFbOSC400588j.C1.o3.fg
atggcggccgccggcgttccgcgagcgggaaccggcggacggcggccggaaggacctggggaggacaagggaaaggttaggaatgggataggggctcccagcggcgggaatcgccagccggaggggaggggaggtcggaccgagcccgggagaggcggagtcggggcggcaaccgccggcggcgtgggcggcatcgtggggtgtgggtggcggttttggaagggagaggtgggggatgaggaggacgtggggcggcggggtcccacggccggcggactcgtgcgcggggtggagaaggagggcggaaacggcagcgtcgtggggaggctcaggcggccatggcggcgagaaggctacattcgctgcatactacctgcaaggagcatcagctgcttggtgggagacatacaagactctcattcctctgatgagcctaacaattggactgttttctgggaaggattcatatctgctcacatccctcctggtctcatggagatcaaaaagaaagagtttcttaacttgaagcaaggaaacatgaccttcatggagttcatggaacgcttcaactatctgggtagatatgtcgctgctgacatgaacactgaagcaaagaaggttgagctatgcagagatcgtcttgcacctgaactcaaccatgctattactgctcatgaaatcactagcatgaagtcactggttgaaaaagcccttcgtgtcgaatcaagtgagaaggaagtcgttgaagatcgtaagcgcaagtgggctgcaaagaaatttgcaagtggcagcagctccactcggcctcgtcttgctccatctcctgtggttcgtcccatggcgcctcagccaccacggcagatgtatgtgcctccacgtccacaaactcagatagtccgtcaagttcctcgcacagttcaagctgcgggagatgcatctcgtaatgataatgtcgcatgttataattgcggcaagaaggggcattattctcctaactgtccttacccgaagactggaaaatctggaccgcatacacagggagcaccacaaaggagaaatgtggcggatgagttcgctgaacatctgccaacttggaagtggtggcagtacgtcgactacccccggcacggtctgcagagtgagctccagagcgagtatttgtcatcctgcactcaagacctggatagtaattggcagttgcttgatttgtacgagttggaaaatagtgaaagaacccatccatccctggcctgtggtgtcggtaatacacaatcgcttgaaatgcggcctcatgcattgctgagggtgcatcccaaccataagcttgaaagtaaaggggtgattcatgggtccaaaatccttgtatacacagctcagccatataagctcggagagatgaactccgttcaagagaaaagaaatgatactccggaaaaatgtgagggtttcttaattaagttgggtagctactggagcaagagggtgaaatcttctccaccccaccttgacacactcaaaaaagctgctggaaagggaaaagcaataggaaaggtgcaagggactcttctggctccgaagaagctagatcttggcaagacgccatcagctcatcctaagcctccgacagaattcacattagacatgccattggtcagagatgacgtgttagtgaagatgggccctgcatgcaaggagttgcacggctactgcatggagaggtccaacgcaaggaggaagaatagagagacctccatgacgggctactatgatagacagccattcctcgggcctgaagccttcatcgccatagacttcaaagatctatgggacctctacagggtgcggttaacttggaagcatgtctgtcgtcatgcaccccatgttgccttactcgatctagctgtcatcaacgagacaattataaacagcgatcgagccaacatggtagaatatatcaaggactgcttatggtaccatcaagacaaggaattcattatgtgcgcctacaatcaacagcgtcattggattcttttggtcatagtgcggaagtggaatttggtatactaccttaactccaatatcaaaaaagacatatgcgattggtcggcgattgaagctgctttgaacaacgcctgggaccaatatgtggcaaaaggcgggtggcataaggaagggcatcccacactcggtcacaaaaaagacttcccaatgcatcaacaagttggcgaccagtgtgggttccatgtctggcataacatgaggagcttcgcaaaaaaggtgacattgctcgaccttgaggcatggctagcaaaggcctga

SEQ ID NO: 14073 - DNA, 768 bp, Oryza sativa
  Clone ID: TFbOSC400774j.C1.o33.fg
atgacgccgacagatcttgtgaagatggatgtggaagttgacgatgaagacaaggccatagttcttttgtgttcgttacctgaatcgaatgagcatgtggtgactactttaacgtatggcaaggataccatcaaaactaaatatatcacttctgtgttgctggctcgtgatcagttgagaaagaacaaagagggtgaaacatctcaagcggagggtttgctagtcaaagaagatcatgttgggcgtaaggtaaagaagaacaaaaagaagaagatggtgcagtgcttcagatgtgatgagtgggggcatataagcagggagtgtccaacactaaaggaaaaagcaaaggctaatgcagtgacttcttcaaatgactcagatagtgatggttgtgatcttctcacaatgtcaagggatgacataagttatccggccgtgagagtaggtgaagtcaaaatcaagctagaagatggaggcgaacatattcttcagggagtcaggcatgtagcagggctaaaaaggaatctgatttcgcttggaaccttgcataaagatgggttaatattccacggaaatcggaataggaagaccatggagatcatgatgggcaagacaactgtgatgactggagagaaggtggagtcccaactttacaagctgcgagggtgtattgttgcaggtggagtctatgaggaagcggttgctgggatagcaattgcttttggtggtggcgggtctggcgcagattcatcgggcggcttgcggtga

SEQ ID NO: 14074 - DNA, 1617 bp, Oryza sativa
  Clone ID: TFbOSC401054j.C1.o79.fg
atggtctgcatgagggacaatttcatcggatcaggatcccgtcagtttcatggatcaactcagctcaattctataagcttcccacgtcaacctctcaaagatcagccacaaccccaagtcatggctaatcagactcagacagtggaagagttgttacagcagatgcgacatcggtaccagatctatctgatgcagcagatgcaacggcaatgtcaggagccgcgtcaagtccaccagccacaaatgcaagtccaggtgccagcccggaacctgaatcagagtcagagtcaggagttcccaacatcggcaccgaagacccctgtcaaaatgcggtccagatacccgaagataacgatagccaagtcaacgtcagaccaaaggaaagtaagtgcttcctgttatgactgtggtgagcaagatcattatgtaaggaactgtccatggaaggtgttcgccaggtcacctgaaaaatacaagaagcagtgcccaggaagtaaccaagctccaagtcagtctaccgaccagaaggatgaatttactcctgaagacgcagcaaggatacccaagcgtcagagaggaagaaataccttccgtggagcacgccagctaacccgacatctcataaagtacggtccgcccagacccgaagatgatatatcaggagaacggttctctactgatgacgacgatgatgatgatgatgatgatgatgatgatgatgatgaggatgaggcgacccttaacagtttcatggaaagaggattggagttcaaagcatgtactagatgtgggatagtcgaacacactgctagtttatgcctccccacatgccgctgtggtgaatacacccattactcagatgaatgccctttgaggaaggtcacatgtttcctgtgtgagggaacagatcatgtgcctaaggattgtcagcggaactcggtcctagctttgaccaagaaagaacaagggacaaccgtgcaacccattcgtcaaccaatggcagtcgacgacatcagtcacaatccttctgctcttcctccaattccagccccagtggaagccaaccatggaagaagcaacgtcgctagggatgttcataaatcactacttgttccagtttcagctgtcaatgtgcataaccagaagcttgcacctcaggaccaagcaagtcggttttgtctcaattgtcttaccagcactgcccacgacaccaatcgacacctgaatgtgcaacctccgcctcaacggattatcgtcaagggcaccgtcagaggccgcattgttccaccggccatcgtttcaagcctacagcaccagcgccagcagggtaagcaatgccaggagaacaacagctcgctacagctacaaagaggcagtacgctccttcgtcagcacccgcagcaagtgttgtcagcaccaggtcaacccactgctgtcaattctagcaatgcaccttgtattgctccaatccggaggcccatctgtaaatcaccgctcggtaatcccatgagcaagaagatcccatctgccatagctgtcaagaggattgccattccctccctgaagatcaatgcccagagcaatgtttctgatgcaacttctggtagtaggaactaa

SEQ ID NO: 14075 - DNA, 3135 bp, Oryza sativa
  Clone ID: TFbOSC401847j.C1.o5.fg
atggcgcactgtggtgagttgtgttgtgtgagaggtattgtcacggttcctttccaagaaattccaggcgtgacacgtagctcctccagcacctcccgcagttcccgcagcgctcgcagctccagctccggttccggctcccgttccagtgtcagctccggcgtccgctctctccttctctccagcgtcagccgccaggggtccagccagtggcaacggagatggtcaacatcaggaatggcagccgcgcagccggtgagggcagcaatggcgaagagcacaccgacagtggatatcccaacagcgcctctggcaatgggcaacagggcagtaactgagtacctccatgagttcaatcgccaagcgcgatatgcaccggaggatgtccgcactgacgcggagaagcaggagaagttcctagcaggcctggatgacgagctgaccaaccagttgatctctagggattacgctgacttcgagaagctggtagacaaggcaatccgccaggaggatcagcgcaacaaaatggacaggaagagaaaggcagcgcagttccggtccaaccaaggaagtcaccagcgaccgcgcttcactcccggacagcagggtggacctaccaccatgattgtccaccagtatcgcccgttcaactcaagtagcttccaccaggtcgccagtggcagccagaaccacccgggaggtcagcccaaccgcagtgcagctccgcgcccaccaatggccacagcacaggcagctccatcagtccaagccaagaaggagactggagtaaagccagggtcctgcttcaactgtggcgagcatggccactttgctgacaagtgcccgaagctaaggcgtgctgggccaaggtttgcccaagctcgtgtcaaccacgcgtccgcggaagaggcgcaagcagcactagaggtcgtactggaaatccaaatatcaccatttctagccaacctcgtccttctcgaatccaaagacctagatgtcattcttgggatggattggctgaccaagttcaagggtatcattgattgtgcgaatcgcacggtcaccttgaccaatgagagaggggaaacagtggtgtacaagtcaccagtcgcactgaagcagggaatctccttaaatcagattgaggtggagaattcggtggtcaccgcggagaaaagttcgaggaaattggaagatatccccatagtctgcgagtattcagaggtgttccctgaggacctcactaccatgccacccaagagagagattgaattccggattgatttggcaccggggactgctccaatttacaagagaccgtacagaatggcagccaatgagctggcagaggtcaagaagcaggttgatgagcaactgcagaaagggtacattcgaccaagtacttcaccttggggtgctccggtcatttttgtggagaagaaggacaagacgaagagaatgtgcgtcgattatcgcgcactcaatgaggtcacaatcaagaacaaataccctttgccacggattgatgatctgtttgatcagctgaaaggagccaaggtgttttccaaaatagacctacgatcaggttaccaccagttgaggattcgggaagaggatattcccaagacagctttcaccactcggtatgggttgtatgagtgcacggttatgtcttttggacttaccaatgcacctgcattcttcatgaatctgatgagcaaagtgtttatggagtttcttgacaagtttgtcatggtgttcattgacgacatacttatctattcaaagtccgaagaagaacatgagcaacatctccgtctggtactcgagaagttgaaggagcaccagttatatgccaagttcagtaagtgtgacttctggttgtcggaagtcaaatttctgggtcacgtcattactgctcaaggtgtggcagtggatccatcgaatgtggagtcagttaccaagtggaccccacctaagacagtgtcacagattcggagtttccttggacgtgcgggttattaccgtcggttcattgaaaatttttccaggattgccagacctatgactcagttgcttaagaaagacgagaaattcaagtggacagccgagtgtgacaagggttttgaggagctcaagaagaaattagtgtctgctctagttctgaatttgcccgaccagacgaaagacttccaagtctattgcgacgcgtctcgtcatgggcttggatgcattctaatgagggcagagtggtcgcttatgcctcacggcagttgcgtctgcatgaaggaaactatccaacacatgacctggaattggcagcgaggcacggcctacgctcgtggatcaagtcagagcagctcatgtaaatatcctgagatagctgaactgaaaaagaatatgagggtcggaaaagcccgggatttccacgaagatgaacatggcacaatctggttgggagaaagattgtgcgtacctgatgacaaagagctgaaagatctgatactcaccgaggctcaccagactcagtactccattcatccaggtagtaccaagatgtaccaagatctcaaagagaaattttggtgggccagtatgagaagagaaatcgctgaattcgtcgcactctgcgatgtttgtcagcgagtcaaagcagaacataagaggcccgcaggactgcttcaacctcttcagatcccggaatggaaatgggaagagattgggatggatttcatcacagatggccagaccgagagcgtcaatcagattttggaggatatgttgcgagcctgtgcgcttgattttggaggagcttgggataaaagtctgccttatgcggagttctcctacaacaacaattaccaggctagtctgcaaatggcaccgttcgaagcgttgtatggccggaagtgccgcacacctctcttctgggatcaaacaggcaaacgtcaactgtttggaacagaagtgctaacggaagcagaggagaaagtcagaaccatcagagagaggctgagaattgcacaatctcgacagaagagctacgcagacaaccgccgaagggagctcacttttgaagcaggggattatgtgtaccttcgtgttactccgctccggggagtacaccgtttctag

SEQ ID NO: 14076 - DNA, 4677 bp, Oryza sativa
  Clone ID: TFbOSC418835j.C1.o1.fg
atggccgaccacccacccaaccaccgcgaagaaggcatggacgattttgtggcagagttggctcgcatgaccatggtggtgggctaccacaacgcgccggagtactcgactgttccgccgctcagtggcgagcttccttaccgtgttcgtctggaggttcatggctatgtgggcacctgcctcgctaacatggtggttgaggcatctggaggcacagcagatcacgcctgtcaggaggcagcatatctgatgatggctagacttcgtgagcgccacaactacatcttctgcaacacagcataccgtttccaccctcgccgagcaagtggtggcggtgtcagcaccttccgtccgacagcgggcgagaacgacaccaccttcggtcacatgtgcgccgtgatgaggggaatggacaggatgcactcagatatgcacaaggcgtccaaggccttgaatgatgggaagctcgtgaggatcatagctctgaaggatgagatagcacgcctgaagaaggagaatgctcagttgaagggtctccccattcccggaggagtccggatccgcaccacgccccgcaagtcgatgactgcacccgtgcgcattcagcttgcgcccaggaacccacctccgcccgcagctcccgcagctcctctagttccgcctgcagttcccgcagctcctgcagctccagctccagtcccggctccagtcccagtgtcagctccctgcgtccgctctctccttcgctccagcatcagccgccaggggtccagccagtggcaatggaggttggttgcctgctactcccagtggcagccgcgaccacagcagcagcagttcagtggctcagagtcgggcagtggcgagacgtttgttcgcttgtggatggtcaacaccaggaatggcagccgtgcagtaggtgagggcagcaacggcgaagaacgcaccaacggtgggcatcccaacagcgcctccggcaatggtccgcccccgctccccgagaatccgactcttgcccaagtacggaggtcacttaggcagagttctatcgtagctttaggaaggcgcaggtgcccgacggggtcgtggcacaaaagaagagaattccgggcactccaccagggcaaccgaacggtgactgagtacctccatgagttcaatcgcctagcgcgatatgcaccagaggatgcccgcactgacgcagagaagcaggagaagttcctagcaggcctagatgacgagctgaccaaccagttgatctctggagactacgccgactttgagaagctggttgacaaggcaatccgtaaagaggatcagcgcaacaaaatggacgggaagagaaaggcagcgcagttccggtccaaccaaggaactccatcagcccaagccaaggagactggagcaaagccagggtcgtgtttcaactgtggcgagcatggccactttgctgacaagtgcccgaagccaaggcgtgctaggccaaggttttcccaagctcgtgtcaaccacgcgtctgcagaggaggcgcaagcagcaccagaggtcatactgggtacgtttcctgtcaacttagtccctgctacagtactttttgattctggtgcaacgcattgtttcatttcaaagaaatttgtggggatgcatgggttaagaaaagaagagcttagtacaccaatgagggttcatactccgggaaatagttcaacctcggtcagttatagcccttcagtgctaatagaaatacaccgatcacaatttctagccaacctcatccttctcgaatccaaagacctagatgtcattcttgggatggattggctgaccaagttcaagggagtcattgattgtgcaaatcgcacagtcaccttgaccaatgagaagggagaaaccgtggtgtacaagtcactagtctcaccgaagcagagaatctccttaaatcagattgaggtggaaatccctgtgaccaccgaggagaagagttcacggaaattggaggatatccccatagtctgcgagtatccagaagtgtttcccgaagacctcactagcatgccacccaagagagagattgaattccggattgatttggcaccgggaactgccccaatttacaagagaccgtacagaatggcagccaatgagctagcagaggtcaagaagcaggttgatgagcagctgcaaaaagggtacattcgaccaagtacttcaccttggggtgctccggtcatttttgtggagaagaaggacaagacgaagagaatatgcgtcgattatcgcgcactcaatgaggtcacaatcaagaacaaatattctttgccgcggattgatgatttgtttcatcagctgaaaggagctaaagtgttttctaaaatagacttgcaatcaggctatcaccagttgagaattcgggaagagaatattcccaagacagccttcaccactcggtatgggttgtatgagtgcacggttatgtcttttggacttaccaatgcacccgcattcttcatgaacttgatgaacaaagtgttcatggaatttctggataagtttgtggtggtattcatcgatgacattcttatctattccaaatcggaagaagaacatgagcgacatctctgtctggtactcgagaagttgaaggagcaccagttatatgccaagttcagtaaatgcgacttttggctatcggaggtcaaattcttgggtcacgtcattacagctcagggcgtggcagtcgatccgtcgaatgtggagtcagttaccaagtggaccccacctaagaccgtgtcacagattcggagttttcttggactttgtgacaagagttttgaggagctcaagaagaaattagtatccgccccagttctgattttgcccgaccagacgaaagacttccaagtctattgcgacgcatcccgtcacgggcttggatgtgttctaatgcaagagggcagagtggtcgcttatgcctcgcggcagttgcgtccgcatgaagggaactatccaacacatgacttggaattggcagcggtggttcatgctttgaaaatctggaggcattatctgattggcaaccgctgcaaagtatatacggactacaagagtctgaaatatatcttcacccaacctgatctaaatctccgacagcgaagatggttggagttaatcaaggattacgacatgagcattcactatcacccgggcaaagccaatgtggtggcagatgcattaagtaggaagagctactgcaatgctttgtgcaccgaaggcatgtgtaaggaattgcagcaggagcttgaacacctcaacttggggcttgtagaatacgggtacgtggctgccctagaggcacgacttacgctcgtggatcaagtcggagtagctcaggtaaatgatcctgaaatagcgaagctgaaaaagaatatgagggtcggaaaagcccgggatttccacgaagatgaacatggcacaatctggttgggagaaagatggtgcgtacctgacgacaaggaactaaaggatctgatactcatcgaggctcatcagactcagtactccattcatccaggcagcaccaaaatgtaccaagacctcaaagaaaagttctgctgggtcagcatgagaagggaaatagctgaatttgtcgcactctgcgacgtttgccaacgagtgaaggcagagcaccaaaggccagcagtgcataccacgtatacggggaagaaattggcagagctgtacttggcaaggatcatgtgtctgcatggagtacccaagaagattgtatctgatcgagggagtcagttcacctcaaaattttggcagaagctgcaggaagaattggggacccgtttgaatttcagcacagcctaccatccgcagacagatgaccagaccgaaagggtcaatcagatcttggaagatatgctgcgggcgtgtgcactcgattttggtggagcatgggataaaagtctgccttatgcggaattctcgtacaacaacagttatcaggccagtctacagatggcaccgttcgaagcgttgtttggccggaagtgccgcacacctctcttctgggatcaaacaggcgaacgtcaactgttcggaacagaagtgttaatggaagcagaagagaaagtcagaaccgtcagagagaggctgagagttgcccagtctcaacagaagagctacgcggacaaccgccgaagggagctcacttttgaagcaggggattatgtgtatctccgtgttactccgctccggggagtgcacagtttccagacgaaaggcaagttggcactacgcttcgtgggaccatacaaaatcttggaacgaagaggagaagtcgcctatcagctagaacttccatccaacatgatcggcaaccatgacgtgttccatgtgccccagttaaagaagtgcttgagggtacccgaagaacaagccgattcggagcacattgacatccaagaagatctgacctatgtggagaagccagttcgtatccttgagaccaatgaaaggaggactagaaacaaggtcaccaggttctgcagggttcagtggagccaccactcaaaagaagaagcaacctgggaaagggaaggtgagttaaaagccgcccatccgcacctcttcaccagctcttccgaatctcggggtcgagattccgtttaa

SEQ ID NO: 14077 - DNA, 1209 bp, Oryza sativa
  Clone ID: TFbOSC900205j.C1.o17.fg
atggcgctgacagaccatggtcaaagatttgttagctcaacaaggagtttcaaaggctttgaaggtgtcaaacaggccaagatggaggatgacgattgggaggagatgcagttgcaggcggctgcgacaataaggctatgtctctcagatcaggtcatgtatcatgtgatggagaagacctcaccaaagataatttgggaaaagttggaagctcagtttatgtccaagactctgaccaataagctatatctgaagcagaagttgtatgggctaaagatgcaggaaggggcggatttgacagcacatgtgaacgttttcaatcaactagtcacaaatcttgtgaagatggatgtggaagttgacgatgaagacaaggccatagttcttttgtgttcgttacctgaatcgtatcagcatggggtgactactttgacgtacgacaaggagaccatcaaaactaaagatatcacttctgcattgttggctcgtgatcagatgagaaagaacagagagggtgaaacatctcaagcggagggtttgctagtcaaagaagatcatgctgggcataagataaagaagaacaaaaagaagaagatggtgcagtgcttcagatgtgatgagtgggggcatataagcagggagtgtccaacactgaagggaaaagcaaaggctaatacagtgaattcttcaaatgactcggatagcgatggttgtgatcttctcacaatgtcaagtgcacagtataaggatgcagaagcgtgcatattagattcagctagctcgtttcatgtgacgccaaggaaggagtggttctcttcatacaagtccgatgagtttggttttgtctacttaggcgatgacacaagttatccggccgtgggagtaggtgaagtcaaaatcaagctagaagatggaggtgaacatgttcttcagggagtcaggcatgtaccagggctaaagaggaatctgatttcgcttggaaccttgcatgaagaagggttaatattccgcggtaatcggaataagaacaccatggagatcatgaagggcaagacgactatgatgactggagagaaggtggagtcgcaactttacaagctgcgagggtgcactattgcaggtggagtccaagaggaagcggttgctgggatagcaattgtttttgaagacggcaggtctggtgcagactcgtcgagtggcttgtggtga

SEQ ID NO: 14078 - DNA, 2486 bp, Oryza sativa
  Clone ID: TFbOSC900213j.C1.o8.np
tacggccagtgagaacgacaccaccttcagccacatgtgcgccgtgatgaggggaatggacaggatgcactctgacctgcacaaggcatccaaggccttgaatgatgggaagcttgtgaggatcatagctctgaaggatgagatagcacgcttgaagaaggaaaacgcttagttgaagggtctcccagcgccaggaggagtccagatccgcaccacgcctcgcaagtcaacgaatgcacccgtgcgcattcagcttgcgcccaggaacccacctcctcccgcagctcctccagcacctcccgcagttcccgcagcgcccgcagctccagctccagctcccgcgtccgctctctctttcgctccagcgtcagccgccaggggtccagccagtggcaacagaggttgctcccttcagatggtcaacaccaggaatggcagccgtgtagcaggtgagggcagcaacggcaaagaatgcaccgacggtggatatcctaacagcgcctctggcaacggtccgccaccgctccccgagaacctgactcttgcacaagtgatggcccatcagactcagatgatggcggccatgatgcaacagatgcagcagcagcaccagcagatgcaccagaggatgtagcagcaagccgagcagcagcagcagcagtttggtccccctccccctcagtccaagctgccggagtttctacgcgtcaggccacccaccttctctagcaccaccaaccccatggaggcaaatgactggctccatgacatagagaagaagctcaatcttctgcagtgcaacgatcaggagaaggtcgccttcgccacacaccagctccagggtcccgcgtcagcttggtgggacaaccacatggctacccgcccgccaggcacagaagttacttgggcagagttctgtcgcagcttccggaaggcgcaagtgccagacggggtcgtggcacaaaagaagagagaattccgggcactccatcagggcaacaggacagtaacagagtatctgcatgagttcaatcgcctagcgtgatatgcaccggaggatgtccgcactgacgcagaaaagcaggagaagttcctagcaggcctggatgacgagctgaccaaccagttgatctccggggattacgctgacttcgagaagctgcatcgccctttcaactcaagcagcttccaccagggcgccagtggcagccagaaccacccgggaggtcagcccaaccgcagtgcatctccgcgcccaccaatggccacagcacaggcagctccatcagtccaagccaagaaggagactggagcaaagccagggtcctgcttcaactgtggcgagcatggccactttgctgacaagtgcccgaagccaaggcgtgccgagccaaggtttgcccaagctcgtatcaaccacgcatccgtagaagaggcgcaagcagcaccagaggtcgtactgggtacgtttcctgtcaactcaatttctgcaaaagtacttttagattctggtgcgacgcattcattcatttcaaagaagtttgttggggtacatgggttaataagagaagaacttagtacaccaatgcaggttcatacccccgggaatagctccacctcggttcaattcagcccttctgtaacaatagaaatccaaagatcaccatttctagccaacctcatccttctcgaatccaaagatctagatgtcattcttgggatggattggctgaccaagttcaagggtgtcattgattgtgcgaatcgcacggtcaccttgaccaatgagaaaggggaaacagtggtgtacaagtcaccagtcgcactgaagcagggaatctccttaaatcagattgaggtggaaaatccggtggtcactgaggagaagagttcgaggaaattggaagatatccccatagtctgcgagtatctagaggtgttccttaaggacctcactaccatgccacccaagagagagattgaattccggattgatttggcaccggggactgctccaatttacaagagaccgtacagaatggcagccaacgagctagcagaggtcaagaagcaggttgatgagcaactgcagaaagggtacatttgaccaagtacttcaccttggggtgctccggtcatttttgtggagaagaaggacaagacgaagagaatgtgcgtcgattatcgcgcactcaatgaggtcaccatcaagaacaaataccctttgccgcagattgatgatctgtttgatcagctgaaaggagccagggtgttttccaaaatagacctgtgatcaggctaccatcagttgatgattcgggaagaggatattctcaagacagccttcaccactcggtatgggttgtatgagtgcacggttatgtcttttggacttaccaatacacctgcattcttcatgaacctgatgaacaaagtgttcatggaattttaagacgaatagaagatcatcttcatcgtcgatcgtc

SEQ ID NO: 14079 - DNA, 3339 bp, Oryza sativa
  Clone ID: TFbOSC900247j.C1.o12.fg
atgatcgtccgccagcaccgccctttcaactcgagcagcttccaccagggcgccagtggcagccagaaccaccagggaggtcagcccaactgcagcgcagctccgcgcccaccaacggcaccagcacagtcagctccatcagccgaagccaagaaggagactggaacaaagccagggtcctgcttcaattgtggcgagcatggccactttgctgacaaatgcccgaagcctaggcgtgctgggccaaggtttgtccaggctcatgtcaaccacgcgtccgccgaagaggcgcaaccagcaccagaggttgtactgggtacgtttcctattaactcagtccctgctacagtactttttgattctggcgcaacgcattctttcatttcaaagaagtttgtagggatacatgggttaagaaaagaagagcttagtacaccaatgagggttcataccccgggaaatagttcaaccttggtcagttatagcccttcagtgctcatagaaatacaccgatcacgatttctagccaacctcatccttcttgaatccaaagatctagatgtcatccttgggatggattggatgaccaagttcaagggagttattgattgtgcgaatcgcacagtcaccttgactaatgagaagggagaaaccgtggtgtacaagtcaccagtctcacggaagcaaggaatctccttaaatcagattgaggtggaaaaccctgtagccatcgaggagaagagttcgcggaaattggaagatatctccatagtctgcgagtatccggaagtgttccccgaagacctcactaccatgccacccaagagagagattgaattccggattgatttggcaccggggaccgctccaatttacaagagaccgtacaggatggtagccaacgagctagcagaggtcaagaagcaggttgatgagcaactgcagaaagggtacattcgaccaagtacttcaccttggggtgctccggtcatttttgtgcagaagaaggacaagacgaagagaatgtgtgtcgattatcgcgcactcaatgaggtcacaatcaagaacaaatatcctttaccgcggattgatgatctgttcgaacagctgaaaggagccaaggtgttttccaaaatagacctgcgatcaggctaccaccagttgaggattcgggaagaggatatctccaagacagccttcactactcggtttgggttgtatgagtgcacggttatgtcttttggacttaccaacgcacctgcgttcttcatgaacctgatgaacaaagtgttcatggaatttctggataagtttgttgtggtattcatcgatgacatacttatttattcaaagtctgaagaagaacatgagcaacatctccgtctggtactcgaagagttgaaggagcaacagttatatgccaagttcagcaagtgtgacttttggttgtcggaagacaaatttctgggtcacgtcattacagctcagggcatagcagttgatccagcaaatgtggagtcagttaccaaatggaccccacctaagaccgtgtcacagattcggagttttcttggacttgcgggttattaccgtcggttcattgaaattttctccaggatcgcccgacccatgactcagttgcttaagaaagatgagaaatttaaatggacggccgagtgtgacaagagttttgaggagctcaagaagaaattggtgtctgctccagttctgattctgcccgatcagacgaaagacttccaagtctactgcgatgcgtcccgccacgggcttggatgtgttctaatgcaagagggcagagtggttgcttttgcctcgcgcaaccgctgcgaagtatatacagatcacaagagtctgaaatatatcttcacccaaccagatttgaatctccgacaacgaagatggttggagctaatcaaagattatgacatgagcattcactaccatccgggtaaagccaatgtggtggcagatgcattaagcaggaagagctactgcaatgccctatgcaccgagggcatgtgtaaagaattgcagcaggagcttgaacgtctcaacatgggaatcgtagaacacgggttcgtagccgccctagaagcacggcctacgctcgtggatcaagtcagagcagctcaagtgaatgatcctgagatagctgaactaaaaaagaatatgagggtcagaaaagcccgggacatccttgaggatgaacatggcatgatctggatgggagaaagattgtgcgtgcccgatgataaagagctgaacgatctgatacttactgaggctcatcagactcaatattccattcatccgggtagtaccaagatgtatcaagatctcaaagaaaaattttggtgggccagcatgaaaagggagatagctgaattcgtcgcgctctgcgatgtttgtcagcgagttaaagcagaacatcagaggcccgcaggattgctacaacctcttcaaatcccggaatggaaatgggaagaaattggaatggatttcataacaggtctgcccaggacatcatctggtcacgattcaatctgggtagtcgtggaccgacttaccaaagttgctcatttcattccagtgcatactacttatacgggcaaaagttctcttacaacaacagctatcaggccagtctacatatggcgccgttcaaagcgttgtacggttggaagtgttaacagaagcattgtacggcctctcttctgggatcaaacgggcgaacgtcaactgttcggaacagaagtgttaacggaagcagaagagaaagtcagaaccgtcagagagaggctaagaattgcccagtctcgacagaagagctacgcagacaaccttcgaagggagctcacttttgaagcaggggattacgtgtaccttcgtgttactccgctccggggagtacaccgttttcaaacgaaaggcaagttggcaccacgcttcgtgggaccatacagaatcttggaacgaagaggagaagttgcttatcagctagaacttccatccaatatgatcggtatccatgacgtgttccacgtgtcccagttaaagaagtgtctgagggtacccgaagaacaagccgattcagagcacatcaatatccaagaagatctgacgtatgtagagaagccagttcgtattcttgagaccagtgaaaggagaaccagaaacaaggtcactaggttctgcagggttcagtggagccaccattcagatgaagaagcaaccttggaaagggaagatgagttgaaggccgcccatccgcacctcttcaccagctcctccgaatctcggggccgagattccgtttaa

SEQ ID NO: 14080 - DNA, 2565 bp, Oryza sativa
  Clone ID: TFbOSC900257j.C1.o11.np
ctacgttaagctcttagcatgtcctaattttagtgcggatttttcatgcttgcatcatattttaaaaattgcaaaaaccctatgctgcgcagattctcacaccacacctcaggcttcacccccgcccccagcaggtagcggacagtcccctctcgtggctaggtgaatccggaagcgacagaggccgtcgcagggcccgccctgctccatcacgcccacccttgcctggatgcgtcaaccagagaaaagctacacttcaaggcaggcagttacccattcccgcttgtggcaagcgttgtatgtcttctagtgcatcccgcgaaccggtccttaattgccatgggtgcgaccagcaaaaccatgcacccacaacccgctattcagtcgtattttagttggataattatgaccatgaaacatggccagatgtctcgagcacgtagctcatcataatactaacatgtctaatactgcaattatcccatctactgagctagtggtaattaagcatcgctaagcatatagttctagctaggtcatcaaagtaacataagcgggaggccggcgccgacacgcgggccccgcacgtcagcggcacaaaggggcggcgcacggtggaccaagtccgcacatggcctcgggtgcgcgtccaccacgtggacggcccaaatcggcccgagccgatcgagcggccgaggggagcggcggccaggggcacgggtgcggcacaaagccggcccggcagagccaaggcacggcggcgacggccagcaacagcgtggcgagcggcggcgacggcacgacttgaggtggctaggagcggcgggaggcggcggctggagcacgccgatgagtggtggggagagggagcgccgtggggaggtggtttcggcgacacaatggggaagcggaggggatgccggggtatggcacgacgcggcgaagccgctgatggcggtcgcgcggagcggcggcggcaggagcagcggtggcggccggctggaggatcaccggcgagaggtgcagcggtggcggcgtggttttcgtgcacaggagggctcgggagagaggggaaaatggagagggaggtgcggggaatgtttttataggggaggggaggtcggaccgagcccgggagaggcggagtcggggcggcaaccgccggcggcgtgggcggcatcgtggggtgtgggtggcggttttggaagggagaggtgggggatgaggaggacgtggggcggcggggtcccacggccggcggactcgtgcgcggggtggagaaggagggcggaaacggcagcgtcgtggggaggctcaggcggccatggcggcggttggagccggaggaaggggccggccccacctgtcagcgaagggagagaggaagggacgcaaaaaagactttttgcgagggaggataggagggaggccgagggaggggaaagggaggccggcctagccgggaaagactccttccaagttggcagatgttcagcgaactcatccgccacatttctcctctgcagctgatccactcgcagcagatgattggcttcgtgatattaaaatcaagctaaatctttgccagtgtgatcctgtagagaaggctacattcgctgcatactacctgcaaggagcatcagctgcttggtgggagacatacaagactctcattcctcctgatgagcctaacaattggactgttttctgggaaggattcatatctgctcacatccctcctggtctcatggagatcaaaaagaaagagtttcttaacttgaagcaaggaaacatgaccttcatggagttcatggaacgcttcaactatctgggtagatatgtcgctgctgacatgaacactgaagcaaagaaggttgagctatgcagagatcgtcttgcacctgaactcaaccatgctattactgctcatgaaatcactagcatgaagtcactggttgaaaaagcccttcgtgtcgaatcaagtgagaaggaagtcgttgaagatcgtaagcgcaagtgggctgcaaagaaatttgcaagtggcagcagctccactcggcctcgtcttgctccatctcctgtggttcgtcccatggcgcctcagccaccacggcttcctcgcacagttcaagctgcgggagatgcatctcgtaatgataatgtcgcatgttataattgcggcaagaaggggcattattctcctaactgtccttacccgaagactggaaaatctggaccgcatacacagggagcggacgccgcactcgctggctgccggccaacccatcgctaatcgtccagtccaggggcacagccagcatccggccaaactttcacaatatcagccacgaataagtccatcaaggtaacaaataatgcttcatctatttatttttcaatcaacttcactggttatagacaaaaccaattggatgatgctgacagtgcagcaatgtccagcacgatcctcaacagagctgtatcatctgacaaaagccccactaacgtcacgtggaggcacagactaccacctttctctctctagccctcctcctacggcgactc

SEQ ID NO: 14081 - DNA, 1410 bp, Oryza sativa
  Clone ID: TFbOSC900321j.C1.o7.fg
atggcggaaaatgaccggaagacggggccgggcgtggccgaaggcgactggagagatctgaggggtagcgccatggacggcgcgcccgacgcacgtgccgaagagagagccgaaccaaagcaacaaagcggcagcgatttttgggcggctcggcaggacattggtcaaacatggtacaaggggctcaataggcttgctgtgcagaggctcgtgacaaagtgcgcgcgtatgggtcgaccaagccaggccgacgagatcatgcggagtagaggcacatcgagggtggaagattggtcacatcggattatagcgaacacgactagggtcaaagatttgttagctcaacaaggaggttcaaaggctttgaagggtgtcaaaccggccaagatggaggatgacgattgggaggagatgcagttgcaggcggctgcgacaataaggctatgtctctcagatcagaagttgtatgggctaaagatgcaggaaggggcggatctgacagtacatgtgaacgttttcaatcaactagtcacagatcttgtgaagatggatgtggaagttgacgatgaagacaaggccatagtttttttgtgttctttacctgaatcgtatgagcatgtggtgactactttgacgtacggcaaggagaccatcaaaactaaagatatcacttctgcgttgctggctcgtgatcagatgagaaagaacaaagagggtgaaacatctcaagcggagggtttgctagtcaaagaagatcatgctgggcataaggtaaagaagaacaaaaagaagaagatggtgcagtgcttcagatgtgatgagtgggggcatataagcagggagtgtccaacactgaagggaaaagcaaaggctaatacagtgacttcttcaaatgactcagatagcgatggttgtgatcttctcacgatgtcaagtgcacagtctaaggatgcagaagcgtggatattagattcagctagctcgtttcatgtgacgccaaggaaggagtggttctcttcatacaagtctggtgagtttggttttgtctacttaggcgatgacacaagttatccggccgtgggagtaggtgaagtcaaaatcaagctagaagatggaggtgaacatgttcttcagggagtcaggcatgtaccagggcaaaagaggaatctgatttcgcttgaaaccttgcatgaagaagggttaatattccgcggtaatcggaataggaagaccatggagatcatgaagggcaagatgactgtgatgactggagagaaggtggagtcgcatctttacaagctgcgagggtgcactgttgtaggtggagtccaggaggaagcggttgctgggatagcaattgtttttggtggcggcgggtctggcgcagactcgtcttgcggcttgcggtga

SEQ ID NO: 14082 - DNA, 5291 bp, Oryza sativa
  Clone ID: TFbOSC900337j.C1.o10.np
atggccgatcacccacccaaccaccgcggagaaggcatggatgattttgtggcagagttggctcgcatgaccctagtggtgggctaccccaacgcgccggagtactcgaccgttccaccgctcaatggcgagcttccccaccgtgttcgtctggaggttcatggctatgtgggcacctgcctcgctaatatggtggttgaggcatctgggggcactgcagatcatgcctgctaggaggcagcatatctgatgatggccagacttcgtgagcgccacaactacatcttctgcaacacggcataccatttccaccctcgtcgagcaagtggtgacgatgtcaacaccttccgcccgacagccggcgagaacgacaccaccttcggccacatgtgcgccgtgatgaggggaatggacaggatgcactcggatctgcacaaggcatccaaggccttgaatgacaggaagctcgtgaggatcatagctttaaaggatgagatagcgcgcctgaagaaggagaacgcttagttgaagggtctctctgcgctaggaggagttcggatccgcaccacgccccgcaagtctacgactgctcccgtgcgcattcagcttgcgcccaggaacccacctcctcctgcagctcctcccgcagctcctcctgcagttcctgtagcgcccgtgtcagctcccgcgtctgctctctccttcgctccagcgtcagccgccaggggtctagccagtggcagccacgaccgcagcagtagcatggtcaacaccaggaatggcagccgtgcagcaggtgaggacagcaacagcgaagaacgcaccgatggtggacaccccaacagcgcctctggcaacggtccgccactgctccccgagaacccgacgctcgcacaagtgatgacccatcagactcagatgatggcagccatgatgcagcagcagcaccagcagatgcaccagaggatgcagcagcaaaccgagcagcagcagcagtagcagtttggtccccctctcccccagttcaagctgccggagtttctacgtgtcaggctacccaccttctctagcaccaccaaccccatggaggcgaatgactagctccatgccatagagaagaagctcaatctcctgcagtgcaatgatcaggagaaggttgccttcgccacacaccagctccagggtcccacgtcagcttggtgggacaaccacatggctacccgttcgctaggcacagaagtcacttgggcggagttctgtcgcagcttcaggaaggcgcaggtgcctgacggggtggtggtacaaaagaagagggaattccgggcactccaccagggcaacaggacagtgactgagtatctctatgagttcaatcgtctagcgcgatatgcaccggaggatgtccgcactgacgcagagaagcaggagaagttcctagcaggcctggatgacgagctgaccaaccagttgatctctggagactacgccgactttgagaagctggttgacaaggcaatccatcaggaggatcagcgcaacaaaatggacaggaagagaaaggcagcgcagttccggtccaaccaaggaagccaccagcgaccacgcttctttcctggacagcagggtggacctaccaccatgatcgtccgccagcatcgccctttcaactcaagcagcttccaccagggagccaatggcagccagaaccaccagggaggtcagcccaaccgcagtgcagctccgcgcccaccaatggcaccagcatagtcagctccatcagcccaagccaagaaggagactggaacaaagccagggtcctgcttcaactgtggtgagcatggccactttgctgacaaatgcccgaagccaaggcgtgccgggccaaggtttgtccaggctcgtgtcaacaacgcaacagtactttttgattctgcaccagaggtcgtactgggtacgtttcctgttaactcaatccctgcaacagtacttttcgattctggtgcaacacattcgttcatttcaaagaagtttgttgggatacatgggttaataagagaagaacttagtacaccaatgcgggttcataccccagggaatagctccacttcggttcaattcagcccttctataagaatagaaatccaaagatcaccatttctagccaacctcattcttctcgaatccaaagacctagatgtcattcttgggatggattggttgaccaagttcaagggtgtcattgattgtgcgaatcgcacagtcaccttgaccagcgagaagggagaaacattagtgtacaaatcaccagtctcaccaaagcagggggcctccttgaatcagattgaggtggaaattccagcggtcaccgaggagaagagttcgaggaaattggaagatatccccatagtctgcgagtatcccgaagtgttccccgaggacctcactactatgccacccaagagggagattgaattccggattgatttgacaccgagaactgctccaatttaaaagagaccgtacagaatggcagccaatgagctagcagaggtcaagaagcaggttgatgagcagctgcagaaagggtacattcgaccgagtacttcaccttggggtgctccggtcatttttgtggaggagaaggacaagacgaagaggatgtgtgtcgattatcgcgcactcaatgaggtcaccatcaagaacaaatacctgttgccgcggattgatgatctgttcgatcagctgaaaggagccaaggtgttttccaaaatagacctgcgatcaggctaccaccagttgaggattcaggaagagaatattcccaagacagccttcaccactcggtatgggttgtatgagtgcacggttatgtcttttggacttaccaatgcacctgcattcttcatgaacctgatgaacaaagtgttcatggaatttctggataagtttgttgtggtattcatcgacgacatacttatctattcaaagtctgaagaagaacatgagaagttgaaggagcaccagttatatgccaagttcagcaagtgtgacttctagttgtcggaagtcaaatttctgggtcacgtcattacagctcagggcgtggcagtcaatccattgaatgtggagtcagttaccaaatggaccccacctaagaccgtgtcacagattcggagttttcttggacttgcgggttattactgtcggttcattgaaaatttctccaggattgccagacctatgactcagttgcttaagaaagacgagaaatttaaatggacggccgagtgcgacaagagttttgaggaactcaaggagagattagtgtctgctccagttctgattttgcccgaccaaacaaaggacttccaagtctactgcaacacgtcccgccacgggcctggatgtgttctaatgcaagagggcagagtggtcgtttatgcctcgtggcagttgtgtccacatgaagggaactatccaacacatgacctggaattggcagcagtggttcatgatttgaaaatatggaggcgctatctgattggcaaccgctgcgaagtttatacggatcacaagagtctgaaatatatcttcacccaacctgatctaaatctccgacagcgaagatggttggagctaatcaaagattatgacatgagcattcactaccatccgggcaaagccaatgtggtggcagatgctttaagcaggacaagctactgcaatgctttgtgcaccgagggcatgtgtaaggaattgcagcaagagcttgaacacttcaacttggaacttgttgaacacgggtacgtggccgccctagaggcacgacctacgctcgtggatcaagtcagagcagcccaagtaaatgatcctgagatagctgaactgaaaaagaatacgagggtcggaaaagcccgagacttccttgaggatgaacatggcacaatctggatgggagaaagattgtgcgtgcctgatgacaaagagctaaaagatcttatactcactgaggctcatcagactcaatactccattcatccgggtagtaccaagatgtatcaagatctcaaagaaaaattttagtgagccagcatgaggagggaaatagctgaattcgtcgcgctctgcgatgtttgtcagctagttaaggcagaacatcagaggctcgtaggattgttacaacctcttcagatcccggaatggaaatgggaagaaattggaatggatttcataacaggtctgcccaggacatcatctggccacaattcaatctgggtagtcgtggatcgacttaccaaagttgctcatttcattccagtgcataccacttatacgggcaaaaggttggcagagctctatctctcgagaatcatgtgtctgcatggagtacccaaaaagatagatctgatcgagggagccaattcacttcaaatttctggcagaaattgcaagaggaattgggaacccggctgaacttcagcacaacctaccatccgcagaccgatggtcagaccgagcgggtcaatcaaatattggaggatatgttaaaggcttgtgcgcttgattttggtggagcatgggacaaaaacttgccgtatgtggagttctcctacaacaacagttaccaggctagtttgcaaatggcaccgttcgaagcgttgtatggccggaagtgccgcacacctctcttctgggatcaaaccggcgaacgtcaactgttcggaacagaagtgctaactgaagcagaggagaaagtcagaaccgtcagagaaaggctgagaattgcacagtctcgatagaaaagctacacagaaaaccgccgaagagagctcacttttgaagcaggggattacgtgtaccttcgtgttactccgctccggggagtacaccgtttccaatcgaaaggcaagttggcaccacgcttcgtaggaccatacaaaatcttggaacgaagaggagaagttgcttatcagctagaacttccatccaacatgatcggtatccatgacgtgttccacgtgtcccagttaaagaagtgtttgagggtacccgaagaacaagccgactcggagcacatcgatatccaagaagatctgacttatgtggagaagccagttcgcatccttgagaccagtgaaagaaggactagaaataaggtcaccaggttctgcagggttcagtggagccaccattcagaggaagaaacaacctgggaaagggaagatgagttgaaggccgcccatccgcacctcttcgccagctcttccgaatctcggggtcgagattccgtt

SEQ ID NO: 14083 - DNA, 2565 bp, Oryza sativa
  Clone ID: TFbOSC900388j.C1.o21.gm
atggctacccgtccgccaggtacggaggtcacttgggcggagttctgtcgcagcttcaggaaggcgcaggtgccagacggggttgtggcacaaaagaagagagaattccgcgcactccaccagggcaacaggacagtaaccgagtacctgcatgagttcaatcgcctagtgcgatacgcaccagaggatgtccgcactaacgcagagaaacaggagaagttcctagtgggcctggataacgagcttaccaaccagctgatttctagagactacgccgactttgagaagctgggtggacctaccactatgattgtccgccagcatcgtcctttcaactcaagcagcttccaccagggcgccagtggtagccagaaccacccgggaggtcagcccaaccgcagtgcagctccgcgcccaccaatggcaccaacacaatcagctccatcagcccaagccaaggagactagggcaaagccagggtcctgcttcaactgtggcgagcatggccactttgctgacaagtgcccgaagcccaggcgtgccgggccaaggtttgcccaagcccgtgttaaccacgcgtccgcagaagaggcgcaagcagcaccagaggtcgtactggtcaccttgaccaatgagaaggtagaagcagtggtgtacaagtcaccagtctcactgaagcaggggatctccttaaatcagattgaggtggaaaatccggtggccaccgaggagaagagttcgaggaaattggaagatatccccatagtatgtaagtatccagaggtgttccctaaggacctcactaccatgccaaccaagagagagattgaattccggattgatttggcaccggggactgctccaatttacaagagaccgtacagaatggcagccaatgagctagcagaggtcaagaagaaggttgatgagcaactgcagaaagggtacattcgaccaagtacttcaccttggggtgctccggtcatttttgtggagaagaaggacaagacgaagagaatgtgtgtcgattatcgcgcactcaatgaggtcacaatcaagaacaaatatcctttgccgcggattgatgatctatttgatcagctgaaaggagccaaggtgttttccaaaatagacctgcgatcaggctatcaccagttgagaattcgggaagaggatattcccaagatagccttcaccactcggtatgggttgtatgagtgcacggttatgtcttttggactcaccaatgcacctacattcttcatgaacctgatgaacaaagtgttcatggaatttttggataagtttgttgtggtattcattgatgacattctaatctattccaagtcggaagaagagcatgagcaacatcttcgtctggtactcgagaagttgcaggagcaccagctttatgccaagttcagcaaaggcgacttttggttatcagaggtcaaattcttgggtcacgtcattacagctcagggcgtggcagtcgatccatcgaatgtggagtcagtcaccaagtggacaccgcctaagacagtgtcacagattcggagtttccttggacttgcggagctgaaaaagaatatgagggtcggaaaagcccgggatttccatgaagatgaacacggcacaatctggttgggagaaagattgtgcgtacctgatgacaaggaactaaaggatctgatactcaccgaggctcaccagactcagtactccattcacccaggcagtaccaaaatgtaccaagacctcaaagaaaagttttggagggctagtatgaggagagaaatagctgaatttgtcgcactctgcgatgtttgccagcgagttaagaaaagctacgcggacaaccgccgaagggagttcacttttgaagcaggggattatgtgtacctccgtgtcaccccgctccggggagtgcaccgtttccagacgaaaggcaagttggcaccacgcttcctagggccatacaaaatcttggaacgaagaggagaagttgcctatcagctagaacttccatccaacatgatcggtatccatgacgtgttccatgtgtcccagttaatgaagtgcttgaggtcatccctcgccgccgctcgtcgtcgatcgccgccgctctccgccgttggccgctcgccgccttgcgtcaccgtcgcgtcgcgctgcgccgccgcgcgccactgccgccgggtcggcttgggccctgctcgtgcgcgcccggccgcgagccgcctccgccgtccgatctaccgggcggtagatcggggccgttcaaccccgccgcccacgtggctgccacgtggccgccacgtgtgcgccgcgtcggcgccacgtgtgcaccacgtggtgcgccgctcctccccgcatgatcctgcagagacgaagggatacaaggtcggcttccttgatctcaatcatgatcctgcagagacgaagggatacaaggtcggcttccttgatctcaataattgcctccattggtgttgtcgattggtgcgccacctcctgctcctggcgcaccaacccctgccgctccgggtgcgccaccaccagtag

SEQ ID NO: 14084 - DNA, 769 bp, Oryza sativa
  Clone ID: TFbOSC100133j.C1.o1.gm
gctatgcagccggagggacagcctgttacttgggcccgcttcaccgccgctttccggagaacccatgtgcccgccggagtcgtggcccttaagaaaagagaattccgagagttgaagcaaggcaaccgctccgtgatggagtatttgcacgagttcaacaacctggcccgttacactccggaggatgtgcggaaagatgaggagaagcaagaaaagttcctggcaggaatggaccctgagctgtccgtccgtctagtctctggggactatccggatttccaacgtctggtggacaagagcatccgcttggaagccaagcacaaggaactggagtcgcacaagcgccgcttggcgaatttccgcaaccaacagggtgctaaccaaagggtccgctacaccaatccctatccagggggatcctcctcgcagcagcaacaacagcagcagcaacctcgctccgcgcctcgacctcaattcgtggtgcgcgtcccacagccgcagcagcaacagaatcaacaagggactcgagcgccccgtcctcctacgccaactgtgcagcctggtcaaggccgcagggacgcttcaggtccgcagcgtctgtgcttcaactgcttcgagccggggcactttgcggataaatgcccgaagccaaggcgtcagcaaggccaagcgcctccccgccccaacaacggtggtaaggacgtcagtcggggtcgtgtgaaccatgtgacggccgaggacgtgctgacaactccagacgtcatcgttg

SEQ ID NO: 14085 - DNA, 5214 bp, Oryza sativa
  Clone ID: TFbOSC100292j.C1.o6.fg
atgtcatggcacagggccggtgtcctgctgctaggggctcagtcctgcctgcctgtcccaggggttccggccgtaggtgggattgggtcagtactcttgtctatggctaggatgggttggaaactatgtcacgtctttcgtctatataccgtggtgatggccggcagcgtcacccgtcgtggtttggacatgactggtttcgtcttggagctgcggggcatgtgcgttgtcctggggtatccacatggggtggactaccagggcaggccgcttccggagcaggagggtgacgatgcagagccccacgctgcttgggaggtcactgcagtgatcctcgctggctctcccgagcggacttcgttggcagtcaccgcgggtggagattctttccccgccacttgccagagcgccgctctcctcgccatcggcactcttcaccagcgctacccggacgagttgcagcactcgcccttccgctaccaccctcgccgcggaggagcccgcgactacgccaccttccgggatgctagctcggaggatgacgctaccatcatgcacctggcgcgcatggtggaggcgtacgacgcggctcgtatcgacttccatcagatggtgcgccgtgggatggtcgagaacaacatgaagatcctggagctgcgtcaggagaacctgcagctcaagaaggacctagacgcggtggaggcgcagctgcatcagctcaagatcgcccagggagaggtctgccgccccaagcgtcgccgcgtctgccgcagccagaagatcaccgcccgcaagagcacctccaggcccgagcttgttcgtcagtccctagcgtggacttgcttcgtcgagacccctcgtgccgagcccgcgcccgtggttccccaggagggggaagcctccggcgttggtagcacggaggatgcgctgttgctcaccttccgtcctggcccgtcgcagcggagaagtgctgccaccggtgatggcaaccaacccgaaggcagcaaccaccaccaccagggcagcccacctccacctcctcctccgcctccaccaccaccaccagacaccaacgccattctcagccaaatcctcgcccagcaggccaacatgatgactgctttcctccaccacctccaaaatccgccacaacataatgctccaccaccacctccccaacactctaaactcgccgagttcctccgcatccgcccacctaccttctctagctccaacaaccccgtggatgcgttggattggttgcatgccgtggggaaaaagctagacactgtgcagtgcagcgatgaggagaaagtcatcttcgccgcccaccagctgcaggggcccgcatctttatggtgggaccatttccaggctacgcagccagaggggcaacctattacttgggctcgcttcactgccgctttccggagaacccatgtgcccgccggagtcatggcccttaagaaaagggaattccgagagttgaagcaaggcaaccgctccgtgatggagtatttgcatgagttcaacaacctggcccgttacgccccggaggatgtgcgggaagatgaggagaagcaagagaagttcttggcaggaatggaccctgagctgtccgtccgtctagtctccggggactatccggatttccaacgtctggtggacaagagcatccgcttggaagccaagcacaaggaactggagtcgcacaagtgccgcttggcgaatttccgcaatcaacagggtgctaaccaaagggtccgctacaccaatccctatccagggggatcctcctcgcagcagcaacaacagcagcagcaacctcgctccgcgcctcgacctcaattcgtggtgcgcgtcccacagccgcagcagcagcagaatcaacaagggactcgtgcgccccgtcctcctacgccaactgtgcagcctggtcaaggccgcagggacgctcaaggtccgcagcgtctgtgcttcaactgcttcgagcccgggcactttgcggataaatgcccaaagccgaggcgtcagcaaggccaagcgcctccccgctccaacaacggtgggaaggatgtcattcggggtcgggtgaaccacgtgacggccgaggacgtgctgacaactccagacgtcatcgttggtacgttcctcattcattccatccctgctaccattctgttcgactctggagcttcccactcgtttatatctgtgccattcgtggggagaaatcagttgggggtagaaaggcttaggaaccctgtgctcatcaccacccctggaggggttatgacagcaaagtattatagccctgccgtccccatagaaattcaggggattccttttccctcggatctgattctgctagacaccaagaacttggatgtgatccttgggatgaattggttggctcaattccaaggagtagtggattgtgcgagacgcactgtcactctgtaccgagggccggaacaaccggttgttttctttgcacccccaacctctgtcagtagttccgaacttcatcagataggactgtcagaaatccccatcgtcagagagttcggagacgtgtttccggaagaactacccggtatgccgcccaaacgagagattaagttccggatagatcttgctccaggaaccactcctctgtacaagcgaccctaccgtatggcagcaaatgaactggctgaagttaacaaacagttagaagagttagctctcaatgaagtcaccatcaaaaacaagtaccctcttccccggatcgatgatctgttcgatcagcttaaaggtgccactgtattctccaagatcgatcttcgttccggatatcaccaattacgtattcgtgatgaagatattccgaagaccgcattcaccacgcgatacggactgtatgaattcacggtgatgtcgttcgaggaagaccatcagcaccatctccgtctggtattgggaaagttgcgggaacatcaattgtatgccaaacttagcaagtgtgagttctggttgtccgaagtcaaattcttagggcacgtgatatctgctaaaggagttgctgtggaccccgaaacagtgaccgccgtcactgattggaagcaacccaagacagtcactcaagtccgcagtttcttaggtttggcaggatactaccggaggttcatcgagaacttctccaaaatcgctcgacccatgacacagttgttgaagaaagaagagaaatttgtgtggagcccgcaatgcgagaaggcgttcaaaactctcaaagaaaggctggtttcctcgccagtgttaatcttgccggatactcgcaaggacttcatggtgtattgtgacgcttcgcgccaaggattggggtgcgtgctcatgcaggatggtcatgtggtggcctatgcctcacgccagctacggcctcatgaaggcaactaccctacccatgatttggagttagctgcggtggttcatgctctaaaaatctggtggcactatctcattgggaatcgctgtgaaatatatactgatcataagagtttgaaatacatcttcactcagtcggacctgaatcttcggcaaaggagatggttagaactcatcaaggattacgatgtgggaattcactatcatcctggtaaggccaacgtggtcgctgacgccctaagtcgaaagagccattgcaacactcttaacgtccgcggcattccacccgaacttaatcaacagatggaagccctgaacctaagcatagttggtcgcggattcttggctgcgttggaagccaagcttaccttgctcgatcgaatccgcgaggctcagaagaacgatccggacatgcatggactcctcaagaatatgaaacagggtaaagccgttggtttcacagaggatgaacacggaaccctatggaacggaaatcgagtatgcgttccagataacagagaacttaaacagctgatatttcaggaagcccacgaaagtccttattccatccaccctggcagtacgaagatgtacttagacttgaaggagaaatactggtgggttagtatgaagcgggaaattgcagagttcgtggccctttgtgatgtgtgccagcgtgtcaaggcagagcaccaacgaccggccggacttctccaacctctccaagtacctgaatggaaatgggatgaaattgggatggattttatcaccggacttccaaagacccaaggtggatatgattctatatgggtagtggtggatcgattaaccaaggtagctcgattcattcctgtgaagaccacctatggagggaacaaactagccgagctctacttcgctaggatcgtgagtctccatggcgttcccaagaaaatcgtatctgataggggaagccaattcacctctcacttttggaagaagctccaagaagagctgggtacccgattaaacttcagcaccgcataccacccgcagacagatgggcagaccgagcgtctaaatcagatccaagaagatatgcttcgcgcatgtgtcctggatttcgggaagacctgggataagagtctcccctatgccgagttctcctacaataacagctatcaagccagcatacaaatggcaccttatgaagcgttgtatgggcgcaaatgccggacaccgctcttgtgggatcaagttggggaaagccaagtattcgggactgatatcctgagagaagctgaagctaaagtcagaaccattcgggataatctaaaggtggcacagtcccggcagaaagttatgcagataaccgacgccgtaacctggaattcgcagtggacgattttgtgtaccttcgggtcacgccattgcggggtgtacacaggtttcagacaaaagggaagctcgcacctcgaagtcgcttaccaattggagctgcccgcctccttgggcaacatgcatgatgtgttccatgtgtcgcaactcaagaaatgccttcgagtgccatccgagcaggccgactcagagcaaattgaagttcgcgaagacttgacctacgtggagaggccagtgaaaatcctggacaccatggagcgcaggaccaggaaccgggtaatccgtttttgcaaggtccagtggagcaaccacgccgaagaagaagctacctgggagcgtgaagacgagctgaaggcagcccatcctgatctcttcgccagttcttccgaatcttggggtcgagattccgtttaa

SEQ ID NO: 14086 - DNA, 4599 bp, Oryza sativa
  Clone ID: TFbOSC100644j.C1.o4.fg
atgtcatggcacagggctggtgtcctgctgctaggggctcagtcttgcctacctatcctggaggttccggccgtaggtagggttgggtcggtactcttgtctatggctaggatgggttggaaactatgtcacgtcttccgtccgtataccgtggtgatggccggcagcctcaaccgtcgtggcctggacctgactggcttcgttttggagctgcggggcatgtgcgttgtcctggggtatccgcatggagtggactaccagggcaagcagctcccggagcaggagggtgacgatgcagagccccacgctgcttgggaggtcactgcagtgatcctcactggctcacccgagaggacttcgttggcagtcaccgcgggtggagattctttctccgccgcttgccagaacgccgcactccttgccatcggcactcttcaccagcgctacccggacgagttgcagcactcgccctaccgctaccacccttgtcgaggaggagcccgcgactacgccaccttcagggatgctagctcggaggatgatgctaccatcatgcatctggcgcgcatggtggaggcgtacaacgcggcccgtatcgacttccatcgtatgctgaagaaggacttggacgcggtggaggcgcagctgtgtcagctcaagatcgcccagggagagatggtgacaaccaggagaagcgcggttaccggcgaaggcaatcaccccgaaggcagcaaccacagcaaccatggcagcccacctccacctcctcccccgccaccaccaccaccacctgacaccaaccccatcctcacccaaatcctcgcccagcaggccaacatgatggctgctttcctccaccacatccaaaatccgccacagcataatgctccacctccaccaccacccccgcaacattctaaactcgccgagttcctccgcatccgcccgcctaccttctctagctccaataaccccgtggatgccttggattggttgcatgccgcggggaaaaagttagacaccgtgcagtgcaacgatgaggagaaagtcatctttgccacccaccagctgcaggggcccgcatctctatggacccatgtgcccgccggagtcatggcccttaagaagagggaattccgggagttaaagcaaggcaaccactctgtgatggagtatttgcatgagtttaacagcctggcccggtacgccccagaggatgtttgggaagatgaggagaagcaggagaaattcctggcagggatggaccctgagctgtctgtgcgtctggtctccggggattatccggatttccagcgtctggtggacaacagcattcgcctggaagccaagcacaaggaactggagtcgcacaagcgtcgcttggcaaatttccgcaatcaacagggggctaaccaaatgatccgatacaccaatccctatccagggggatcctcctcgcagcagcagcagcaaccacgctccgcgccccgacctcaattcgtggtgcgtgtcccacagtcgcagcaacagcagagtcagcaaggtacccgtgcgccccgtcctcctgcgccagccgtgcagcttggacaaggccgcagggatgctcaaggtcaacaacgtctgtgcttcaactgcttcgagcccgggcactttgcggataaatgcccaaagccgaggcgccagcaaggccaagcgcctccccgacccaacaacggtggtaaggatgtcactcggggtcgtgtgaaccacgtgactgccgaggatgtgctgacaactccagacgtcatcgttgacaccaagaacttggatgtgatcctcgggatgaattggttggctcaattccaaggagtagtggatcgcgcaagacgcactgtcactctgtatcgggggcctgatcaaccagttgttttctttgcacccccaacttccgccggcagttcagtacttaatcagctaggattgccagaaatacccatcgtcagtgagttcggtgacgtgtttccggaagaactacccagtatgccgccccagcgagagattgagttccagatagatcttgctccagggaccactcctctatacaagcgaccctaccgtatggcagcacatgaactggccgaagtcaagaaacagttggaagagttgaaagaaaaggggtatatacggccgagcacttccccctggggttctcccgtgatttttgtggagaagaaagacaagacaaagaggatatgcgttgactacagagctctcaatgaagttactatcaaaaacaagtacgctcttccccggattgatgacctgttcgatcagcttaaaggtgccactgtattctccaagatcgatcttcgctccggatatcaccaattgcgtattcgtgaagaagatatcccgaagaccgcgttcaccacgcattatggactgtatgaattcacggtgatgtcgttcggtctaaccaatgcgcctgccttcttcatgaacttaatgaacaaagtgttcatggaatacttggataagtttgttgtggttttcattgacgacatcctggtgtacttacaatcagaggaagaccatcagcagcacctccgtctggcattgggaaagttgcgggaacatccattgtatgccaagcttagcaagtgtgagttctggttgtccgaagtcaagttcttagggcacgtgatatctgctaaaggagttgctgtggatcccgaaacggtgactgccgtcactgattggaagcaacccaagacagtcactcaggttcgcagctttttgggtttggcaggatactaccgaagattcatcgagaatttctccaaaattgctagacccatgacgcagttgctgaagaaggaagaaaaatttgtatggagcccgcaatgcgagaaagcattccaaactctcaaagaaaagctagtttcctcgccagtgttaatcttactggatactcgcaaggacttcctggtgtactgtgacgcttcgcgccaaggattggggtgcgtgttaatgcaggaaggtcatgtggtagcctatgcctcacgccagccacggccccatgaaggcaactaccctacccatgatttggagttggccgctgtgagaaggtggttagagctcattaaggattatgatgtgggaatccattatcaccctggtaaggccaacgtggtcgcagacgcgctgagtcgaaaaagcagttgcaacactcttggcgtccgtggcattccaccggagcttaatcaacagttggaagccctgaacctaagcatcgttagccatggattcttggctacattggaagccaagcctaccttgctcgatcaaatccgcgaggcccagaagaatgatctagatatgcatgggatactcaagaatatgaaacagggtaaagccgctggtttcacagaagatgaacacggaaccctatggaacggaaatcgttgtgtcaaggcagagcaccaacgaccggccagacttctccaacctctccaagtaccagaatggaaatgggatgaaattgggatggatttcatcaccggacttccaaaaacccaaggcagatatgattctatatgggtagtcgtggaccgactaaccaaggtagctcggtttattcctgtgaagaccacctatggagggaacaaattagctgaactctacttcgctaggatcgtgagtctccatggcgttcctaagaaaattgtatctgatcagggaagccaattcacttctgacatctggaagaagctccaagaagagttgggtacccgattaaattttagcaccgcgtatcacccgcagacagatgggcagaccgagcgtctaaatcagatcctagaagatatgctccatgcatgtgttctagattttgggaagacctgggataagagtctcccctatgccgagttctcctacaataacagctaccaagccagcatacaaatggcaccttatgaagcgttgtatggccgcaaatgccagacaccactattgtgggaccaagttggggaaagccaagtgttcgggactgatatcctgagagaagctgaagctaaagtcagaaccattcgggataatctaaaggtggcacagtcccggcagaagagttatgcagatacccgacgccgtaacctggaattcgcagtggacgattttgtgtaccttcgggtcacgccattgcgaggagtacacaggtttcagatgaaagggaagctcgcacctcggtttgtgggtcctttccgcatcattgctcgacgcggagaagtagcttatcaattggagctgcccacatccttgggcaacgtgcatgatgtgttccatgtgtcgcaactcaagaaatgtcttcgagtgccgtccgagcaggccgattcagagcaaattgaagttcacgaagacttgacctacgtggagagaccagtgaaaatcctggacaccatggagcacaggaccaggaatcgggtaatccgtttttgcaaggtccaatggagcaaccacgccgaggaagaagctacttcggaacgtgaagacgagctgaaggcagcccatctagatctcttcgccagttcttccgaatctcgtggtcgagattccgtttaa

SEQ ID NO: 14087 - DNA, 7002 bp, Oryza sativa
  Clone ID: TFbOSC101104j.C1.o16.fg
atggccggcagcgttacccgtcgtggtttggacatgaccggcttcgtcttggagctgcgaggcatgtgcgtggtcttggaatatccacatggagtggattaccaggccaggccgctcccggagcaggagggtgaggatgcagagcctcacgctggttgggaggtcactgcagtgatcctctccggctctcccgagcggacttcgctggcagtcacagcgggtggggactccttccccgccgcttgccagaacgccgctctcctcgccatcggcacccttcaccagcgctacccggacgagttgcagcactcgtcctaccgctaccaccctcgtcgcggaggagcccgcgacttcgccaccttccgagacgccagctcggaggatgacgctaccgtcgtgcatctggcacgcatggtggaggcgtacgacgcggctcgtatcgacttccaccagatggtgcgtcgtggcatggtggagaacaacatgaagatcctggagctgcgtcaggagaatctgcagctcaagaaggacctcgacgcgttggaggcgcagctgcaccagctcaagatcgcccagggagagatcagccgtcccaagcgtcgccgcgtctgccgcagccagaagatcaccgcccgcaagagcacctccaggcccgagcttgttcgtcagtccctggcgtggacctgcttcgtcgagacccctcgtgccgagcctgcgcccgtggttccccaggagggggaagcctccggcgttggtagctcggagggtgcgctgttgctcaccttccgtcctggcccgtcgcagcggagaaatgttaacaccggtgaaggcaaccaacccgagggcagcaaccccaacccccaaggcaatccacctccaccaccaccaccagacaccaacgccattctcacccagatcctcgcccaacaagccaacatgatgaatgctttcctccaccacctccaaaacccgccacaacagaatgctccaccaccacctccccaacactccaaactcgccgagttcctccgcatccgcccacctaccttctctagctccaacaaccccgtggatgcgttggattggttgcatgccgtggggaagaagctagacacggtgcagtgcagtgatgaagagaaagtcatcttcgccgcccaccagctgcaggggcccgcatctatctggtgggaccacttccaggctacgcagccagcgggacaaccgatcacttgggctcgcttcacctccgctttccggagaacccattatttgcacgagttcaacaatctggcccggtacgctccggaggatgtgcgggaagatgaggagaagcaagagaagttcttggcaggaatggaccctgagctgtccgttcgtctagtctctggggactatcctgacttccaacgactggtggacaagagcatccgcttggaagccaagcacaaggagctggaatcgcacaagcgccgcttggcgaatttccgcaatcaacagggtgctaaccagagggttcgctacaccaatccctacccagggggatcctcctcgcagcagcagcagcagcagcagcaacctcgctccgcgcctcgacctcaattcgtggtgcgcgtcccacagccgcagcagcagcagaatcagcaagggactcgtgcaccccgtcctcctacgccagccgtgcagcccgttcaaggccgcagggacgctcaaggtcagcagcgtctgtgcttcaactgtttcgagcccgggcactttgcggataaatgcccgaagccaaggcgtcagcaaggccaagcgcctccccgctccaacaacggcgggaaggatgtcattcgaggtcgtgtgaatcacgtgacggccgaggacgtgctgacaactccagacgtcatcgttggtacgttcctcgtccaatccatccctgctactattttgttcgactctggagcttcccactcgttcatatctgtgccattcgtggggagaaatcagttgggggtagaaaggcttagaaaccctctgctcatcaccacccctggcggggttatgacagcaaagtattatagccctgccgttcctatagaaatccaggggattccttttccctcggatctgattctgctagacacaaagaacttggatgtgatccttgggatgaattggttggctcaattccaaggagtagtggactgcgcgagacgcactgttactctgtaccgaggaccagaacaaccggttgttttctttgcacccccaacctctgtcagaagttcagaactgcatcagatagaactgtcagaaatccccatagtcagagagttcggagacgtgtttccggaagaactacctggtatgccgcccaagcgagagattgagttccggatagatcttgctccaggaaccactcctctgtacaagcgaccctaccgtatggcagcaaatgaactggccgaagtaaagaaacagttggaagagttgaaagaaaaggggtacatacgtccgagtacttccccatggggtgctcctgtgatttttgtggagaagaaagacaagacgaaaaggatgtgcgtcgactacagagctctcaatgaagtcaccatcaaaaacaagtaccctcttccccggatcgatgatctgttcgatcagcttaaaggtgccaccgtattctccaagattgatctccgttccggatatcaccaattacgtattcgtgaagaagatattccgaagaccgcattcactacgcgatatggactgtatgaattcacggtgatgtcgttcggcttaaccaatgctcctgccttcttcatgaacttgatgaacaaagtgttcatggaatacttggataaattcgttgtggttttcatcgatgacattctgatatactcacaatcagaggaagaccatcagcaccatctccgtctggtgttgggaaagttgcgggaacatcaattgtatgccaagcttagcaagtgtgagttctggttgtccgaagtcaaattcttggggcacgtgatatctgctaaaggagttgctgtggaccccgaaacagtgaccgccgtcaccgattggaagcaacccaagacagtcactcagattcgcagtttcttaggtttggcaggatactatcggagattcatcgagaacttctccaaaatcgctcgacccatgacacagttgttgaagaaagaagaaaagtttgtgtggagcccgcaatgcgagaaggcgttccaaactctcaaagaaaagctggtttcctcgccagtgttaatcttgccggatactcgcaaggatttcatggtgtactgtgatgcttcgcgccaaggattggggtgcgtgctcatgcaggacggtcatgtggtagcctatgcttcacgtcagctacgacctcatgagggcaactaccctacgcatgacttggaattagccgcagtggttcatgctctaaaaatctggcggcactatctcattgggaaccgctgtgaaatatatactgatcataaaagtttgaaatacatcttcactcagtcagatctgaatcttcggcaaaggagatggttagaactcatcaaggactatgatgtgggaattcactatcaccctggtaaggccaacgtggttgccgacgctctaagtcgaaagagccattgcaacactcttaacgtccgtggcattccacccgaacttagtcaacagatggaagccctgaacctaagcatagttggtcgcggattcttggctgcgttagaagccaagcccaccttgctcgatcaaatccgcgaggctcagaagaatgatccggacatgcatggactcctcaagaatatgaaacagggtaaggccgctggtttcacagaggatgaacacggaaccttatggaacggaaagcgggtatgcgttccagatagcagagaacttaaacagctgatacttcaggaagctcacgaaagtccttactccattcacccgggcagtaccaagatgtacttagacttgaaggagaaatactggtgggtcagcatgaagcgggaaattgcagagtttgtggccctatgtgatgtgtgccagcgtgtcaaggcagaacaccaacgaccggccggacttctccaacctctccaagtgccggaatggaaatgggatgaaattgggatggatttcatcaccggcctcccaaaaacccaaggtggatatgactctatatgggtaatagtggatcgattaaccaaggtagctcgattcattcctgtgaagaccacctatggagggaacaaactagcggagctctacttcgctaggatcgtgagtctccatggcgttcccaagaaaatcgtatctgataggggaagccaattcacctctcacttttggaagaagctccaagaagagcttggtacccgactaaatttcagcaccgcgtatcacccgcagacagatggacagaccgagcgtctaaatcagatcttagaagatatgctccgcgcatgtgtcctagatttcgggaagacttgggataagagtctcccctatgccgagttctcctacaataacagctaccaagccagcatacaaatggcaccctatgaagcgttgtacgggcgcaaatgccggacaccgctattgtgggaccaagttggagaaagccaagtgttcgggactgatatcctgagagaagctgaagctaaagtcagaatcattcgggataatctaaaggtggcacagtctcggcagaaaagttatgcagataaccgtcgccgtgatctggaattcgcagtggatgattttgtgtaccttcgggtcacgccattgcgaggtgtgcacaggtttcagacaaaagggaagctcgcacctcggtatgtgggtcccttccgtatcatcgctcgacgtggagaagttgcttaccagctggagttgcccgcctccttgggcaacgtgcatgatgtgttccatgtgtcgcaactcaagaaatgtcttcgagtgccatccgagcaggccgactcagagcaaattgaagttcgcgaagacctgacgtatgtggagaagccagtgaaaatcctggacaccatggagcgcaggaccaggaaccgtgtaatccgtttttgcaaggtccagtggagcaaccacgccgaagaagaagctacttgggagcgcgaagacgagctgaaggcagcccatcccgatctcgttgaagtcgaagccgtcgattgggaaaacgagcaaggcaagacacatcatcttgatcatattgaatcccagacgagctgggacccagggtcgggttgccagttcggtctgaatcatcataggccttgggttaaggcagccgcccgggctgaggaagccgctaaggaggaggccgcccgggctcgccaggctgaggcaacagctgctgctggcgcgtcaactgggcccactccctcgggcaaccctcaggcgacagcctccggggaggcacgcgacgtggccgcgggcacatcgcctgggcccacctccccgggcgacgcccaggatcaaacgggtccgggggacatccctgagcccagcacgtcctccggggggccgagccgcatcgccttctctccaaggcggctcttctcctcatcttccgtcgccccgctgagcgccgagcccattctgcaggccttggccgccgcaaacaccgcggtgctggatgggtttagcgcccaagtggaggccctgcgcgcggaacgagcggagctcgaggccgcatgggcacgcgttgaggaggggcggcgctcggtggacgccatggtggaggtgggccgtaaggctcaccgccgccacatctcggagcttgaagcccgcaaggcggcgctggcggagatcgcccgagaggtggaggaggagcgagaggccgccctcatcgccaccaccgcgatgatcgaggcgcaagacaccctccgccttcagcacgcaagctgggaggcggagctgaagaaaaagctcgacgccgcccaaggggtccttgactccgccgctgcccgagagcggcgggtaacggagactgaagcggcgtctcggcggcgcgaggaggcccttgaggcccgtgccatggcgctggaagaacacgccggcgccgtggagaggggcttgacggaccgcgaggccgccgctgttctccgggaggcgacgctggcggcgcacgaggccgcctgcgccgaggaggagtgcgcgctccgcctccgcgaggacgcactcgctgagcgggagcgagctctcgaggaggctgaggccacgaccaaacggctggcggacagcctgtcccttcgcgaggcggcgcaggaggagcaggcgcgccgcaatcttgaatgcgtccgcgccgagagagccgcactggagcagcgggctgccgacctcgaggcgcgggaaaaagagctggacgcaagggcgcgcgtcggtggggcggctgcgggcgaaagcgacttagccgctcgcctcgcggctgccgaacacaccgtcgctgacatgcagcgcgcactagattcctccatcggggaggccgaggccctccgcttggcgggcgagatggggcccgacatgctttgggactcggtctcccgcatggatcgcgccggtcggcaagcgggcctctggaaaggccagacgaggatgcgccccgccaacctggaaggcctcgctccgcacctcaacaggatggcctgggtcctcgaacaactccccgaggagctcgagaagaccatcaagtcatcctcgagggacctcgcccggggggcggtcgaactcgtgctagcgagttaccaggcccgggaccccaacttctccccatggatggcgctggaggagttccctcccgggaccgaggacgatgcgcgcgcgcgcgtccgggatgccgccgaccacatcgtcaacggcttcgagggctcggcccctcggctcgcgttcgcccccagctccgacgaggagggcgatgccagcggtgaggacgacggtggcgacgaggccggcgacccgggcgcgtcagaatga

SEQ ID NO: 14088 - DNA, 433 bp, Oryza sativa
  Clone ID: TFbOSC101199j.C1.o15.np
gatagtttctttcttgtccgacaaggacttgtatcaacccatgtgtataaatatgtacacccagggtctatgtaatttatcaatctctcgatcaatgtaactattctcggcgcatcgccaccctctttcctgagatttttactttatcaaccggcggaatttggcacctgacgctgggctgcatcggctttcgatctctggcgaaggggtaagtcctacgttccgccggccctggtgaatttatcggctacgttggtgttattcaaggctgcatcgattcgatctcttggatcgctctggtttggttgatatatttgcctacctaatatttcaattctatctctagttgcattgtgtttagagacgcatcgatcggctggtatcggcatcggctattatcagttatcggctggaactactccatcggcttatc

SEQ ID NO: 14089 - DNA, 5334 bp, Oryza sativa
  Clone ID: TFbOSC101199j.C1.o8.fg
atggatgaagtcgggggtcgatggacattctccagggcaaatgaaggctacacgagctgcggcccgatggccggcagcgttacccgtcgtggtttggacatgaccggcttcgtcttggagctgcgaggcatgtgcgtggtcttggaatatccacatggagtggattaccaggccaggccgctcccggagcaggagggtgaggatgcagagcctcacgctggttgggaggtcactgcagtgatcctctccggctctcccgagcggacttcgctggcagtcacagcgggtggggactccttccccgccgcttgccagaacgccgctctcctcgccatcggcacccttcaccagcgctacccggacgagttgcagcactcgtcctaccgctaccaccctcgtcgcggaggagcccgcgacttcgccaccttccgagacgccagctcggaggatgacgctaccgtcgtgcatctggcacgcatggtggaggcgtacgacgcggctcgtatcgacttccaccagatggtgcgtcgtggcatggtggagaacaacatgaagatcctggagctgcgtcaggagaatctgcagctcaagaaggacctcgacgcgttggaggcgcagctgcaccagctcaagatcgcccagggagagatcagccgtcccaagcgtcgccgcgtctgccgcagccagaagatcaccgcccgcaagagcacctccaggcccgagcttgttcgtcagtccctggcgtggacctgcttcgtcgagacccctcgtgccgagcctgcgcccgtggttccccaggagggggaagcctccggcgttggtagctcggagggtgcgctgttgctcaccttccgtcctggcccgtcgcagcggagaaatgttaacaccggtgaaggcaaccaacccgagggcagcaaccccaacccccaaggcaatccacctccaccaccaccaccagacaccaacgccattctcacccagatcctcgcccaacaagccaacatgatgaatgctttcctccaccacctccaaaacccgccacaacagaatgctccaccaccacctccccaacactccaaactcgccgagttcctccgcatccgcccacctaccttctctagctccaacaaccccgtggatgcgttggattggttgcatgccgtggggaagaagctagacacggtgcagtgcagtgatgaagagaaagtcatcttcgccgcccaccagctgcaggggcccgcatctatctggtgggaccacttccaggctacgcagccagcgggacaaccgatcacttgggctcgcttcacctccgctttccggagaacccattatttgcacgagttcaacaatctggcccggtacgctccggaggatgtgcgggaagatgaggagaagcaagagaagttcttggcaggaatggaccctgagctgtccgttcgtctagtctctggggactatcctgacttccaacgactggtggacaagagcatccgcttggaagccaagcacaaggagctggaatcgcacaagcgccgcttggcgaatttccgcaatcaacagggtgctaaccagagggttcgctacaccaatccctacccagggggatcctcctcgcagcagcagcagcagcagcagcaacctcgctccgcgcctcgacctcaattcgtggtgcgcgtcccacagccgcagcagcagcagaatcagcaagggactcgtgcaccccgtcctcctacgccagccgtgcagcccgttcaaggccgcagggacgctcaaggtcagcagcgtctgtgcttcaactgtttcgagcccgggcactttgcggataaatgcccgaagccaaggcgtcagcaaggccaagcgcctccccgctccaacaacggcgggaaggatgtcattcgaggtcgtgtgaatcacgtgacggccgaggacgtgctgacaactccagacgtcatcgttggtacgttcctcgtccaatccatccctgctactattttgttcgactctggagcttcccactcgttcatatctgtgccattcgtggggagaaatcagttgggggtagaaaggcttagaaaccctctgctcatcaccacccctggcggggttatgacagcaaagtattatagccctgccgttcctatagaaatccaggggattccttttccctcggatctgattctgctagacacaaagaacttggatgtgatccttgggatgaattggttggctcaattccaaggagtagtggactgcgcgagacgcactgttactctgtaccgaggaccagaacaaccggttgttttctttgcacccccaacctctgtcagaagttcagaactgcatcagatagaactgtcagaaatccccatagtcagagagttcggagacgtgtttccggaagaactacctggtatgccgcccaagcgagagattgagttccggatagatcttgctccaggaaccactcctctgtacaagcgaccctaccgtatggcagcaaatgaactggccgaagtaaagaaacagttggaagagttgaaagaaaaggggtacatacgtccgagtacttccccatggggtgctcctgtgatttttgtggagaagaaagacaagacgaaaaggatgtgcgtcgactacagagctctcaatgaagtcaccatcaaaaacaagtaccctcttccccggatcgatgatctgttcgatcagcttaaaggtgccaccgtattctccaagattgatctccgttccggatatcaccaattacgtattcgtgaagaagatattccgaagaccgcattcactacgcgatatggactgtatgaattcacggtgatgtcgttcggcttaaccaatgctcctgccttcttcatgaacttgatgaacaaagtgttcatggaatacttggataaattcgttgtggttttcatcgatgacattctgatatactcacaatcagaggaagaccatcagcaccatctccgtctggtgttgggaaagttgcgggaacatcaattgtatgccaagcttagcaagtgtgagttctggttgtccgaagtcaaattcttggggcacgtgatatctgctaaaggagttgctgtggaccccgaaacagtgaccgccgtcaccgattggaagcaacccaagacagtcactcagattcgcagtttcttaggtttggcaggatactatcggagattcatcgagaacttctccaaaatcgctcgacccatgacacagttgttgaagaaagaagaaaagtttgtgtggagcccgcaatgcgagaaggcgttccaaactctcaaagaaaagctggtttcctcgccagtgttaatcttgccggatactcgcaaggatttcatggtgtactgtgatgcttcgcgccaaggattggggtgcgtgctcatgcaggacggtcatgtggtagcctatgcttcacgtcagctacgacctcatgagggcaactaccctacgcatgacttggaattagccgcagtggttcatgctctaaaaatctggcggcactatctcattgggaaccgctgtgaaatatatactgatcataaaagtttgaaatacatcttcactcagtcagatctgaatcttcggcaaaggagatggttagaactcatcaaggactatgatgtgggaattcactatcaccctggtaaggccaacgtggttgccgacgctctaagtcgaaagagccattgcaacactcttaacgtccgtggcattccacccgaacttagtcaacagatggaagccctgaacctaagcatagttggtcgcggattcttggctgcgttagaagccaagcccaccttgctcgatcaaatccgcgaggctcagaagaatgatccggacatgcatggactcctcaagaatatgaaacagggtaaggccgctggtttcacagaggatgaacacggaaccttatggaacggaaagcgggtatgcgttccagatagcagagaacttaaacagctgatacttcaggaagctcacgaaagtccttactccattcacccgggcagtaccaagatgtacttagacttgaaggagaaatactggtgggtcagcatgaagcgggaaattgcagagtttgtggccctatgtgatgtgtgccagcgtgtcaaggcagaacaccaacgaccggccggacttctccaacctctccaagtgccggaatggaaatgggatgaaattgggatggatttcatcaccggcctcccaaaaacccaaggtggatatgactctatatgggtaatagtggatcgattaaccaaggtagctcgattcattcctgtgaagaccacctatggagggaacaaactagcggagctctacttcgctaggatcgtgagtctccatggcgttcccaagaaaatcgtatctgataggggaagccaattcacctctcacttttggaagaagctccaagaagagcttggtacccgactaaatttcagcaccgcgtatcacccgcagacagatggacagaccgagcgtctaaatcagatcttagaagatatgctccgcgcatgtgtcctagatttcgggaagacttgggataagagtctcccctatgccgagttctcctacaataacagctaccaagccagcatacaaatggcaccctatgaagcgttgtacgggcgcaaatgccggacaccgctattgtgggaccaagttggagaaagccaagtgttcgggactgatatcctgagagaagctgaagctaaagtcagaatcattcgggataatctaaaggtggcacagtctcggcagaaaagttatgcagataaccgtcgccgtgatctggaattcgcagtggatgattttgtgtaccttcgggtcacgccattgcgaggtgtgcacaggtttcagacaaaagggaagctcgcacctcggtatgtgggtcccttccgtatcatcgctcgacgtggagaagttgcttaccagctggagttgcccgcctccttgggcaacgtgcatgatgtgttccatgtgtcgcaactcaagaaatgtcttcgagtgccatccgagcaggccgactcagagcaaattgaagttcgcgaagacctgacgtatgtggagaagccagtgaaaatcctggacaccatggagcgcaggaccaggaaccgtgtaatccgtttttgcaaggtccagtggagcaaccacgccgaagaagaagctacttgggagcgcgaagacgagctgaaggcagcccatcccgatctcgttgaagtcgaagccgtcgattgggaaaacgagcaaggcaagacacatcatcttgatcatattgaatcccagtttataaaattatgttga

SEQ ID NO: 14090 - DNA, 285 bp, Oryza sativa
  Clone ID: TFbOSC101263j.C1.o2.np
gagagggaatcacggggagtgatttccccctctttattgcgcgcggggacggcgggatgcggcggaatccgcggcggcggcggcgctagggcacgggcgaggcggcgggcgcggcgcgaggtaggggatgacgggtgggccctacccgtcagcgagggtggcgggcgggcccgcccgtcagcggcacgcgcggggaggaggctgatgggccgcgggggagaggagagagagggagggagttgggccgagccggcccaagagaggaagggggggaaaaggactttt

SEQ ID NO: 14091 - DNA, 2427 bp, Oryza sativa
  Clone ID: TFbOSC101694j.C1.o1.fg
atggccggcagcgttacccgtcgtggtttgcacatgactggcttcgtcttggagctgcgaggcatgtgcgtggtcttggggtatccacatggagtggattaccaggccaggccgcttccggatcaggagggtgaggatgcagagcctcacgctggttgggaggtcactgcagtgatcctctccggctctcccgagcggacttcactggcagtcaccgcgggtggggattccttccccgccgcttgccagaacgccgctctcctcgccatcggcacccttcaccagcgctacccggacgagttgcagcactcgccctaccgctaccaccctcgtcgcggaggagcccgcgactacgccaccttccgggacgccagctcggaggatgacgctaccgtcgtgcatctggcacgcatggtggaggcgtacgacgcggctcgtatcgacttccatcagatggtgcgtcgtggcatggtggagaacaacatgaagatcctggagctgcgtcaggagaacctgcagctcaagaaggacctcgacgcgttggaggcgcagctgcatcagctcaagatcgcccagggagagatctgccgccccaagcgtcgccgcgtctgccgcagccagaagatcaccgcccgcaagagcacctccaggcctgagcttgtccgtcagtccctggcgtggacttgcttcgtcgagacccctcgtgccgagcctgcgcccgtggttccccaggagggggaagcctccggcgttggtagctcggagggtgcgctgttgctcaccttccgccctggcccgtcgcagcggagaaatgttaacaccggtgaaggcaaccaacccgaaggcagcaaccccaacccccaaggcaatccacctccaccaccaccaccagacaccaacgccattctcacccaaatcctcgcccagcaagccaacatgatgaatgctttcctccaccacctccaaaacccgccacaacagaatgctccaccaccacctccccaacactccaaactcgccgaattcctccgcatccgcccacccaccttctctagctccaacaatccagtagatgcgttggattggttgcatgccgtggggaagaagctggacactgtgcagtgcagtgatgaagagaaagtcatcttcgccgcccatcagctgcagggacccgcatctctatggtgggaccatttccaggccacgcagccagagggacagcctattacttgggcccgcttcaccgccgctttccggagaacccatgtgcccgctggagtcgtggctcttaagaaaagggaattccgagagttgaagcaaggcaaccgctccgtgatggagtatttgcatgagttcaacaatctagcccgttatgccccggaggatgtgcgggaagatgaggagaagcaagagaagttcttggcaggaatggaccctgagctgtccgttcgtctagtctctggggactatcctgattttcaacgactggtggacaagagcatccgcttggaagccaagcacaaggagctggaatcgcacaagcgccgcttggcgaatttccgcaatcagcagggtgctaaccagagggtccgctacaccaatccctacccagggggatcctcctcgcagcagcagcaacagcagcagaatcagcaagggactcgtgcgccacgtcctcctacgccaactgtgcagcccgttcaaggccgcagggacgcttcaggtccgcagcggctgtgcttcaactgcttcgagcccgggcactttgcggataaatgcccgaagccaaggcgtcagcaaggccaagcgcctccccgctccaacaacggtggcaaggacgtcattcggggtcgtgtgaatcacgtgacggccgaggacgtgctgacaactccagacgtcatcgttgctccgcccttccgtttccgccgctcaccgctcgctctcgccgtcggaatcgtgctcgcaccgtgctcctctctctccgccgtcgccgccgagctccgttccgtcgccgccgtgcttcggttagccgccgccgccgctccgctcttcctcccgactcggcgacacctccctcggcatcgccgcatcgccgtcgaccccgtccgcgcctccacttcgcccgccgaccgccggagcaccgtcgtcatcgtcttcccgaaccgcgccgccgccttcttccgcttcggccgccattctcgtcgtcgtcgttgtcccggggtgagccgaagaccgccgttcgccttccccctttcctcctctttctcgggtgccactccgccgcgccgttggtcgccggcggcgaccatcggggcgcgggtgcgcgccgttcccgtcggccgcgccggcgaggccgccctcgggcgcgccctcgcggctaccaagtgggcccggcagtcagccgcccgcgcccgcgggttcggctga

SEQ ID NO: 14092 - DNA, 564 bp, Oryza sativa
  Clone ID: TFbOSC101694j.C1.o2.gm
atgaatagagtgtccactagttggggttttgtttattctagggtgaacaagccgctcggtccacggtggaccgggcgcacgcggctggcggcggtcggcgccgtgggtcccgcgcgtcagccgaacccgcgggcgcgggcggctgactgccgggcccacttggtagccgcgagggcgcgcccgagggcggcctcgccggcgcggccgacgggaacggcgcgcacccgcgccccgatggtcgccgccggcgaccaacggcgcggcggagtggcacccgagaaagaggaggaaagggggaaggcgaacggcggtcttcggctcaccccgggacaacgacgacgacgagaatggcggccgaagcggaagaaggcggcggcgcggttcgggaagacgatgacgacgctcgtcttcgcgctcccaagtagcttcttcttcggcgtgattgctccactggaccttgcaaaaacggattacccggttcctggtcctgcgctccatggtgtccaggattttcactggcctctccacataggtcaaatcttcgcgaacttcaatttgctctga

SEQ ID NO: 14093 - DNA, 5596 bp, Oryza sativa
  Clone ID: TFbOSC101804j.C1.o1.np
atggatgaagtcgggggtcgatggacattctccagggcaaatgaaggctacacgagctgcggcccggtagtcgagatgtcaaatagcacagggttggtgccctgctgctaggggctcagttccgtctgcctgtcccgggggttccggccgtaggcgggattgggtcgatgtacacctctgatcagagtataatctattcgaatagccgcgccctcggttatgggcaagccgagcaatgtacccaaatggccggcagcgttacccgtcgtggtttggacatgactggcttcgtcttggagctgcggggcatgtgcgtggtcttggggtatccacatggagtggattaccaggccaggccgcttccggatcaggagggagacgatgcggagccccacgctggttgggaggtcactgcagtgatcctctctggctctcccgagcggacttcgctggcagtcaccgcgggtggagattccttccccgccgcttgccagaacgccgctctcctcgccatcggcactcttcaccagcgctacccggacgagttgcagcactcgccctaccgctaccaccctcgtcgcggaggagcccgcgactacgccaccttccgggatgctagctcggaggatgacgctaccatcgtgcatctggcacgcatggtggaggcatacgacgcggctcgtatcgacttccatcagatggtgcgtcgtggcatgatcgagaacaacatgaagatcctggagctgcgtcaggagaacctgcagctcaagaaggacctcgacgcggtggaggcgcagctgcatcagctcaagatcgcccagggagaggactgtcgccccaagcgtcgccgcgtctgccgcagccagaagatcaccgcccgcaagagcacttccaggcccgagcttgttcgtcagtccctggcgtggacttgcttcgtcgagacccctcgtgctgagcccgcgcccgtggttccccaggagggggaagcctccggcgttggtagcacggaggatgcgctgttgctcaccttccgtcctggcccgtcgcagcagtagacgagcagttagtaggcttgcgcatggtgacgaccaggagaaatgctgttaccggtgaaggcaatcaacccgaaggcagcaaccacaaccaccaaggcaatccacctccacctcctcctccgcctccaccaccaccaccagacaccaacgccattctcacccagatcctcgcccagcaggccaacatgatgaccgctttcctccaccacctccaaaatccgccacaacacaatgctccaccaccacccccacaacactctaagctcgccgagttcctccgcatccgcccacccaccttctctagctccaacaatcccgtggatgcgttggattggttgcatgccgtggggaagaagctggacactgtgcagtgcagtgatgaagagaaagtcatcttcgccgcccaccagctgcaggggcccgcatctctatggtgggaccatttccaggctacgcagccggagggacaaccgattacttgggctcgcttcaccgccgctttccggagaacccatgtgcccgccggagtcgtggctcttaagaaaagggagttccgagagttgaagcaaggcaaccgctccgtgatggagtatctgcatgagttcaacaatctggcccggtacgctccggaggatgtgcgggaagatgaggagaagcaagagaagttcctggcaggaatggaccctgagctgtccgtccgtctagtttccggggactatccggatttccaacgtctggtggacaagagcatccgcttggaagccaagcacaaggaactggagtcgcacaagcgccgcttggcgaatttccgcaatcaacagggtgctaaccagagggtccgctacaccaatccctatccaaggggatcctcctcacagcagcaacaacagcagcagcaacctcgttccgcaccccgacctcaattcgtggtgcgcgtcccacagccgcagcagcagcagaatcaacaagggactcgtgcgccccgtcctcctacgccagctgtgcagcccgttcaaggccgtagggacgcttcaggtccgcagcgtctgtgcttcaactgcttcgagcccgggcactttgcggataaatgcccgaagccaaggcgtcagcaaggccaagcgcctccccgctccaacaacggtggaaaggatgtcattcggggtcgtgtgaatcacgtgacggccgaggacgtgctgacaactccagacgtcatcgttggtacgttcctcgttcattccatccctgctaccattttgttcgactctggagcttcccactcgtttatatctgtgccattcgtggggagaaatcagttgggggtagaaaggcttaggaaccctctgctcatcaccacccctggaggggttatgacagcaaagtattatagccctgccgtccctatagaaattcaggggattccttttccctcggatctgattcttctagacacccagaacttggatgtgatccttggaatgaattggttggctcaattccaaggagtagtggattgcgcgagacgcactgtcactctgtaccgagggccggaacaaccggttgtttcctttgcatccccaacctctgtcagaagttcagaactgcatcagataggactgtcagaaatccccatagtcaaagaattcggagacgtgtttccggaagaactacctggtatgccgcccaagcgagagattgagttccggatagatcttgctccaggaaccactcctctgcacaagcgaccctaccgtatggcagcaaatgaactggccgaagtaaagaaacagttggaagggttgaaagaaaaagggtatatacgtccgagtacttccccatggggtgctcccgtgatttttgtggagaagaaagacaagacgaagaggatgtgcgttgactacagagctctcaatgaagtcaccatcaagaacaagtaccctcttccccggatcgatgatctgttcgatcagcttaaaggtgccactgtattctccaagatcgatcttcgttccggatatcaccaattacgtattcgtgaagaagatattccgaagaccgcattcaccacgcgatacgggctgtacgaattcacggtgatgtcgttcggtctaaccaatgcacctgccttcttcatgaacttaatgaacaaagtgttcatggaatacttggacaagtttgttgtggctttcatcgatgacattctgatatactcacaatcagaggaagaccatcagcaccatctccgtctggtgttgggaaagttgcgggaacatcaattgtatgccaagcttagcaagtgtgagttctggatgtccgaagtcaaattcttggggcacgtgatatctgccaaaggagtcgctgtggatcccgaaacagtgaccgccgtcaccgattggaagcaacccaagacagtcactcaaattcgcagtttcttaggtttggcaggatactaccggaggttcatcgagaacttctccaaaatcgctcaacccatgacacagttgttgaagaaagaagagaaatttttgtggagcccgcaatgcgagaaggcgtttcaaactctcaaggaaaagctggtttcctcgccagtgttaatcttgccagatactcgcaaggatttcatggtgtactgtgatgcttcgcgccaaggattggggtgcgtgctcatgcaggatggtcatgtggtagcctatgcctcacgtcagctacgacctcatgaaggcaactaccctacccatgatttggagttagcagcggtggttcatgctctaaaaatctggcggcactatctcattggtaatcgctgtgaaatatatactgatcataagagtttgaaatacatcttcacccagtcagatctgaaccttcggcaaaggagatggttagaactcatcaaggattatgatgtgggaattcactatcatcctggtaaggccaacgtggttgccgacgctctaagtcgaaaaagccattgcaacactctcaacgtccgtggcattccacccgaacttaatcaacagatggaagccctgaacctaagcatagttggtcgtggattcttagctgcgttggaagccaagcccaccttgcttgatcaaatccgcgaggctcagaagaatgatccggacatgcatggactcctcaagaatatgaaacagggtaaagccgctggtttcacagaggatgaacacggaaccctatggaacggaaagcgggtatgcgttcccgataacagagaacttaaacagctgatacttcaggaagctcacgaaagtccttattcaatccaccctggcagtacgaagatgtacttagacttgaaggagaaatactggtgggttagcatgaagcgggaaattgcagagttcgtggctctttgtgatgtgtgccagcgtgtcaaggcagaacaccaacgaccggctggacttctccaacctctccaagtaccagaatggaaatgggatgaaattgggatggatttcatcaccggccttccaaaaacccaaggtggatatgattctatatgggtagtcgtggatcgattaaccaaggtggcccgatttattcctgtgaagaccacctatggagggaacaaactagcggagctctacttcgccaggatcgtgagtctccatggcattcccaagaaaatcgtatctgataggggaagccaattcacctctcacttttggaagaagctccaagaagagctgggtacccgattgaacttcagcaccgcataccacccgcagacagatggacagaccgagcgtctaaatcagatcctagaagatatgcttcgcgcatgtgtcctagatttcgggaagacctgggataagagtctcccctatgccgagttctcatacaacaacagctaccaagccagcatacaaatggcaccgtatgaagcattgtatgggcgcaagtgccggacaccactattgtgggaccaagttggagaaagccaagtgttcgggactgatatcctgagagaagctgaagctaaagtcagaaccattcgggataatctaaaggtggcccagtcccggcagaaaagttatgcagataaccgacgccgtgatctggaattcgcagtggatgactttgtgtaccttcgggtcacaccattgcaaggtgtacacaggtttcagacaaaagggaagctcgcacctcggtatgtgggtcctttccgtatcattgctcggcgtggagaagtcgcttaccagctggagctgcccgcctccttgggcaacgtgcatgatgtgttccatgtgttgcaactcaagaaatgtcttcgagtgccatccgagcaggccgactcagagcaaattgaagttcgcgaagacttgacttatgtggagaggccagtgaaaatcctgcacaccatggagcgcaggaccaggaaccgagtaatccgtttttgcaaggtccagtggagcaaccacgccgaagaagaagcaacatgggagcgtgaagacgagctgaaggcagcccatcccgatctcttcgccagttcctccgaatctcggggtcgagattccgtt

SEQ ID NO: 14094 - DNA, 4254 bp, Oryza sativa
  Clone ID: TFbOSC10946j.C1.o2.fg
atgacaggatgtattttagagtcgttttgggacgcgacaaagcacaaggaactggagtcgcacaagcgccgcttggcgaatttccgcaatcaacagggtgctaaccaaagggtccgctacaccaacccctatccagggggatcctcctcgcaacagcaacaacagcagcagcaacctcgctccgcgccgcgacctcaattcgtggtgcgcgtcccacagccgcagcagcagcagaatcagcaagggactcgtgcgccccgtcctcctacgccaaccgtgcagtctggtcaaggccgcagggacgctcaaggtcagcagcgtctgtgcttcaactgcttcgagcccgggcactttgcggataaatgcccgaagccaaggcgtcagcaaggccaagcgcctccccactccaacaacggtgggaaggatgtcattcggggtcgtgtgaatcacgtgacggccgaggacgtgctgacaactccagacgtcatcgttggtacgttcctcgttcattccatccctgctaccattttgttcgactctggagcttcccactggtttatatctgtgccattcgtggggagaaatcagttgggggtagaaaggcttaggaaccctctgctcatcaccacccctggaggggttatgacagcaaagtattatagccctgccgtccctatagaaattcaggggattccttttccctcggatctgattctgctagacaccaagaacttggatgtgatccttgggatgaattggttggctcaattccaaggagtagtggattgcgcgaggcgcactgtcactctgtaccgagggccggaacaaccggttgttttctttgcacccccaacctctgtcagtagttcagaactgcatcagataggactgtcagaaatccccatcgtcagggagttcggagatgtgtttccggaagaactacccggtatgccgcccaagcgagagattgagttccggatagatcttgctccaggaaccactcctctgcacaagcgaccctaccgtatggcagcaaatgaactggccgaagtaaagaaacagttggaagagttgaaagaaaaggggtatatacgtccgagtacttccccctggggtgctcctgtgatttttgtggagaagaaagacaagactaagaggatgtgcgttgactacagagctctcaatgaagtcaccatcaaaaacaagtaccctcttccccggatcgatgatctgttcgatcagcttaaaggtgccactgtattctccaagattgatcttcgttccggatatcaccaattacgtattcgtgaagaagatattccgaagaccgcattcaccacgcgatacgggctgtatgaattcacggtgatgtcattcggcctaaccaatgcacctgccttcttcatgaacttaatgaacaaagtgttcatggaatacttggataagtttgttgtggttttcattgatgacattctggtatactcacaatcagaggaagaccatcagcaccatctccgtctggtgttgggaaagctgcgggaacatcaattgtatgccaaacttagcaagtgtgagttctggctgtccgaagtcaaattcttaggacacgtgatatctgctaaaggagtttctgtggaccccgaaacagtgaccaccgtcaccgattggaagcaacccaagacagttactcaagtccgcagtttcttaggtttggcaggatactaccggagattcatcgagaacttctccaaaatcgctcgacccatgacacagttgttgaagaaagaagagaaatttgtgtggagcccgcaatgcgagaaggcgttccaaactctcaaggaaaagctggtttcctcgccggtgttaatcttgccggatactcgcaaggacttcctggtgtattgtgacgcttcgcgccaaggattggggtgcgtgctcatgcaggacggtcatgtggtagcctatgcctcacgtcagctgcgacctcatgaaggcaactaccctacacatgatttggagttagccgcggtggttcatgctctaaaaatctggcggcactatctcattgggaatcgctgtgaaatatataccgatcataagagtttgaaatacatcttcacccagtcggatctgaatcttcggcaaaggagatggttagaactcatcaaggactatgatgtgggaattcactatcatcctggtaaggccaacgtggttgccgacgctctaagtcgaaagggccattgcaacactcttaacgtccgtggcattccacccgaacttaatcaacagatggaagccctgaacctaagcatagttggtcgcggattcttggctgcgctagaagccaagcctaccttgctcgatcaaatccgcaaggctcagaagaatgatccggacatgcatggactcctcaagaatatgaaacagggtaaagccgctggtttcacagaggatgaacacggaaccctatggaacggaaagcgggtatgcgttccagataaccgagaactcaaacagctgatacttcaggaagctcacgagagcccttattccattcacccgggcagtacaaagatgtacttagacttgaaggagaaatactggtgggttagtatgaagcgggaaattgcagagttcgtggccctttgtgatgtgtgccagcgtgtcaaggcagagcaccaacgaccggccggacttctccaacctctccaagtaccagaatggaaatgggatgaaattgggatggatttcatcaccggacttccaaaaacccaaggtggatatgattctatatgggtagttgtggatcgattaaccaaggtagctcgatttattcctgtgaagaccacctatggagggaacaaactagccgagctctacttcgctaggatcgtgagtctccatggcgttcccaagaaaattgtatctgataggggaagccaattcacctctcatttttggaagaaactccaagaagagttgggaacccgattaaatttcagcaccgcgtatcacccgcagacagatggacagaccgagcatctaaatcagatcctagaagatatgctccgcgcatgtgtactagatttcgggaagacctgggataagagtctcccctatgccgaattctcctacaataacagttatcaagccagcatacaaatggcaccttatgaagcgttgtacgggcgcaaatgccggacaccgctcttgtgggaccaagttggagaaagccaagtgttcgggactgatatcctgagagaagctgaagctaaagtcagaatcattcgggataatctaaaggtggcacagtctcggcagaaaagttatgcagataaccgtcgccgtgacctggaattcgcagtgggtgattttgtataccttcgggtcacgccattgcgaggtgtgcacaggtttcagacaaaagggaagctcgcacctcgggttcacacacatatgccgcgctacaagcctgagtacttgtttggtgttgagggttttgtccaggagttgcgtacgatgtcctttgtcattggatttgggactgcccctttttatgcccagattcctcatgatcgtcatgaagagaagtgccgagtcaaagttactttgaacagcaatagtgaagaggtcccctcagtaatgttcgaagctggaggaagaaactacatccatgcatgtcaggaagtggcaaggatcgccataggagagctccgtgatcgctacagtgatcagttggccgacactgagtatcgctatcatcctcgtcaaccacagggaagtgaccgtggcagttaccttgagactgaaggaattgagaatgatgctaccacaaggcatttggttgagatgttgtgggctatggatgaaagtcgtgcggagactgtgttagcagctcaagatcgtgaagaccggaatcgtggtaagatttgcaagctcgaagacaaggtggatcgtttggagaaggaattagccgcattgaagggagaagctccgccgcagaaggccaggattcgtcttaccgcaaggaagagagctctatttgtccctcgctatcaattggcgccaaaggttcgtgtggtggagaaagaagttgccccagcagatcctccggtcattatcataagtagtgatgaagatgaagaatccaagcgcacccattccaagattgagtgggtagcaactcaagatgatgaagacgagccgaacgagccttcaatcgacctccgatgctcagaagaactagagtga

SEQ ID NO: 14095 - DNA, 1929 bp, Oryza sativa
  Clone ID: TFbOSC11167j.C1.o1.fg
atgtcatggcacagggccggtgtcctgctgctaggggctcagtcctgcctgcctgtcccgggggttccggccgtagggggattggtcaccgcgggtggcgattccttccccgccgcttgccagagcgccgctctcctcgccatcggcactctccaccagcgctacccggacgagttgcagcactcgccctaccgctaccaccctcgccgcggaggagcccgcgactacgccaccttccgggatgctagctcggaggatgacgctaccatcgtgcacctggcacacatggtggaggcgtacgacgcggctcgtatcgacttccatcagatggtgcgccgcgggatggtcgagaacaacatgaagatcctggagctgcgtcaggagaacctgcagctcaagaaggacctagacgcggtggaggcgcagctgcatcagctcaagatcgcccagggagagatctgccgccccaagcgccgccgcgtctgccgcagccagaagatcaccgcccgcaagagcacctccaggcccgagcttgttcgtcagtccctggcgtggacttgcttcgtcgagacccctcgtgccgagcccgcgcccgtggttccccaggagggggaagcctcctgcgttggtagcacggaggatgcgctgttgctcaccttccgccctggcccgtcgcagcggagaaatgctgctaccggtgatggcaaccaacccgaaggcagcaaccacaaccaccagggcaacccacctcaacctcctcctccacctccaccaccaccaccagacaccaacgccattctcacccaaatcctcgcccagcaagccaacatgatgactgctttcctccaccacctccaaaatccgccacaacttaatgccccactaccacctccccaacactctaaactcgccgagttcctccgcatccgtccacctaccttctctagctccaacaaccccgtggatgcgttggattggttgcatgccgtggggaaaaagttagacacggtgcagtgcagcgatgaggagaaagtcatcttcgccgcccaccaactgcaggggcccgcatctctatggtgggaccacttccaggctacgcagccagaggggcagcctattacttgggcccgcttcaccgccgctttccggagaacccatgtgcccgccggagtcgtggcccttaagaaaagggaattccgagagttgaagcaaggcaaccgctccgtgatggagtatttgcatgagttcaacaatctggccggttacgccccggaggatgtgcgggaagacgaggagaagcaagagaagttcctggtaggaatggacccagagctgtccgtccgtctagtctctggggactatccggattttcaacgactggtggacaagagcatccgcttggaagccaagcacaaggaactagagtcgcacaagcgccgcttggcgaatttccgcaatcaacagggtgctaaccaaagggtccgctacaccaatccctatccagggggatcctcctcgcagcagcagcagcagcagcagcctcgctccgcgcctcgacctcaattcgtggtgcgcgtcccacagccgcagcagcagcagggtcagcaggggactcgtgcgccccgtcctcctacgccaactgtgcagcctggtcaaggccacagggacgctcaaggtcagcagcgtctgtgcttcaactgcttcgagcccgggcactttgcggataaatgcccgaagccaaggcgtcagcaaggccaagcgcctccccgccccaacaacggtggtaaggacgtcattcggggtcgtgtgaatcacgtgacggccgaggacgtgctgacaactccagacgtcatcgttgggagttcggagacgtgtttccggaagaactacccggtatgccgcccaagcgagagattgagttccggatag

SEQ ID NO: 14096 - DNA, 538 bp, Oryza sativa
  Clone ID: TFbOSC11420j.C1.o1.fg
atggaccccgagctgtctgttcgtctagtctctggggactatccggattttcaacgactggtggacaagagcatccgcttggaggccaagcacaaggagctggaatcgcacaagcgccgcttggcgaacttccgcaatcagcagggtgctaaccagagggtccgctacaccaatccctatccagggggatcctcctcgcaacagcaacaacagcagcagcaacctcgcccagcgccccgacctcaattcgtggtgcgcgtcccacagccgcagcagcagaatcagcaagggactcgtgcatcccgtcctcctacgccagctgtgcagcccgttcaaggccgcagggacgcttcaggtccgcagcggctgtgcttcaactgcttcgagcccggacactttgcggataaatgcccaaagccaaggcgtcagcaaggccaagcgcctccccgctccaacaacggcgggaaggatgtcattcggggccgtgtgaatcatgtgacggccgaggacgtgctgacaactcccgacgtcaccgttg

SEQ ID NO: 14097 - DNA, 2151 bp, Oryza sativa
  Clone ID: TFbOSC11437j.C1.o2.fg
atgactggcttcgtcttggagctgcgaggcatgtgcgtggtcttggggtatccacatggagtggattaccaggccaggccgcttccggatcaggagggagacgacgcagagccccacgctgcgtgggaggtcacagcagtgatcctctccggctctcccgagcggacttcgctggcagtcaccgcgggcggagactccttccccgccgcttgccagaacgccgctctcctcgccatcggcacccttcaccagcgctacccggacgagttgcagcactcgccctaccgctaccaccctcgtcgcggaggagcccgcgaccacgccaccttccgagacgccagctcggaggatgacgctaccgtcgtgcatctggcacgcatggtggaggcgtacgacgcggctcgtatcgacttccaccagatggtgcgtcgtggcatggtggagaacaacctgaagatcctggagctgcgtcaggagaacctgcagctcaagaaggacctcgacgcgttggaggcgcagctgcaccagctcaagatcgcccagggagaggacagccgtcccaagcgtcgccgcgtctgccgcagccagaagatcaccgcccgcaagagcacctccaggcccgagcttgtccgtcagtccctggcgtggacttgcttcgtcgagacccctcgtgccgagcctgcgcccgtggttccccaggagggggaagcctccggcgttggtagctcggaggctccttctctgtttgctggttctgtgtggggttttcagatggtgacgaccaggagaaatgttaacaccggtgaaggcaaccaacccgagggcagcaaccccaacccccaaggcaacccacctccaccaccaccaccagacaccaacgccattctcacccaaatcctcgctcagcaagccaacatgatgactgctttcctccaccacctccaaaatccgccacaacagaatgctccaccaccccctccccaacactccaaactcgccgaattcctccgcatccgcccacccaccttctctagctccaacaatcccgtagatgcgttggattggttgcatgccgtggggaagaagctagacacggtgcagtgcagcgacgaagagaaagtcatcttcgccgcccaccagctgcaggggcccgcatctctatggtgggaccacttccaggctacgcagccagaggggcaaccgatcacttgggctcgcttcaccgccgctttccggagaacccatgtgcccgccggagtcgtggctctcaagaagagggaattccgggagttgaagcaaggcaaccgctccgtgatggagtatttgcatgagttcaacaatctagcccgttatgccccggaggatgtgcgggaagatgaggagaagcaggagaagttcttggcaggaatggaccccgagctgtccgttcgtctagtctctggagactacccggacttccaacgtctggtggacaagagcatccgcttggaagccaagcacaaggagctggaatcgcacaagcgccgcttggcgaacttccgcaatcagcagggtgctaaccagagggtccgctacaccaatccctacccagggggatcctcctcgcagcagcagcagcagcaacctcgctccgcgcctcgacctcaattcgtggtgcgcgtcccacagccgcagcagcagcagaatcaacaagggactcgtgcgccccgtcctcctacgccagctgtgcagcccgttcaaggccgcagggacgcttcaggtccgcagcgtctgtgtttcaactgcttcgagcccgggcactttgcggataaatgcccgaagccaaggcgtcagcaaggccaagcgcctccccgctccaacaacggtggcaaggacgtcatccgtggtcgtgtgaatcacgtgacggccgaggacgtgctgacaactcccgacgtcatcgttgagaagaaagacaagacgaagaggatgtgcgtcgactacagagctctcaatgaagtcaccatcaaaaacaacgtgtcaaggcagaacaccaacgaccggccggacttctccaacctcttcaagtaccagaatggaagtgggatgaaattgggatggatttcatcaccggacttccaaaaacccaaggcggatatgattctatatgggtaa

SEQ ID NO: 14098 - DNA, 995 bp, Oryza sativa
  Clone ID: TFbOSC11437j.C1.o2.np
tcagccgagggagcgggcgcgcggaccgggtccacgggaagtggggcccacgcgtcagccccacggtccacggtggaccgggcgcacgcggctggcggcggtcggcgccgtgggtcccgcgcgtcagccgcacccgcgggcgcgggcggctgacggccgggtccacttggcagccgcgagggcgcgcccgagggcggcctcgccggcgcggccgacgggagcggcgcgcccgcgccccgatggtcaccgccggcgaccaccggcgcggcggagcggcgcccgagagagaggagggaagggggaaggcgaacggcggtcctcggctcaccccgggacaacgacgacgacgagaacggcggccggagtggaggaaagcggcggcgtggctcgggatgacgatgacgacggtgctccggcggtcggcgggcgaagcggagcggcggacggggtcggcaaccactcggcgaagcggatggaggtgtcgccgagtaaggaggaagaccggagcggcggcggcggcggaacggagctcggcagcgacggcggagagagaggagcacggcgcgagcacgatgccgacggcgagagcgagcggcgagcggcggaaacggaagagcggagctcggggagcaattatatagcaccgagagggggagaacgcggccggagaggaaggaaacgggcgcggggatctcgggctccatagatgtcgccggcgaggattacgggatgaatccggacggatccgagggagagagagaggggaaatcgggggaaacgggagaggggatcgcggggggcacgggcgcggcggaggacgcggcgggaggaaggcgatgacaggtgggtcccacccgtcagcgagagcggcgggcgggcccgcctgtcagcggcgcgcgcgcgcggggaggccgatgggccgcgggggaagagagagagagagggagggactgggccgagccggcccaagaaggaagggggggggggaaagagga

SEQ ID NO: 14099 - DNA, 1033 bp, Oryza sativa
  Clone ID: TFbOSC11441j.C1.o1.fg
atgatgaatgctttcctccaccacctccaaaatccgccacaacagaatgctccaccaccacctccccaacactccaaactcgccgaattcctccgcatccgtccacctaccttctctagctccaacaaccccgtggatgcgttggattggttgcatgccgtggggaagaagttagacacggtgcagtgcagtgatgaggagaaagtcatcttcgccgcccaccagctgcaggggcccgcatctctatggtgggaccatttccaggccacgcagccagaagggcaacctattacttggactcgcttcaccgccgctttccggaaaacccatgtgcccgccggagtcgtggctcttaagaaaagggaatttcgggagttgaagcaaggcaaccgctccgtgatggagtacttgcatgagttcaacaacctggcccgttacgctccggaggatgtgcgggaggatgaggagaagcaagagaagttcttggcaggaatggaccccgagctgtctgttcgtctagtctctggagactacccggacttccaacgtctggtggacaagagcatccgcttggaagccaagcacaaggagctggaatcgcacaagcgccgcttggcgaatttccgcaatcaacagggtgctaaccagagggtccgctacaccaatccctatccagggggatcctcctcgcagcagcagcaacagcagcagcaacctcgcccagcgccccgacctcaatttgtggtgcgcgtcccacagccgcagcagcagcagaatcaacaagggactcgtgcaccccgtcctcctacgccagctgtgcagcccgttcaaggccgcagggacgctcaaggtcagcagcgtctgtgcttcaactgcttcgagcccgggcactttgcggataaatgcccaaagccaaggcgtcagcaaggccaagcgcctccccgctccaacaacggtggcaaggacgtcatccgtggtcgtgtgaatcacgtgacggccgaggacgtgctgacaactcccgacgtcatcgttg

SEQ ID NO: 14100 - DNA, 4199 bp, Oryza sativa
  Clone ID: TFbOSC11805j.C1.o2.np
ctgcttcatttatcgtcaaaatctaacctttaaaatgttgcttttctcttttgtttttgtttgtagatggccggcagcatcaaccgtcgtggtctggacctgactgcggggcatgtgcgttgtcttggggtatccgcatggagtggactaccagggcaagcaactcccggagcaagagggtgacgatgcagagccccacgctgcttgggaggtcactgtagtgatcctcactggctcacccgagaggacctcgttggcagtcaccgcgggtggagattctttctccgccgcttgccagaacgccgcacccctcgccatcggcactcttcaccagcgctacccggacgagttgcagcactcgccctaccgctaccaccctcgtcgcggaggagcccacgactacgccaccttcagggatgctagctcggaggatgacgctaccatcatgcacctggcgcgcatggtggacacgtatgacgcggcccgtatcgacttccaccagatggtgcgccgcgggttggtcgagaacaacatgaagatcctggagctgcgtcaggagaatctgcagctgaagaaggacctagacgtagtggaggcgcagctgtgtcagctcaagatcgcccagggagaggtctgtcgccccaagcgccgccgcgtctaccgcagcctgaagatcaccgcccgcaagagtacctccaggcctgagcttgttcgtcagtccttggcatggacctgttttgtcgagacccctcgtgccgagcccgcgcccgtggttcctcaggaggagggagcctctggcgttggcagcatggaggatgcgctactgctcaccttccgccctggcccgtcgcagaatctgttctctctcttggctggttctgtatgggatatttcagatggtgacaaccaggagaagtgctgctaccggtgatgacaaccaacccgaaggtagcaaccccaacatccaaggcagcccacctccacctcctcccccacctccaccaccaccaccagacaccaactccatcctcacccaaatcctcgcccagcaggccaacatgatggctgctttcctccatcacatccaaaatccgccacagcataatgctccacctccaccaccacccccacaacactctaaactcgccgagttcctccgcatctgtccgcctaccttctctagttccaataaccccgttgatgcgttggattggttgcatgccgtggggaaaaagttggataccgtgcagtgcaatgatgaggagaaagtcatctttgccgctcaccaactgcagggcccgcatctctagggtggaccacttccaggctacgcagccagaaggacagcctattacttgggcccgcttcaccgcggctttccggaggacccatgtgcccgccggagtcatggcccttaagaaaagggaattccgagagttgaagcaaggcaaccgctctgtgatggagtatttgcatgagtttaacaacctggcccggtacgccccagaggatgttcgtgaagatgaggagaagcaagagaagttcttggcaggaatggaccctgacctgtccgtgcgtctggactccggggactatccggatttccaacatctggtggacaagagcatctgcttggaagccaagcacaaggaactggagtcgcacaagcatcgcttggcgaatttccacaatcaacaggttgctaaccaaagggtccgctacaccaatccctatccagggggatcctcctcgcagcagcagcagcagcagcacccacgctccgcgccccgacctcaattcgtggtgcgcgtcccacagccgcagcaacagcagagtcagcaagggacccatgcgccccgtcctcctgcgcccgttgtgcagcctggtcaaggccgcagagacattcaaggtcagcagcgtctgtgcttcaactgcttcgagcccgggcactttgcggataaatgcccaaagccgaggcgctcgtaaggccaagcgcctccccgccccaacaacggtggtaaggatgtcattcgggatcgtgtgaaccacgtgactgccgaggatgtgctgacaactccagacgtcattgttggtacgttcctcattcattccatccctgctaccattttgttcgactctggagcttcccactcgtttatgtctgtgccattcgtggggagaaatcagttgggggtagaaaggcttaggaaccctctgctcatcaccacccctagaggggttatgacagcaaagtattatagccctaccattcctatagaaatccagggaattccttttccctcggatttgattcttctagacaccaagaatttggatgtgatcattgggatgaattggttggctcaattccaaggagtagtggattgcgcaagacgcactgtcactctgtaccgagggccagatcaactggttgttttctttgcacccccaacctctgtcggcagttcagaacttcatcagataggactgtcagaaatccccatcgtcagtgagttcggagatgtgtttccggaagaactacccggtatgccgcccaagcgagagattgaattctggatagatcttgctccaggaaccactcctctgtacaagcgacccaaccgtatggcagcaaatgaactggccgaagtcaagaaacagttggaagagttgaaagaaaaggggtacatacgaccgagcacttccccctagggtgctcccgtgatttttgtggaaaagaaggacaagacaaagaggatgtgtgttgactacagagctcttaatgaagttactatcaaaaacaagtaccctcttccccagatcgatgatctgttcgatcagcttaaaggtgccactgtgttttctaaaatcgatcttcgttccagatatcaccaattgtgtattcgtgaagaagatatcccgaagaccgcattcaccacgcgatatgggctgtatgaattcacggtgatgtcgttcggtctgactaatgctcctgccttcttcatgaacttaatgaacaaagtgttcatggaatacttggataagtttgttgtggtcttcatcgacgacatcctggtatactcacaatcagaggaagaccatcaacagcatctccgtctggtgttgggaaagttgcgggaacatcaattgtatgccaagcttagcaagtgtgagttctggttgtccgaagtcaaattcttagggcacgtgatatctgctaaaggagttgctatggaccccgaaacagtgaccgccgtcactgatgggaagcaacccaagacagttactcaggttcgcagctttttgggtttggcaggatactaccggaggttcatcgagaacttctccaaaatcgctcgacccatgacacagttgttgaagaaagaagaaaaatttgtgtggagcccgcaatgcgagaaggcgttccaaactctcaaggaaaagctggtttcctcgccagttttaatcttaccggatactcgcaaggacttcatggtgtactgtgacgcttcgcgccaaggattggggtgcgtgctcatgcaggaaggtcatgtggtagcctatgcctcacgccagctacggcctcatgaaggcaactaccctacccatgatttggagttagccgctgtggttcatgctctaaagatctggcggcactatctcattgggaatcgctatgaaatatatactgatcataagagtttgaaatacatcttcacccagtcggatctgaatcttcggcagagaagatggttagagctcatcaaggattatgatgtgggaatccactatcaccctggtaaggccaacgtggtcgcagacgcgctgagtcgaaaaagccgttgcaacactcttggcgtccgtggcattccaccggaacttcatcaacagatggaagccctgaacctaagcatagttggtcatggattcttggctacgctggaagccaagcctaccttgctcgatcaaatccgcgaggttcagaagaatgatccagatatgcatgggatcctcaagaatatgaaacaaggtaaagccgctggtttcacagaagatgaacatggaaccctatggaacggaaatcgtgtatgcgttccggacgacaaggaacttaaacagctgatacttcaggaagctcacgaaagtccttattccatccaccctggcagtttccatcccctccggccgctctctccccc

SEQ ID NO: 14101 - DNA, 4792 bp, Oryza sativa
  Clone ID: TFbOSC12550j.C1.o1.np
atggcggccggatcttccgcggccgattccccctcatccggccgctctctccccctcccaacactatttaaacgttccccgtgcctccctcctccgtttccgccactcgccgctctttctccccgtcggaatcgagctcgcgccgtcgccctctttctccgccgtcgccgccgagctccggttcgccgccgccgtcgccccggacctcctcccgcttcggcatcgcctccttcggcttcgcccgccgatcaccggaacgccgccgtcctcgtcgacccgagccgcgccgccgccttcctccgctccggtcgccatttccgtcgtcgccgtcgacccggggtgagccgtggaccgccgtttcacttcccccttccctcccctctctcgggcgccgctccgccgcgctggtggtcgccgccggcgaccatcggggcgcgggcgcgtcgcctcccgtcggctgtgccggcgaggccgccttcgggcgcgccccgcggctgccatgtggggcccggccgtcagccgcccgcgccctcgtgtgcggctgacgcgtgggacccacggcgccggccggcgtaagccgcgtgcacccggtccatcgtggacccacctcggccatataaggaccggtcttcgggcctctgttgcaaagcactaccgtacttccacatgtctagtggggcaaatgaaggctacacgagctgtggcccggtagtcgagatgtcatggcacagggccggagtcctgctgctaggggctcagtcctacctgcctgtcccgggggttccggccgtaggtgggattgtgtcaatgtacacctctgatcagagtacaacctattcgaatagccgcgccctcggttatgggcaagccgagcaatgtacccaaaaggccggcagcgtcacccgtcgtggtttggacatgactggtttcgtcttggagctgcggggcatgtgcgtggtcctagggtatccacatggagtggactaccaggccaggccgcttccggagcaggagggtgatgacgcagagccccacgctggttgggaggttactgcagtgatcctctctggctctcccgagcggacttcgctggcagtcaccgcgggtggggattccttccccgccgcttgccagagcgccgctctcctcgccatcggcactcttcaccagcgctacccggacgagttgtacaattggcactaccgttaccacccttgctgtggatgagcccgctactactctcaccttccgggatgctagctcgaaggatgacgctaccatcatgcacctggcgcgcatggtggaggcgtacgacgcggctcgtatcgacttccatcagatggtgcgccgtgggatggtcgagaacaacatgaagatccaggagctgcgtcaggagaacctgcagctcaagaaggacctagacgcggtggaggcgcagctgcatcagctcaagatcgcccagggagaggtctgccgccccaagcgccgccgcgtctgccgcagccagaagatcaccgcccgcaagagcacctccaggcccgagcttgttcgtcagtccctggcgtggacttgcttcgtggagacccctcgtgccgagcctgcgcccgtggttccccaggagggggaagcctccggcgttggtagcacggaggatgcgctgttgctcaccttccatggtgacgaccaggagaaatgctgccaccagtgatggcaaccaacccgaaggcagcaaccacaacaaccatggcagcccacctccacctcctcctccgcctccaccaccaccaccaccaccagataccaacgccattctcacccaaatcctcgcccagcaggccaacatgatgactgctttcctccaccacctccaaaatccgccacaacataatgctccacccccacctccccaacactctaaactcgccgagttcctccgcatccgcccacctaccttctctagctccaacaaccccgtggatgcgttggattggttgcatgccgtggggaaaaagctagacactgtgcagtgcagcgatgaggagaaagtcatcttcgccgcccaccagctgcagggacccgcatctctatggtgggaccatttccaggctacgcagccagagggacagcctattacttgggctcgcttcaccgccgctttccggagaacccatgtgcccgccggagtcgtggcccttaagaaaagggaattccgagagttgaagcaaggcaaccgctccgtgatggagtatttgcatgagttcaacaacctggcccgttacgccccggaggatgtgcgggaagatgaggagaagcaagagaagttcttggcaggaatggaccctgagctgtccgtccgtctagtctccgtggactatccggatttccaatgtctggtggacaagagcatccgcttggaagccaagcacaaggaactggagtcgcacaagcgccgcttggcgaatttccgtaatcaacagggtgctaaccaaagggtccgctacaccaatccctatccagggggatcctcctcgcagcagcaacaacagcagcagcaacctcgctccgcgccccgccctcaattcatggtgcgcgtcccacagccgcagcaacagcagagtcagcaagggactcgtgcgccccgtcctcctacgccaactgtgcagcctggtcaaggccgcagggacgttcaaggtccgcagcgtctgtgcttcaactgcttcgagcccgggcactttgcggacaaatgcccaaaaccgcggcgtcagcaaggccaagtgcctccccgctccaacaacggtggtaaggatgtcattcggggtcgtgtgaaccacgtgacggccgaggacgtgctgacaactccagatgtcatcgttggtacgttcctcattcattccatccctgctaccattttgttcgactctggagcttcccactcgtttatatctgtgccattcgtgggaagaaatcagttgggggtagaaaggcttaggaaccctctgctcatcaccacccctggaggggttatgacagcaaagtattatagtcctgccgtccctatagaaattcaggggattccttttccctcggatttgattctgctagacaccaagaacttggatgtgatccttgggatgaattggttggctcaattccaaggagtagtggattgcgcgagacgcactgtcactctgtaccgaggtccggaacaaccggttgttttctttgcacccccaacctctgtcaggagttcagaactgcatcagataggactgtcagaaatccccatcgtcagggagttcggagatgtgtttccggaagaactacctggtatgccgcccaagcgagagattgagttccgaatagatcttgctccaggaaccattcctctgtacaagcgaccctaccgtatggcagcaaatgaactggccgaagttaagaaacagttggaagagttgacagaaaaggggtatatacgtccgagcacttccccctggggtgctcctgtgatttttgtggagaagaaagacaagacgaagaggatgtgcgttgactacagagctctcaatgaagtcaccatcaaaaacaagtaccctcttccccggatcgatgatctgttcgatcagcttaaaggtgccactgtattctctaagatcgatcttcgttccggatatcaccaattacgtattcgtgaagaagatattccgaagaccgcattcaccacgcgatacggactgtatgaattcacggtgatgtcattcggtttaaccaatgcacctgccttcttcatgaacttaatgaacaaagtgttcatggaatacttggataagtttgttgtggttttcattgatgacattctgatatactcacaatcggaggaagaccatcagcaccatctccgcctggtgttgggaaagttgcgggaacatcaattgtatgccaaacttagcaagtgtgagttctggttgtccgaagtcaaattcttagggcacgtgatatctgctaaaggtgttgctgtggaccccgaaacagtgaccgctgtcactgattggaagcaatccaaaacagtcactcaagttcgcagtttcttaggtttggcaggatactaccggaggttcatcgagaacttctccaaaatcgctcgacccatgacacagttgttgaagaaagaagagaaatttgtgtggagcccgcaatgcgagaaggcgttcaaaactctcaaagaaaagctggttgcctcgccagtgttaatcttgccggatactcgcaaggatttcatggtgtattgtgacgcttcgcgccaaggattggggtgcgtgctcatgcaggacggtcatgtggtggcctatgcctcacgccagctacggccccatgaaggcaactaccctacccatgacttggagttagccgcggtggttcatgctctaaaaatctggcggcactacctcattgggaatcgctgtgaaatatatactgatcataagagtttgaaatacatcttcactcagtcggacctgaatcttcggcagaggagatggttagaactcatcaaggattatgatgtgggaattcactatcatcctggtaaggccaacgtggtcgctgacgctctaagtcgaaagagccattgcaacactcttaacatctgtggcattccacccgaacttaatcaacagatggcagcccggaacctaagcatagttagtcgtggattcttggctgcgttggaagccaagcctaccttgctcgatcaaatccgcgaggctcagaagaatgatccggacatgcatggact

SEQ ID NO: 14102 - DNA, 5208 bp, Oryza sativa
  Clone ID: TFbOSC12557j.C1.o1.fg
atgactggcttcgtcttggagctgcgaggcatgtgcgtggtcttggggtatccacatggagtggattaccaggccaggccgctcccggagcaggagggtgaggatgcagagcctcacgctggttgggaggtcactgcagtgattctctccggctctcccgagcggacttcgctggcagtcaccgcgggtggggattccttccccgccgcttgccagaacgccgctctcctcgccatcggcacccttcaccagcgctacccggacgagttgcagcactcgccctaccgctaccacccccgtcgcggaggagccagcgaccacgccaccttccgagacgctagctcggaggatgacgctaccgtcgtgcatctggcacgcatggtggaggcgtacgacgcggctcgtatcgacttccaccagatggtgcgtcgtggcatggtggagaacaacatgaagatcctggagctgcgtcaggagaacctgcagctcaagaaggacctcgacgcgttggaggcgcagccgcaccagctcaaggtcgcccagggagagatcagccgtcccaagcgtcgccgcgtctgccgcagccagaagatcaccgcccgcaagagcacctccaggcccgagcttgtccgtcagtccctggcgtggacttgcttcgtcgagacccctcgtgccgagcctgcgcccgtggttccccaggagggggaagcctccggcgttggtagctcggagggtgcgctgttgctcaccttccgtcctggcccgtcgcagcggagaaatgttaacaccggtgaaggcaaccaacccgagggcagcaaccccaacccccaaggcaatccacctccaccaccaccaccagacaccaacgccattctcacccagatcctcgcccagcaagccaacatgatgaatgctttcctccaccacctccaaaatccaccacaacagaatgctccaccacctcctccccaacactccaaactcgccgaattcctccgcatccgcccacccaccttctctagctccaacaatcctgtagatgcgttggattggttgcatgccgtggggaagaagctagacacggtgcagtgcagcgacgaagagaaagtcatcttcgccgcccatcagctgcaaggacccgcatctctctggtgggaccatttccaggctgcgcagccagaagggcaaccgatcacttggactcgcttcaccgccgctttccggagaacccatgtgcccgctggagtcgtggctcttaagaaaaaggaattccgggagttgaagcaaggcaaccgctccgtgatggagtacttgcatgagttcaacaatctggcccgttacgcccctgaggatgtgcgggaagatgaggagaagcaagagaagttcctggcaggaatggaccccgagctgtccgttcgtctagtctctggggactacccggacttccaacgactggtggacaagagcatccgcttggaagccaagcacaaggagctggagtcgcacaagcgccgcttggcgaacatccgcaatcaacagggtgctaaccagagggtccgctacaccaatccctacccagggggatcctcctcgcagcagcagcagcagcagcagcagcaacctcgctccgcgcctcgacctcaattcgtggtgcgcgtcccacagcagcaaccgcagcagaatcagcaagggactcgtgcaccccgtcctcctacgccagctgggcagcccgttcaaggccgcagggacgcttcaggtccgcagcggctgtgcttcaactgcttcgagcccgggcactttgcggataaatgcccaaagccaaggcgtcagcaaggccaagcgcctccccgccccaacaacggtggcaaggatgtcatccgtggtcgcgtgaaccacgtgacggccgaggacgtgctgacaactccggacgtcatcgttggtacgttcctcgtccattccatccccgctacaattttgttcgactctggagcttcccactcgtttatatctgtgccattcgtggggaaaaatcagttgggggtagaaaggcttagaaaccctctgctcatcaccacccctggaggggttatgacagcaaagtattatagccccgccgttcctatagaaattcagggaattccttttccctcggatctgattctgttagacacaaagaacttggatgtgattcttgggatgaattggttggctcaattccaaggagtagtggattgcgcgagacgcactgtcactctgtaccgaggaccggaacagccggtctgtcagaaatccccatcgtcagagagttcggagatatttccggaagaactacctggtatgccgcctaagcgagagattgagttccggatagatcttgctccaggaaccactcctctgtacaagcgaccctaccgtatggcagcaaatgaactggccgaagtaaagaaacagttggaagagttgaaagaaaaggggtacatacgtccgagtacttccccatggggtgctcctgtgatttttgtggagaagaaagacaaaacgaagaggatgtgcgttgactacagagctctcaatgaagttaccatcaaaaacaagtaccctcttcctcgaatcgatgatctgttcgaccagcttaaaggtgccactgtattctccaagattgatcttcgttccggatatcaccaattacgtattcgtgaagaagatattccgaagaccgcattcaccacgcgatatgggctgtatgaattcacggtgatgtcgttcggtttgaccaatgctcctgccttcttcatgaacttgatgaacaaagtgttcatggaatacttggataagttcgttgtggttttcatcgacgacattctgatatactcacaaacagaagaagaccatcagcaccatctccgtctggtattgggaaagctgcgggaacatcaattgtatgccaagcttagcaagtgtgagttctggttgtccgaagtcaaattcttggggcacgtgatatctgctaaaggagttgctgtggatcccgaaacagtgaccgccgtcaccgaatggaagcaacccaagacagtcactcaaattcgcagtttcttgggtttggcaggatactaccggagattcatcgagaacttctccaagatcgctcgacccatgacacagttgttgaagaaagaagagaaatttgtgtggagcccgcagtgcgagaaggcgttccaaactctcaaggaaaagctggtttcctcgccagtgttaatcttgccggatactcgcaaggatttcatggtgtattgtgatgcttcgcgccaaggattggggtgcgtgctcatgcaggacggtcatgtggtagcctatgcctcacgtcagctacgtcctcatgaaggcaactaccctacgcatgacttggagctagcagcggtggttcatgctctaaaaatttggcggcactatctcattgggaaccgctgtgaaatatatactgaccataagagtttgaaatacatcttcacccagtcggatctgaatcttcggcaaaggagatggttagaactcatcaaggattatgatgtgggaatacactatcatcctggtaaggccaacgtggttgccgacgctctaagtcgaaagagccactgcaacactctcaacgtccgaggcattccacccgagcttaatcaacagatggaagccctgaacctaagcatagttggtcgcggattcttggctgcgttggaagccaagcctaccttgctcgatcaaatccgcgaggctcagaagaatgatccggacatgcatggactcctcaagaatatgaaacagggtaaagccgcaggtttcacagaggatgaacacggaactctatggaacggaaagcgggtgtgcgttcccgataacagagaacttaaacagctgatacttcaggaagctcacgaaagtccttattccattcacccgggcagtaccaagatgtacttagacttgaaggagaaatactggtgggtcagcatgaagcgggaaattgcagagtttgtggctctatgtgatgtgtgccagcgtgtcaaggcagaacaccaacgaccggccggacttctccaacctctccaagtgccggaatggaaatgggatgaaattgggatggatttcatcaccggacttccaaaaacccaaggaggatatgattccatatgggtagttgtggatcgattaaccaaggtagctcgattcattcctgtgaagaccacctatggagggaacaaactagcggagctctacttcgctaggatcgtgagtctccatggtattcccaagaaaatcgtatctgataggggaagccaattcacctctcacttttggaagaagctccaagaagagctgggtactcgattgaatttcagcaccgcgtatcacccgcagacagatggacagaccgagcgtctgaatcagattctagaagatatgctccgcgcatgtgtcctagatttcgggaagacttgggataagagtctcccctatgccgagttctcctacaataacagctatcaagccagcatacaaatggcaccctatgaagcgttgtacgggcgcaaatgccggacaccgctattgtgggaccaagtcggagaaagccaagtgttcgggactgatatcctgagagaagctgaagctaaagtcagaatcattcgggataatctaaaggtggcacaatctcggcagaaaagttatgcagataaccgtcgtcgtgacttggaattcgcagtggatgattttgtgtaccttcgggtcacgccattgcgaggcgtgcacaggtttcagacgaaagggaagctcgcacctcggtatgtgggtcccttccgtatcatcgctcgacgcggagaagttgcttaccagctggagttgcccgcctccttgggcaacgtgcatgatgtgttccatgtgtcgcaactcaagaaatgtctccgagtgccatccgagcaggccaactcagagcaaattgaagtccgcgaagacctgacctatgtggagaggccagtgaaaatcctggacaccatggagcgcaggaccaggaaccgagtaatccgtttttgcaaggtccagtggagcaaccacgccgaagaagaagctacttgggagcgcgaagacgagctgaaggcagcccatcctgatctcttcgccagttcttccgaatctcggggtcgagattccgtttaa

SEQ ID NO: 14103 - DNA, 2013 bp, Oryza sativa
  Clone ID: TFbOSC12919j.C1.o6.fg
atgactggcttcgtcttggagctgcgaggcatgtgcgtggtcttggggtatccacacggagtggattaccaggtcaggccgctcccggagcaggagggtgaggatgcagagcctcacgctgcttgggaggtcactgcagtgatcctctccggctctcccgagcggacttcgctgacagtcaccgcgggtggcgactccttccccgccgcttgccagaacgccgctctcctcgccatcggcactcttcaccagcgctacccggacgagttgcagcactcgccctaccgctaccaccctcgtcgcggaggagcccgcgactacgccaccttccgagacgccagctcggaggatgacgctaccgtcgtgcatctggcacgcatggtggaggcgtacgacgcggctcgtatcgacttccatcagatggtgcgccgtggcatggtcgagaacaacatgaagatcctggagctgcgtcaagagaatctgcagctcaagaaggacctcgacgcgttggaggcgcagctgcatcagctcaagatcgcccagggagagatcagccgccccaagcgtcgccgcgtctgccgcagccagaagatcaccgcccgcaagagcacctccaggcccgagcttgttcgtcagtccctggcgtggacttgcttcgtcgagaccccttgtgccgagcctgcgcccgtggttccccaggagggggaagcctccggcgttggtagctcggagggtgcgctgttgctcaccttccgtcctggcccgtcgcagcgctcttcttctctgtttgctggttccgtgtggggttttcagatggtgacgaccaggagaaatgttaacaccggtggaggcaaccaacccgaaggcagcaaccccaacccccaaggcaacccacctccaccaccaccaccagacaccaacgctattctcacccagatcctcgcccaacaagccaacatgatgaatgctttcctccaccacctccaaaattcaccacaacagaatgctccaccaccccctccccaacactccaaactcgccgaattcctccgcatccgcccacctaccttctccagctccaacaaccctgtggatgctttggattggttgcatgccgtggggaagaagctagacacggtgcagtgcagcgacgaagagaaagtcatcttcgccgcccatcagctgcagggacccgcatctctctggtgggaccatttccaggccacgcagccagaagggcaaccgattacttggactcgcttcaccgccgctttccggagaacccatgtgcccgctggagtcgtggctcttaagaagagggaatttcgggagttgaagcaaggcaatcgctccgtgatggagtatttgcatgagttcaacaatctagcccgttatgccccggaggatgtgcgggaagatgaggagaagcaagagaagttcttggcaggaatggaccctgagctgtccgttcgtctcgtctctggggactatcctgattttcaacgactggtggacaagagcatccgcttggaagccaagcacaaggagctggaatcgcacaagcgccgcttggcgaatttccgcaatcagcagggtgctaaccagagggtccgctacaccaatccctacccagggggatcctcctctcagcagcagcagcagcagcagcaacctcgctccgcgcctcgacctcaattcgtggtgcgcgtcccacagcagcaacagcagcagaatcagcaagggactcgtgcgccacgtcctcctacgccaactgtgcagcctgttcaaggtcgcagggacgcttcaggtccgcagcgtctgtgcttcaactgcttcgagcccgggcactttgcggataaatgcccaaagccaaggcgtcagcaaggccaagcgcctccccgctccaacaacggtggcaaggatgtcattcggggtcgtgtgaatcacgtgacggccgaggacgtgctgacaactccagacgtcatcgttgaagttcagaactgcatcagatag

SEQ ID NO: 14104 - DNA, 4218 bp, Oryza sativa
  Clone ID: TFbOSC13213j.C1.o4.gm
atggttatgccgctctctctgtttgctggttctgtgtggggttttcagatggtgacgaccaggagaaatgctgccaccagtgatggcaaccaacttgaaggcagcaaccacaacaaccatggcagcccacctccacctcctccaccgcctccaccaccaccaccagacaccaacgccattctcacccaaatcctcacccagcaggccaacatgatggctgctttcctccaccacatccaaaatccgccacaacataatgctccaccaccacccccacaacactctaaactcgccgagttcctacgcatccgtccacctaccttctctagctccaacaaccccgtggatgtgttggattggttgcatgccgtggggaaaaagctagacactgtgcagtgcagcgatgaggagaaagtcgtcttcgccgcccaccaactgcagggacccgcatctctatggtgggatcatttccaggctacgcagccagaggggcagcctattacttgggcccgcttcaccgccgccttccggaggacccatgtgcccgccggagtcatggcccttaagaaaagggagttccgagagttgaagcaaggcaaccgctccgtgatggagtatttgcatgagtttaacaacttggcccggtacgccccggaggatgtgcgggaagatgaggagaagcaagagaagttcttggcaggaatggacccggagctgtctgtccgtctagtctccggtgactatccggatttccaacgtctggtggacaaaagcatccgcttggaagccaagcacaaggaactggagtcgcacaagcgtcgcttggcgaatttccgcaaccaacagggtgctaaccaaaggatccgctacaccaatccctatccagggggatcttcctcgcagcagcagcaacctcgctccgcgcctcgacctcaattcgtggtgcgcgtcccacagccgcagcaacagcagagccagcaagggacccatgcgccccgtcctcctacgccagccgcgcagtctggtcaaggccgcagggacgttcaaggtccgcagcgtctgtgcttcaactgcttcgagcccgggcactttgcggataaatgcccgaagtcgaggcgccagcaaggccaagcgcctccctgctccaacaacggtggtaaggatgtcattcggggtcgtgtgaaccacgtgacggccgaggacgtgctgacaactccagacgtcatcgttggtacgttcctcatccattccatccctgctaccattttgttcgactctggagcttcccactcgtttatatctgtgccattcgtggggagaaatcagttgggggtagaaaggcttaggaaccctctactcatcaccacccctggaggggttatgacagcaaagtattatagtcctgccgtccctatagaaattcaggggattccttttccctcggatctgattcttctagacaccaagaacttggatgtgatccttgggatgaattggttggctcaattccaaggagtagtggattgtgcaagacgcactgtcactctgtaccgagggccggaacaaccggttgttttctttgcacctccaacctctgtcagtagttcagaacttcatcagataggactgtcagaaatccccattgtcagagagttcggagacgtgtttccggaagaactacccggtatgccgcccaagcgagagattgagttccggatagatcttgctccaggaaccactcctctgtacaagcgaccctaccgtatggcagcaaatgaactggccgaagttaagaaacagttggaagagttgaaagaaaagggagctctcaatgaagtcaccatcaaaaacaagtaccctcttccccggatcgatgatctgttcgatcagcttaaaggtgccacggtattctccaagattgatcttcgttctggatatcaccagttgcgcatccgtgaagaagatattccgaagaccgcattcaccacgcgatacggactgtatgaattcacggtgatgtcgttcggtttaaccaatgctcctgccttcttcatgaacttaatgaacaaagtgttcatggaatacttggataagtttgttgtggttttcattgatgacattctggtatactcacaatcagaggaagaccatcagcaccatctccgtctggtgttgggaaagttgcggaaacatcaattgtatgccaaacttagcaagtatgagttctggttgtccgaagtcaaattcttagggcacgtgatatccgctaaaggagttgctgtggatcccgaaacagtgaccgccgtcaccgattggaagcaacccaagacagtcactcaaattcgcagtttcttaggtttggcaggatactaccggaggttcatcgagaacttctccaaaatcgctcgacccatgacacagttgttgaagaaagaggagaaatttgtgtggagtccgcaatgcgagaaggcgttcaaaactctcaaagaaaagctggtttcctcactagtgttaatcttgccggatactcgcaaggacttcatgaggagatggttagaactcatcaaggattatgatgtgggaattcactatcatcctggtaaggccaacgtggtcgccgatgctcaaagtcgaaaaagccattgcaacactcttaacgtccgtggcattccacccgaacttaatcaacagatggaagccctgaatctaagcatagtgggtcgcggattcttggctgcgttggaagccaagcccaccttgctcgatcaaatccgcgaggctcagaagaacgatccggacatgcatggactcctcaagaatatgaaacaaggtaaagccgctggtttcacagaggatgaacacggaaccctatggaacggaaatcggagttcgtggccctttgtgatgtgtgccagcgtgtcaaggcagagcaccaacgaccggccggacttctccaacctctccaagtaccagaatggaaatggaatgaaattgggatggatttcatcaccggacttccaaaaacccaaggtggatatgattctatatggcaccgcgtatcacccgcagacagatggacagaccgagcgtctaaatcagatcctagaagatatgcttcgcgcatgtgtcctagatttcgggaatacctgggataagagtctcccctatgccgagttctcctacaataacagctaccaagccagcatacaaatggcaccttatgaagcgttgtatgggcgcaaatgccggacaccgctattgtgggaccaagttggggaaagccaagtgttcgggaccgatatcctgagagaagctgaagctaaagtcagaaccattcgggataatctaaaggtggcccagtctcggcagaagagttatgcagacaaccgacgccgtgacctggaattcgcagtggatgactttgtgtatcttcgggtcacgcccttgcgaggtgtacacaggtttcagacaaaggggaagctcgcacctcggtttgtgggtcctttccgtatcattgctcggcgcggagaagtcgcttaccagttggagctgcccgcctccttgggcaacgtgcatgatgtgttccatgtgtcgcaactcaagaaatgtcttcgagtgccatccgagcaggccgactcagagcaaattgaagttcgcgaagacttgacctacgtggagaggccagtgaaaatcctggacaccatggagcgaaggaccaggaaccggtccgccgccgtcgtcgccccggaccttctcccgcttcggcgccgcctccttcggtttcgccgcaacctcgccgacctcgtccacccctccgtttcgctcgccgaccgccggaacgccgccgtccccgtctacccgagccgcgccgccgccttcctccgctccggtcgccgttcccgttgtcgccgtcgacccggggtgagctgtggaccgccgattcgtttcccccttcccttccctctctcgggcgccgctccgccgcgccggtggtcgccggcggcgaccatcgtggcgcgggtgcgccgcctcccgtcggctgtgccggcgtggccgccttcgggcgcgccccgcggctgccatgtggggcccggccgtcagccgcccgcgccctcggacgctgcagcttcggaagatccgctcttcgtgaaggttgaagcgacgtttgggaaagtgagcaaggcaagtcacatcatccttgaacatattgaatcctag

SEQ ID NO: 14105 - DNA, 1773 bp, Oryza sativa
  Clone ID: TFbOSC13237j.C1.o1.fg
atgtcatggcacagggccggtgtcctgctgctaggggctcagtcctgcctacctgtcccgggggttccggccatggccggcagcgtcagtcgtcgtggtctggacatgactggtttcgtcttggagctgcggggtatgtgcgttgtcctggggtatccgcatggactggactaccagggcaggccgcttccggagcaggagggtgacgatgcagagccccacgcttcttgggaggttactgcagtgatcctcactggctcacccgagcggacttcgttggcagtcaccgcgggtggagattctttctccgccgcttgccagagcgccgctctcctcgccatcggcactcttcaccagcgctacccggacgagctgcagcactcgccctaccgctaccaccctcgtcgcggaggagcccgcgactacgccaccttccgggatgctagctcggaggatgacgctaccatcatgcacctggcgcgcatggtggaggcgtacgacgcggctcgtatcgacttccatcagatggtgcgccgtgggatggtcgagaacaacctgaagatcctagagctgcgtcaggagaatctgcagctgaagaaggacctagacgcagtggaggcacagctgcatcagctcaagatcgcccagggagagatggtgacgaccaggagaaatgctgccaccagtgatggcaaccaacttgaaggcagcaaccacaacaaccatggcagcccacctccacctcctccaccgcctccaccaccaccaccagacaccaacgccattctcacccaaatcctcacccagcaggccaacatgatggctgctttcctccaccacatccaaaatccgccacaacataatgctccaccaccacccccacaacactctaaactcgccgagttcctacgcatccgtccacctaccttctctagctccaacaaccccgtggatgtgttggattggttgcatgccgtggggaaaaagctagacactgtgcagtgcagcgatgaggagaaagtcgtcttcgccgcccaccaactgcagggacccgcatctctatggtgggatcatttccaggctacgcagccagaggggcagcctattacttgggcccgcttcaccgccgccttccggaggacccatgtgcccgccggagtcatggcccttaagaaaagggagttccgagagttgaagcaaggcaaccgctccgtgatggagtatttgcatgagtttaacaacttggcccggtacgccccggaggatgtgcgggaagatgaggagaagcaagagaagttcttggcaggaatggacccggagctgtctgtccgtctagtctccggtgactatccggatttccaacgtctggtggacaaaagcatccgcttggaagccaagcacaaggaactggagtcgcacaagcgtcgcttggcgaatttccgcaaccaacagggtgctaaccaaaggatccgctacaccaatccctatccagggggatcttcctcgcagcagcagcaacctcgctccgcgcctcgacctcaattcgtggtgcgcgtcccacagccgcagcaacagcagagccagcaagggacccatgcgccccgtcctcctacgccagccgcgcagtctggtcaaggccgcagggacgttcaaggtccgcagcgtctgtgcttcaactgcttcgagcccgggcactttgcggataaatgcccgaagtcgaggcgccagcaaggccaagcgcctccagacgtcatcgttgttgcgcatccgtga

SEQ ID NO: 14106 - DNA, 1570 bp, Oryza sativa
  Clone ID: TFbOSC13264j.C1.o2.gm
atggttacgccgatggtgacgaccaggagaaatgttaacaccggtgaaggcaaccaacccgagggcagcaaccccaacccccaaggcaacccacctccaccaccaccaccagacaccaacgccattctcacccaaatcctcgcccagcaagccaacatgatgaatgctttcctccaccacctccaaaatccgccacaacagaatgctccaccaccccctccccaacactccaaactcgccgaattcctccgcatccgcccacccaccttctctagctccaacaatcccgtagatgcgttggattggttgcatgccgtggggaaaaagctagacacggtgcagtgcagcgatgaggagaaagtcgtcttcgccgcccatcagctgcaggggcccgcatctctctggtgggaccacttccaggctacgcagccagaagggcaacctattacttggactcgcttcaccgccgctttccggaaaacccatgtgcccgccggagtcgtggctcttaagaaaagggaattccgagagttgaagcaaggcagccgctccgtgatggagtatttgcatgagttcaacaatctagcccgttatgccccggaggatgtgcgggaagatgaggagaagcaagagaagttcttggcaggaatggaccctgagctgtccgttcgtctagtctctggggactatcctgattttcaacgactggtggacaagagcatccgcttggaagccaagcacaaggagctggaatcgcacaagcgccgcttggcgaatttccgcaatcagcagggtgctaaccagagggtccgctacaccaatccctacccagggggatcctcctcgcagcagcagcagcagcagcagcagcaacctcgctccgcgcctcgacctcaattcgtggtgcgcattccacagccgcagcagcagcagaatcagcaagggactcgtgcaccccgtcctcctacgccaactgtgcagcctgttcaaggtcgcagggacgctcaaggtccgcagcggctgtgcttcaactgcttcgagcccgggcactttgcggataaatgcccgaagccaaggcgtcagcaaggccaagtgcctccccgctccaacaacggcgggaaggatgtcattcggggccgtgtgaatcatgtgacggccgaggacgtgctgacaactccagacgtcatcgttgaacttcatcagataggtctgtcagaaatccccatagtcagagagttcggagacgtgtttccggaagaactacctggtatgccgcccaagcgagagattgagttccggatatatcttgctccaggaaccactcctctgtacaagcgaccctaccgtatggcagcaaatgaactggccgaagttaagaaacagttggaagagttgaaagaaaaggggtatatacgtccgagtacttccccttggggtgctcctgtgatttttgtggagaagaaagacaaaacgaagaggatgtgcgttgactacagagctctcaatgaagtcaccatcaaaaacaagtaccctcttccccggatcgatgatctgttcgatcagcttaaag

SEQ ID NO: 14107 - DNA, 1341 bp, Oryza sativa
  Clone ID: TFbOSC13325j.C1.o1.fg
atgatgaccgctttcctccaccacctccaaaatccgccacaacagaatgctccaccaccacctccccaacactctaaactcgccgagttcctccgcatccgcccacccaccttctctagctccaacaatcccgtggatgcgttggattggttgcatgccgtggggaagaagctggacactgtgcagtgcagtgatgaagagaaagtcatcttcgccgcccatcagctgcagggacccgcatctctatggtgggaccacttccaggctacgcagccagagggacagccgattacttgggctcgcttcaccgccgctttccggagaacccatgtgcccgccggagtcgtggctctcaagaagagggaattccgagagttgaagcaaggcaaccgctccgtgatggagtatttgcatgagttcaacaatctggcccgttacgctccggaggatgtgcgggaagatgaggagaagcaagagaagttcctggcaggaatggaccccgagctgtccgtccgtctagtctctggggactatccggatttccaacgtctggtggacaagagcatccgcttggaggccaagcacaaggagctggagtcgcacaagcgccgcttggcgaacttccgcaatcagcagggtgctaaccagagggtccgctacaccaatccctatccagggggatcctcctcgcagcagcaacaacagcagcagcaacctcgttccgcgcctcgacctcaattcgtggtgcgcgtcccacagccgcagcagcaacagaatcaacaagggactcgtgcgccccgtcctcctacgccagctgtgcagcccgttcaaggccgcagggacgctcaaggtcagcagcgtctatgcttcaactgcttcgagcccgggcactttgcggataaatgcccgaagccaaggcgtcagcaaggccaagcgcctccccgctccaacaacggagggaaggatgtcattcggggccgtgtgaatcacgtgacggccgaggacgtgctgacaactccagacgtcatcgttgagaagaaagacaagacgaagaggatgtgcgttgactacagagctctcaatgaagtcaccatcaaaaacaagtaccctcttcctcggatcgatgatctgttcgatcagcttaaaggtgccactgtattctccaagattgatcttcgttccgggtaccaccaattacgtatccgcgaggaagatattccgaagaccgcattcaccacgcgatacgggctgtatgaattcacgaggaagaccatcaacaccatctccgtctggtgttgggaaagttgcgggaacatcaattgtatgccaagcttagcaagt

SEQ ID NO: 14108 - DNA, 1941 bp, Oryza sativa
  Clone ID: TFbOSC13698j.C1.o1.fg
atgggcactcttcaccagcgctacccgtacgagttgcaacactcgccctaccgctaccaccctcgtcgcggaggagcccgcgactacgccaccttccgggatgctagctcagaggatgacgctaccatcgtgcacctggcgcggatggtggaggcgtacaacgcggctcgtatcgacttccaccagatggtacgtcgcgggatggtcgagaacaacatgaagatcctggaactgcgccaggagaacctgcagctcaagaaggacctagacgcggtggaggcgcagctgcatcagctcaagatcgcccagggaaaggtctgtcgccccaagcgtcgccgcgtctgccgcagccagaagatcaccgcccgcaagagcacctccaggcccgagcttgttcgtcagtccctggcgtggacttgcttcatcgagacccctcgtgccgagcccgcgcccgtggttccccaggagggggaagcctccggcgtcgctctttctctgtttgctggttccgtgtggggttttcagatggtgacgaccaggagaaatgcggttaccggtgatggcaaccaacccgaaggcagcaaccacaaccaccaaggcaacccaccttcaccttctcctcctcctccaccaccaccaccagacaccaacgccattctcacccaaatcctcgcccagcaggccaacatgatgactgctttcctccaccacctccaaaatccgccacaacagaatgccccaccaccacctccccaacactctaaactcgccgagttcctccgcatccgcccacctaccttctctagctccaacaaccccgtggatgcgttggattggttgcatgccgtggggaaaaagctagacactgtgcagtgcagcgatgaggagaaagtcatcttcgccgcccatcagctgcagggacccgcatctctatggtgggaccatttccaggctacgcagccagagggacagcctattacttgggctcgcttcaccgccgcttttcggaggacccatgtgcccgctggagtcgtggcccttaagaaaagggaattccgagagttgaagcaaggcaaccgctccgtgatggagtatttgcatgagttcaacaacctggcccgttacgctccggaggatgtgcgggaagatgaggagaagcaagagaagttcctggcaggaatggaccccgagctgtccgtccgtctagtctctggggattatccggatttccaacgtctggtggacaagagcatccgcttggaagccaagcacaaggaactggagtcgcacaagcgccgcttggcgaatttccgcaaccaacagggtgctaaccaaagggtccgctacaccaatccctatccagggggatcctcctcgcagcagcaacagcagcagcagcaacctcgctccgcgcctcgacctcaattcgtggtgcgcgtcccacagccgcagcaacagcagaatcaacaagggactcgtgcgccccgtcctcctacgcaaactgtgcagcctggtcaaggccgcagggacgctcaaggtcagcagcgtctgtgcttcaactgcttcgagcccgggcactttgcggataaatgcccgaagccaaggcgtcagcaaggccaagcgcctccccgccccaacaacggtgggaaggatgtcattcggggtcgtgtgaaccacgtgatggccgaggacgtgctgacaactccagacgtcatcgttgtgaccgccgtccccgattggaagcaacccaagacagttactcaagtccgcagtttcttaggtttggcaggatactaccggagcgtgtcaaggcagagcaccaacgaccggccggacttctccaacctctccaagtaccagaatggaaatgggatgaaattgggatggatttcatcaccggacttccaaaaacccaaggtggatatgattctatatgggtag

SEQ ID NO: 14109 - DNA, 5235 bp, Oryza sativa
  Clone ID: TFbOSC13791j.C1.o1.fg
atgtcatggcacagggccggtgtcctgctgctaggggctcagtcctgcctacctgtcccgggggttccggccgtaggtggggttgggtcggtactcttgtctatggctaggatgggttggaaactatgtcacgtcttccgtccgtataccgtggtgatggccggcagcatcaaccgtcgtggtctggacctgactggcttcgttttggagctgcggggcatgtgcgttgtcctggggtatccgcatggagtagactaccagggcaagcagctcccggagcaggagggtgacgatgcagagccccacgctgcttgggaggttactgcagtgatcctcactggctcacccgagaggacttcgttggcagtcaccgcgggtggagattccttctccgccgcttgccagaacgccgcactcctcgccatcggcactcttcaccagcgctacccggacgagttgcagcactcgccctaccgctaccaccctcgccgcggaggagcccgcgactacgccaccttccgggatgctagctcggaggatgacgctaccatcatgcacctggcgcgcatggtggaggtgtacgacgcggcccgtatcgacttccatcagatggtgcgtcgcgggttggtcgagaacaacatgaagatcctggagctgcgtcaggagaatctgcagctggagaaggacctagacgcagtggaggcgcagctgcgtcagctcaagatcgcccagggagaggtctgtcgcctcaagcgccgtcgcgtctaccgcagcctgaagatcaccgcccgcaagagtacctccaggcccgagcttgttcgtcagtccctggcgtggacctgcttcgtcgagacccctcgtgccgagcccgcgcccgtggttcctcaggaggatggagcctccggcgttggcagcacgaaggatgcgctgttgctcaccttccgccctggcccgtcggagcaagtcgtatggggcatggttatgccgatggtgacgaccaggagacgtgctaataccggtgatggcaatcaacccgaaggtagcaaccacaacaaccatggcagcccacctccacctcctcctccgcctccaccaccaccaccagacaccaacgccatcctcacccaaatcctcgcccagcaggccaacatgatgcctgctttcctccaccacatccaaaatccgccacaacataatgctccaccaccgcccccacaacactctaaactcgtcgagttcctccgcatccgtccgcctaccttctctagctccaataaccccgtggatgcattggattggttgcatgccgtggggaaaaagttagacaccgtgcagtgcagcgatgaggagaaagtcatcttcgccgcccaccaattgcaggggcccgcatctctatggtgggaccatttccaggctacgcagccagaagggcagccttttacttgggcccgcttcaccgccgctttccggagaacccatgtgcccgctgaagtcatggcccttaagaaaagggaattccgagagttgaaacaaggcaaccgctctgtgatggagtatttgcatgagtttaacaacctggcccgatacgccccggaggatgttcgtgaagataaggagaagcaagagaagttcttggcaggaatggaccctgagctgtccatgcgtctggtctccggggactatccggatttccagcgtttggttgacaagagcatccgcttggaagccaagcacaagaaactggagtcgcacaagcgttgcttggcgaatttccgcaatcaacagggggctaaccaaagggtccgctacaccaatccctatctagggggatcgtcctcgcagcagcaacagcagcagcaacctcgctccgcgccccgacctcatttcgtggtgcgcgtcccacagccgcagcaacagcagagtcagcaagggactcgtgcgccccgtcctcctacgccagccgtgcagcctggtcaaggccgcagggacgttcaaggtcagcagcgtctgtgcttcaactgcttcgagcctgggcactttgcggataaatgcccaaagccgaggcgccagcaaggccaaccgcctccccgccccaacaacgatggtaaggatgtcatttggggtcgggtgaaccacgtgacggccgaggatgtgctgacaactccaaacgtcatcgttggtacgttcctcattcattccatccctactaccattttgttcgactctggagcttcccactcgtttatatctgtgccattcgtggggagaaatcagttgggggtagaaaggcttaggaactctctgctcatcaccacccctagaggggttatgacagcaaagtattatagccctgccgttcctatagaaattcagggaattccttttccctcggatctgattcttctagacaccaagaacttggatgtgatccttgggatgaattggttggctcaattccaaggagtagtggattgtgcaagacgcactgtcactctgtaccgagggccggaacaaccggttgttttctttgctcccccaacctctgtcggtagttccgaacttcatcagataggactgtcagaaatccccatcgtcagagagttcggagacgtgtttccggaagaactacccggtatgccgccgaagcgagagattgagttccggatagatcttgctccaggaaccactcccctgtacaagcgaccctaccgtatggcatcaaatgaactggccgaacttaaaggtgccactgtattctccaagattgatcttcgttccggatatcaccaattgcgtattcgtgaagaagatatccctaagaccgcattcaccacgcgatacggactgtatgaattcacggtgatgtcgttcggtttaaccaatgctcctaccttcttcatgaacttaatgaacaaagtgttcatggaatatttggataagtttgttgtggttttcattgacgacattctggtgtactcacaatcagaggaagaccatcagcaccatctccgtctggtgttgggaaagttgcgggaacatcaattgtatgccaagcttagcaagtgtgagttctggttgtccgaagtcaaattcttagggcacgtgatatctgctaaaggagttgctgtggaccccgaaacagtgaccgccgtcactggttggaagcaatccaagacagtcactcaaattcgcagcttcttgggtttggcaggatactatcggaggttcatcgagaacttctccaaaatcgctcgacccatgacacagttgttgaagaaagaagagaaatttgtgtggagcccgcaatgcgagaaggcgttccaaactctcaaggaaaagctggtttcctcgccagttttaatcttaccggatactcgcaaggacttcatggtgtattgtgacgctttgcgccaaggattggggtgcgtgctcatgcaggaaggtcatgtggtagcctatgcctcacgccagctacggccccatgaaggcaactaccctacccatgatttggagttagccgctgtggttcatgctctaaagatctggcggcactatctcattgggaatcgctgtgaaatatatactgatcataagagtttgaaatacatcttcactcagtcggatctgaatcttcggcagaggagatggttagaactcatcaaggattatgatgtgggaattcactatcatcctggtaaggccaacgtggtcgctaacgctctaagtcgaaaaagccattgcaacactcttgacgtccgtggcattccacccgaacttaatcaacagatggaagccctgaacctaagcatagttggtcgtggattcttggctacgctggaagccaagcctaccttgctcgatcaaatccgcgaggctcagaagaatgatccggatatgcgtggactcctcaagaatatgaaacagggtaaagccgctggtttcacagaggatgaacacggaaccctatggaacggaaatcgggtatgcgttccagacgacagagaacttaaacagttgaaacttcaggaagctcacgaaagcccttattccatccaccctggcagtacgaagatgtacttagacttgaaagagaaatactggtgggttagtatgcagcgggaaattgcagagttcgtggccctttgtgatgtgtgccagcgtgtcaaggcagagcaccaacgaccggccggacttctccaacctctccaagtaccagaatggaaatgggatgaaattgggatggatttcatcaccggacttccaaaaacccaaggcggatataattctatatgggtagttgtggaccgactaaccaaggtagctcggtttattcctgtgaagaccacctatggagggaacaaactagccgagctctacttcgctaggatcgtgagtctccatggcgttcctaagaaaattgtatctgataggggaagccaattcacctctcacttttggaagaagctccaagaagagctgcgtacccgattaaatttcagcaccgcgtatcacccgcagacagatggacagaccgagcgtctaaatcagatcctagaagatatgcttcgcgcatgtgtcctagattttgggaagacctgggataagagtctcccctatgccgagttctcctacaataacagctatcaagccagcatacaaatggcaccctatgaagcgttgtatggacgcaaatgccggacaccactattgtgggaccaagttggggaaagccaagtgttcgggactgatatcctgagagaagctgaagctaaagtcagaaccattcgggataatctaaaggtggcacagtcccggcagaagagttatgcagataaccgacgctgtaatctggaattcgcagtggacgattttgtgtaccttcgggtcacgccattgcgaggtgtacacaggtttcagacgaaagggaagctcgcacctcggtttgtgggtcctttccgtatcattgctcgacgcggggaagtcgcttaccagttggagctgcccgcctccttgggcaacgtgcatgatgtgttccatgtgtcgcaactcaagaaatgtcttcgagtgccatccgagcaggccgattcagagcaaattgaagttcgcgaagacttgacctacgtggagaggccagtgaaaatcctggacaccatggagcgcaggaccaggaaccgggtaatccgtttttgcaaggtccaatggagcaaccacgctgaggaagaagctacttggtag

SEQ ID NO: 14110 - DNA, 2991 bp, Oryza sativa
  Clone ID: TFbOSC13812j.C1.o4.gm
gccaacatgatgactgctttcctccaccacctccaaaatccgccacaacagaatgccccaccaccacctccccaacactctaaactcgccgagttcctccgcatccgcccacctaccttctctagctccaacaaccccgtggatgcgttggattggttgcatgccgtggggaaaaagctagacactgtgcagtgcagcgatgaggagaaagtcatcttcgccgcccatcagctgcagggacccgcatctctatggtgggaccatttccaggctacgcagccagagggacagcctattacttgggctcgcttcaccgccgcttttcggaggacccatgtgcccgctggagtcgtggcccttaagaaaagggaattccgagagttgaagcaaggcaaccgctccgtgatggagtatttgcatgagttcaacaacctggcccgttacgctccggaggatgtgcgggaagatgaggagaagcaagagaagttcctggcaggaatggaccccgagctgtccgtccgtctagtctctggggattatccggatttccaacgtctggtggacaagagcatccgcttggaagccaagcacaaggaactggagtcgcacaagcgccgcttggcgaatttccgcaaccaacagggtgctaaccaaagggtccgctacaccaatccctatccagggggatcctcctcgcagcagcaacagcagcagcagcaacctcgctccgcgcctcgacctcaattcgtggtgcgcgtcccacagccgcagcaacagcagaatcaacaagggactcgtgcgccccgtcctcctacgcaaactgtgcagcctggtcaaggccgcagggacgctcaaggtcagcagcgtctgtgcttcaactgcttcgagcccgggcactttgcggataaatgcccgaagccaaggcgtcagcaaggccaagcgcctccccgccccaacaacggtgggaaggatgtcattcggggtcgtgtgaaccacgtgatggccgaggacgtgctgacaactccagacgtcatcgttgagaagaaagacaagacgaagaggatatgcgttgactacagagctctcaatgaagtcaccatcaaaaacaagtaccctcttccccggatcgatgatctgttcgatcagcttaaaggtgccactgtattctccaagatcgatcttcgttccggatatcaccaattacgtatccgtgaagaagatattcctaagaccgcattcaccacgcgatacggattgtatgaattcacggtgatgtcgttcggtttgaccaatgcacctgccttcttcatgaacttaatgaacaaagtgttcatggaatacttggataagtttgttgtggttttcattgatgacattctaatatactcacaatcagaggaagaccatcagcaccatctccgtctggtattgggaaagttgcgggaacatcaattgtatgccaaacttagcaagtgtgagttctggttgtccgaagtcaaattcttagggcacgtgatttctgctaaaggagttgctgtggaccctaaaacagtgaccgccgtcaccgattggaagcaacccaagacagttactcaagtccgcagtttcttaggtttggcaggatactaccggaggtttatcgagaacttctccaaaatcgctcgacccatgacccagttattgaagaaagaagagaaatttgtgtggagcccacaatgcgagaaggcgtttcaaactctcaaagaaaagctggtttcctcgccagtgttaatcttgccggatactcgcaaggacttcatggtgtattgtgacgcttcgcgccaaggattggggtgcgtgctcatgcaggacggtcatgtggtggcctatgcctcacgtcagctacggcctcatgaaggcagctaccctacccatgacttggagttagccgcagtggttcatgctctaaaaatctggcggcactatctcattgggaatcgctgtgaaatatatactgatcataagagtttgaaatacatcttcactcagtcggacctgaatcttcggcaaaggagatggttagaactcatcaaggattatgatgtggggattcactatcatcctggtaaggccaacgtggttgccgacgctctaagtcggaaaagccactgcaacactcttaacgtccgtggcattccactcgaacttaatcaacagatggaagccctgaacctaagcatagttagtcgtggattcttgactgcgttggaagccaagcccaccttgctcgatcaaatccgcaaggctcagaagaacgacccggacatgcatggactcctcaagaatatgaaacagggtaaagccgctggtttcacagaggatgaacacggaaccctatggaacggaaatcgggtatgcgttccagataaccgagaacttaaacagctgatacttcaggaagctcacgaaagtccttattccatccaccctggcagtacgaagatgtacttagacttgaaggagaaatactggtgggtcagtatgaagcgggaaattgcagagttcgtggccctttgtgatgtgtgccagcgtgtcaaggcagagcaccaacgaccggccggacttctccaacctctccaagtaccagaatggaaatgggatgaaattgggatggatttcatcaccggacttccaaaaacccaaggtggatatgattctatatgggtagttgtggatcgattaaccaaggtagctcgatttattcctgtgaagaccacctatggagggaacaagctagccgagctctacttcgctaggatcgtgagtctccatggcgttcccaagaaaatcatatctgataggggaagccaattcacctctcacttttggaagaagctccaagaagagctgggtactcgattgaatttcagcaccgcctatcacccgcagacagatggacagaccgagcgtctaaatcagatcctagaagatatgctccgcgcattgtattag

SEQ ID NO: 14111 - DNA, 1206 bp, Oryza sativa
  Clone ID: TFbOSC13849j.C1.o2.fg
atggtgacaaccaggagaagtgctgctaccggtgaaggcagtcaccccgaaggcagcaaccacaacaaccatggcagcccacctccacctcctcccccgccaccaccaccaccaccaccagacaccaactccatcctcacccaaatcctcgcccagcaggccaacatgatggctgctttcctccatcacatccaaaatccgccacagcataatgttccacctccatcaccacccccgcaacattctaaactcgccgagttcctccgcatccgtccgcctaccttctctagttccaataaccccgtggatgccttggattggttgcatgccgtggggaaaaagttggataccgtgcagtgcaacgatgaggaaaaagtcatctttgccgctcaccaactgcagggacccgcatctctatggtgggacaacttccaggctatgcagccagaaggacagcctattacttgggcccgcttcaccgccgctttccggaggacccatgtgcccgccggagttatggcccttaagaaaagggaattccgggagttgaagcaaggcaaccgctccgtgatggagtatttgcatgagtttaacgacttggcccggtatgccccagaggatgttcgggaagatgaggaaaagcaggagaagtttttggcaggaatggaccctgagctgtccgtgcgtctggtctccggggattatcctgatttccagcgtctggtggacaagagcatccgcttggaagccaagcacaaggaactggagtcacacaagcgtcgcttggcaaatttccgcaatcaacaaggggctaaccaaaggatccgctacaccaatccctatccagggggatcctcctcgcagcagcagcagcagcagcaaccacgctccgcgccccgacctcaattcgtggtgcgtgtcccacagccgcagcaacagcagagtcagcaagggacccgtgcgccccgtcctcatgtgccagccgtgcagcctggacaaggccgcagagacgctcaaggtcagcagcgtctgtgcttcaactgcttcgagcccgggcactttgcggataaatgcccgaagccgcgacgccagcaaggccaagcgcctccccgccccaacaacggtggtaaggatgtcattcggggtcgtgtgaaccatgtgactgccgaggatgtgctgacgactccggacgtcatcgttgcttaa

SEQ ID NO: 14112 - DNA, 2013 bp, Oryza sativa
  Clone ID: TFbOSC14703j.C1.o1.fg
atgactggcttcgttttggagctgcggggcatgtgcgtggtcttgggatatccacatggagtggactaccaggccaggccgctcccggagcaggagggtgaggatgcagagcctcacgctggttgggaggtcaccgcagtgatcctctccggctctcccgagcggacttcgctggcagtcaccgcgggtggagattcctttcccgccgcttgccagaacgccgctctcctcgccatcggcacccttcaccagcgctacccggacgagttgcagcactcgccctatcgctaccaccctcgtcgcggagaagcccgtgacttcgccaccttccgagatgctagctcggaggatgacgctaccgtcgtgcatctggcacgcatggtggaggcatacgacgcggctcgtatcgacttccatcagatggtgcgtcgtggcatggtggagaacaacatgaagattctggagctgcggcaggagaacctgcagctcaagaaggacctcgacgcgttggaggcgcagctgcaccagctcaagatcgcccaaggagaggacagccgccccaagcgccgccgcgtctgccgcagccagaagatcaccgcccgcaagagcacctccagacccgagcttgttcgtcagtccctggcgtggacttgcttcgtcgagacccctcgcgccgagcccgcgcccgtggttccccaggagggggaagcctccggcgttggtagcacggaggatgcgctgttgctcgccttccgtcctggcccgtcgcagcggagaaatgttagcaccggtgaaggcaaccaacccgaaggcagcaaccccaacccccaaggcaatccacctccaccaccaccaccagacaccaacgccattctcacccaaatcctcgcccagcaggccaacatgatgactgctttcctccaccacctccaaaatccgccacagcagaatgctccaccaccacctccacaacactctaaactcgccgagttcctccgtatccgcccacctaccttctctagctccaacaaccctgtggatgcgttggattggttgcatgccgtggggaagaagctggacactgtgcagtgcagtgatgaagagaaagtcatcttcgccgcccaccagctgcaagggccagcatctctctggtgggaccacttccaggctacgcagccagaggggcaacctatcacttgggctcgctttaccgccgctttccggagaacccatgtgcccgccggagtcgtggctcttaagaagagggagttccgggagttgaagcaaggcaaccgctccgtgatggagtatttgcatgagttcaacaatctggcccgttacgctccggaggatgtgcgggaagatgaggagaagcaggagaagttcctggcaggaatggaccctgagctgtccgttcgtctagtctctggggactacccggacttccaacgtctggtggacaagagcatccgcttggaagccaagcacaaggagctggagtcgcacaagcgccgcttggcgaacttccgcaatcagcagggtgctaaccaaagggtccgctacaccaatccctatccagggggatcctcctcgcagcagcaacaacagcagcagcaatctcgctccgcgcctcgacctcaattcgtggtgcgcgtcccacagccgcagcagcagcagaatcaacaagggactcgtgcgccccgtcctcctacgccaactgtgcagcccgttcaaagccgcagggacgctcaaggtcagcagcgtctgtgcttcaactgcttcgagcccgggcactttgcggataaatgcccgaagccaaggcgtcagcaaggccaagcgcctccccgctccaacaacggtgggaaggacgtcattcggggtcgtgtgaaccacgtgacggccgaggacgtgctgacaactccggacgtcatcgttgtcagaagaagaccatcagcaccatctccgtctggtgttgggaaagttgcgggaacatcaattgtatgccaagcttag

SEQ ID NO: 14113 - DNA, 1203 bp, Oryza sativa
  Clone ID: TFbOSC14706j.C1.o1.fg
atggtgacgaccaggagaaatgttaacaccggtgaaggcaaccaacccgaaggcagcaaccccaacccccaaggcaacccacctccaccaccaccaccagacaccaacgccattctcacccagatcctcgcccagcaagccaacatgatgaatgctttcctccaccacctccaaaatccaccacaacagaatgctccaccaccacctccccaacactccaaactcgccgagtttctccgcatccgcccacccaccttctctagctccaacaatcccgtagatgcgttggattggttgcatgccgtggggaagaagctagacacggtgcagtgcagtgacgaggagaaagtcgtcttcgccgcccatcagttgcagggacccgcatctctatggtgggaccatttccaggctgcgcagccagaggggcagccgattacttgggcccgcttcaccgccgctttccggagaacccatgtgcccgctggagtcgtggctcttaagaaaagggaattccgggagttgaagcaaggcaaccgctccgtgatggagtatttgcatgagttcaacaatctagcccgttacgctccggaggatgtgcgggaagatgaggagaaacaagagaagttcctggcaggaatggaccccgagctgtccgttcgtctagtctctggggactacccggacttccaacgactggtggacaagagcatccgcttggaagccaagcacaaggagctggaatcgcacaagcgccgcttggcgaatttccgcaatcaacagggtgctaaccagagggttcgctacaccaatccctacccagggggatcctcctcgcagcagcaacaacagcagcagcaacctcgcccagcgccccgacctcagttcgtggtgcgcgtcccacagccgcagcagcagcagaatcagcaagggactcgtgcgccccgtcctcctacgccagctgtgccgcctgttcaaggccgcagggacgctcaaggtcagcagcgtctgtgcttcaactgtttcgagcccgggcactttgcggataaatgcccaaagccaaggcgtcagcaaggccaagcgcctccccgctccaacaacggtggcaaggacgtcatccgtggtcgtgtgaatcacgtgacggccgaggacgtgctgacaactcccgacgtcatcgttgtggttgggctcaatttcaaggagtag

SEQ ID NO: 14114 - DNA, 3960 bp, Oryza sativa
  Clone ID: TFbOSC15024j.C1.o1.fg
atgtcatggcacagggctggtgtcctgctgctagggggctcaatcctggctggctgtcccgggggttccggccgcctgaagcgcctttgtaataatgctacacagccagaggggcagcctattacttgggcccgcttcaccgccgccttccggaggacccatgtgcccgccggagtcatggcccttaagaaaagggaatttcgagagttgaagcaaggcaaccgctccgtgatggagtatttgcatgagttcaacaacctggcccggtacgccccggaggatgtacgggaagatgaggaaaagcaggagaagttcttggcaggaatggatcctgagctgtccgtccgtctagtctccggggactatccggatttccaacgtctggtggacaagagcatccgcttggaagccaagcacaaggaactggagtcgcacaagcgtcgcttggcgaattttcgcaaccaacagggtgctaaccaaaggatccgctacaccaatccctatccagggggatcttcctcgcagcagcagcaacctcgctccgcgcctcgacctcaattcgtggtgcgcgtcccacagccgcagcaacagcagagccagcaagggacccgtgcgccccgtcctcctacgccagccgcgcagtctggacaaggccgcagggacgttcaaggtccgcagcgtctgtgcttcaactgcttcgagcccgggcactttgcggataaatgcccgaagccgaggcgccagcaaggccaagcgcctccccgctccaacaacggtggtaaggatgtcatttggggtcgtgtgaaccacgtgacggccgaggacgtgctgacaactccagacgtcatcgttggtacgttcctcatccattccatccctgctaccattttgttcgactctggagcttcccactcgtttatatctgtgccattcatggggagaaatcagttgggggtagaaaggcttaggaaccctctactcatcaccacccctggaggggttatgacagcaaagtattatagtcctgccgtccctatagaaattcaggggattccttttccctcggatctgattcttctagacaccaagaacttggatgtgatccttgggatgaattggttggctcaattccaaggagtagtggattgtgcaagacgcactgtcactctgtaccgagggccggaacaaccggttgttttctttgcacccccaacctctgtcagtagttcagaacttcatcagataggactgtcagaaatccccattgtcagagagttcggagacgtgtttccggaagaactacccggtatgccgcccaagcgagagattgagttccggatagatcttgctccaggaaccactcctctgtacaagcgaccctaccgtatggcagcaaatgaactggccgaagttaagaaacagttggaagagttgaaagaaaaggggtatatacgtccgagtacttccccctggggtgctcctgtgatttttgtggagaagaaagacaagacgaagaggatgtgcgttgactacagagctctcaatgaagtcaccatcaaaaacaagtaccctcttccccggatcgatgatctgttcgatcagcttaaaggtgccacggtattctccaagattgatcttcgttctggatatcaccagttgcgcatccgtgaagaagatattccgaagaccgcattcaccacgcgatacggactgtatgaattcacggtgatgtcgttcggtttaaccaatgctcctgccttcttcatgaacttaatgaacaaagtgttcatggaatacttggataagtttgttgtggttttcattgatgacattctggtatactcacaatcagaggaagaccatcagcaccatctccgtctggtgttgggaaagttgcgggaacatcaattgtatgccaaacttagcaagtgtgagttctggttgtccgaagtcaagttcttagggcacgtgatatccgctaaaggagttgctgtggaccccgaaacagtgaccgccgtcactgattggaagcaacccaagacagtcactcaaattcgcagtttcttaggtttggcaggatactaccggaggttcatcgagaacttctccaaaatcgctcgacccatgacacagttgttgaagaaagaagagaaatttgtgtggagcccgcaatgcgagaaggcgttccaaactctcaaagaaaagctggtttcctcgccagtgttaatcatgccggatactcgcaaggacttcacggtgtattgtgacgcttcgcgccaaggattggggtgcgtgctcatgcaggacggtcatgtggtggcctatgcctcacgccagctacggcctcatgaaggcaactaccctacccatgatttggagttagccgcggtggttcatgctctaaaaatctggcggcactatctcattgggaatcgctgtgaaatatatactgatcataagagtttgaaatacatcttcacccagtcggatctgaatcttcggcagaggagatggttagaactcatcaaggattatgatgtgggaattcactatcatcctggtaaggccaacgtggtcgccgacgctctaagtcgaaaaagccattgcaacactcttaacgtccgtggcattccacccgaacttaatcaacagatggaagccctgaatctaagcatagtgggtcgcggattcttggctgcgttggaagccaagcccaccttactcgatcaaatccgcgaggctcagaagaacgacccggacatgcgtggactcctcaagaatatgaaacagggtaaagccgctggtttcacagaggatgaacacggaaccctatggaacggaaatcgggtatgcgttccagataacagagaacataaagagctgatacttcaggaagctcacgaaagtccttattccatccaccctggcagtacgaagatgtacttagacttgaaggagaaatactggtgggttagtatgaagcgggaaattgcagagttcgtggccctttgtgatgtgtgccagcgtgtcaaggcagagcaccaacgaccggccggacttctccaacctctccaagtaccagaatggaaatgggatgaaattgggatggatttcatcaccggactttcaaaaacccaaggtggatacgattctatatgggtagttgtggatcgattaaccaaggtagctcgatttattcctgtgaagaccacctatggagggaacaaactagccgagctctacttcgctaggatcgtgagtctccatggcgttcccaagaaaatcgtatctgataggggaagccaattcacctctcacttttggaagaagctccaagaagagctgggtacccgattaaatttcagcaccacgtatcacccgcagacagatggacagaccgagcgtctaaatcagatcctagaagatatgcttcgcgcatgtgtcctagatttcgggaagacctgggataagagtctcccctatgccgagttctcctacaataacagctaccaagccagcatactaatggcaccttatgaagcattgtatgggcgcaaatgtcggacaccactattgtgggaccaagttggggaaagccaagtgttcgggaccgatatcctgagagaagctgaagctaaagtcagaaccattcgggataatctaaaggtggcccagtctcggcagaagagttatgcagacaaccgacgccgtgacctagaattcgcagtggatgactttgtgtatcttcgggtcacgtccttgcgaggtgtacacaggtttcagacaaaggggaagctcgcacctcggtttgtgggtcctttccgtatcattgcacggcgcggagaagtcgcttaccagttggagctgcccgcctccttgggcaacgtgcatgatgtgttccatgtgtcgcaactcaagaaatgtcttcgagtgccatccgagaaggccgactcagagtaa

SEQ ID NO: 14115 - DNA, 304 bp, Oryza sativa
  Clone ID: TFbOSC15024j.C1.o3.np
atgagtagagtgtccactagttggggttttgtttaatctagggtgaataaggccgaggggaggggcgcgcggaccgggtccacgggagtggggcccacgcggcagcctcacggtccatggtggaccgggtgcacccggctcacaccggccggcgccgtgggtcccacgcgtcagccgcacccgagggcgcgggcggctgacggccggcccccacatggcagccgcggggcgcgcccgaaggcggccacgccggcacagccgacgggaggcggcgcacccgcgccccgatggtcgccgccggtgt

SEQ ID NO: 14116 - DNA, 1195 bp, Oryza sativa
  Clone ID: TFbOSC15153j.C1.o1.fg
atggtgacgaccaggagaaatgctgccaccggtgatggcaaccaacctgaaggcagcaaccacaaccaccagggcaacccacctccacctcctcctccgcctcctccaccaccaccagataccaatgccattctcacccaaatcctcgcccagcaggccaacatgatgactgttttcctccaccacctccaaaatccaccacaacagaatgctccaccaccacccccacaacactctaaactcgccgagttcctccgcatccgtccacccaccttctctagctccaacaaccccgtggatgcgttggattggttgcatgccgtggggaaaaagctagacacggcgcagtgcagcgatgaggagaaagtcatcttcgccgcccaccagctgcaggggcccgcatctctatggtgggaccatttccaagctacgcagccagaggggcaacctattacttgggcccgcttcaccgccgctttccggagaacccatgtgccagctggagtcgtggctcttaagaaaagggaattccgagagttgaagcaaggcaaccgctccgtgatggagtatttgcatgagttcaacaatctggcccgttacgccccggaggatgtgcgggaagatgaggagaagcaagagaagttcttggcaggaatggacctcgagctgtccgtccgtctagtctctggggactatccggatttccaacgtctggtggacaagagcatccgcttggaggccaagcacaaggaactggagtcgcacaagcgccgcttggcgaatttccgcaatcaacagtgtgctaaccaaagggtccgctacaccaatccctatccagggggatcctcttcgcagcagcaacaacagcagcagcaacctcgctccgcgcctcgacctcaattcgtggtgcgcgtcccacagccgcagcagcagcagaatcagcaagggactcgtgcgccccgtcctcctacgccaactgtgcagcccggtcaaggccgcagggacgctcaaggtcagcagcgtctgtgcttcaactgcttcgagcccgggcactttgcggataaatgcccgaagccaaggcgtcagcaaggtcaagcgcctccccgctccaacaacggtgggaaggatgtcattcggggtcgtgtgaatcacgtgacggccgaggacgtgctgacaactccagacgtcatcgttg

SEQ ID NO: 14117 - DNA, 5780 bp, Oryza sativa
  Clone ID: TFbOSC15185j.C1.o1.np
atggcggccggatcttccacgaccgattccccctcatccggccgctctctcctcctcccaacactacataaacactccccatgcctccctccttcgtttccgccactcgccgctctctctccccgtcggaatcgagctcgcaacgtcgtcctctctctccgccgtcgccgccgagctccggtccgccgccgtcgtcgcaccgggcctcctcccgtttcggcatcgccttcttcgggttcgccgcgtcctcgccaatctcgtccaccccttcgtttcgcccgccgaccgccggaacgccgccgtcctcgtcgacccgagccgcgccgccccctttctccgcttcggtcgccgttcccgtcgtcgccgtcgacccggggtgagccatggaccgcccatttcgcttcccccttccctcccctctctcgggcgccgctccgtcgcgccggaggtcgccgccggcgaccatcggggcgcgggcgcgccgcctcccgtcggctgtgccggcgaggccgccttcgggcgcgccccgcggctgccatgtggggcccggtcgtcagccgcccgcgtcctcgggtgcggctgacgcgtgggacccacggcgccggccggcgcaagccgcgtgcacccggtccaccgtggacccacctcggccatataaggaccggtgttcgggcctctgttgcaaagcactaccgtacttccacatgtctagtggggcaaatgaaggctacacgagctgcggcccggtagtcgagatgtcatggcacagggccggtgtcctgctgctaggggctcagtcctgcctgcctgtcccgggggttccggccgtaggtgggattgggtcgatgtacacctctgatcagagtaaaatctattcgaatagccgcgccctcggttatgggcaagccgagcaatgtacccaaatggccggcagcgtcagccgtcgtggtttggacatgactggcttcgtcttggagctgcggggcatgtgcgtggtcctggggcatccacatggagtggactaccaggccaggccgcttccggagcaggagggtgacgatgcggagccccacgctgcttgggaggtcactgcagtgatcctcgctggctctcccgagcggacttcgctgacagtcaccgcgggtggggattccttccccgccgcttgccagagcgccgctctcctcgccatcggcactcttcaccagcgctacccggacgagttgcagcactcgccctaccgctaccaccctcgtcgcggaggagcccgcgactacgccaccttccgggatgctagctcggaggatgacgctaccatcgtgcacctggcgcgcatggtggaggcgtacgacgcggctcgtatcgacttccatcagatggtgcgtcgtgggatggtcgagaacaacatgaagatcctggagctgcgtcaggagaacctgcagctcaagaaggacctagatgcggtggaggcgcagctgcatcagctcaagatcgcccagggagagatctgccgccccaagcatcgccgcgtctaccgcagccagaagatcaccgcccgcaagagcacctccaggcccgagcttgttcgtcagtccctggcgtggacttgcttcgtggagacccctcgtgccgagcccgcgcccgtggttccccaggagggggaagcctccggcgttggtagcacggaggatgcgctgttgctcaccttccatggtgatgaccaggagaaatgctgccaccagtgatggcaaccaacccgaagacagcaaccacaacaaccatggcagcccacctccacctcctcctccgcctccaccaccaccaccagataccaacgccattctcacccaaatcctcgcccagcaggccaacatgatgactgcttttctccaccacctccaaaatccgccacaacataatgctccaccaccacctccccaacactctaaactcgccgagttcctccgcatctgtccacctaccttctctagctccaacaaccccgtggatgcgttggattggttgcatgccgtggggaaaaagctagacactgtgcagtgcagcgatgaggagaaagtcatcttcgccgcccaccagctgcagggacccgcatctctatggtgggaccatttccaggctacgcagccagagggacagcctattacatgggctcgcttcaccgccgctttccgaagaacccatgtgcccgccggagtcgtggcccttaagaaaagggaattccgagagttgaagcaaggcaaccgctccgtgatggagtatttgcacgagttcaacaacctggcccgttacgctccggaggatgtgcgggaagatgaggagaagcaagagaagttcctggcaggaatggaccctgagctgtccgtctgtctagtctccggggattatccggatttccaacgtctggtggacaagagcatccgcttggaagccaagcacaaggaactggagtcgcacaagcgccgcttggcgaatttccacaaccaacagggtgctaaccaaagggtccgctacaccaatccctatccagggggatcctcctcgcagcagcaacagcagcagcagcaacctcgctccgcgcctcgacctcaattcgtggtgcgcgtcccacagccgcagcaggagcagaatcaacaagggactcgtgcgccccgtcctcctccaccgactgtgcagcctggtcaaggccgcagggacgctcaaggtccgcagcgtctgtgcttcaactgcttcgagcccgggcactttgcggataaatgcccgaagccaaggcgtcagcaaggccaagcgcctccccgccccaacaacggtggtaaggacgtcattcggggtcgtgtgaaccatgtgacggccgaggacgtgctgacaactccagacgtcatcgttggtacgttcctcattcattccatccctgctaccattttgttcgactctggagcttcccactcatttatatctgtgccattcgtggggagaaatcagttgggggtagaaaggcttagaaaccctctgctcatcaccacccctggaggggttatgacagcaaagtattatagccctgccgtccctatagaaattcaggggattccttttccctcggatctgattctgctaggcaccaagaacttggatgtgatccttgggatgaattggttggctcaattccaaggagtagtggattgcgcgagacgcactgtcactctgtaccgagggccggaacaaccggttgttttctttgcacccccaacctcagtcagaagttcagaacttcatcagatagaactgtcagaaattcccatcgtcagagagttcggagacgtgtttccggaagaactacctggtatgccgcctaagcgagagattgagttccggatagatcttgctccaggaaccgctcctctgtacaagcgaccctaccgtatggcagcaaatgaattggccgaagttaagaaacagttggaagagctgaaagaaaaggggtatatacgtccaagtacttccccctggggtgctcctgtgatttttgtggagaagaaagacaagacgaagaggatgtgcgttgactacagagctctcaatgaagtcaccatcaaaaacaagtaccctcttccccggatcgatgatctgttcaatcagcttaaaggtgccactgtattctccaagattgatcttcgttccggatatcaccaattacgtattcgcgaagaagatattccgaagaccgcattcaccacgcgatacggactgtatgaattcacggtgatgtcgttcggtttaaccaatgctcctgccttcttcatgaacttaatgaacaaagtgttcatggaatacttggataagtttgtggtggttttcattgatgacattctgatatactcacaatcagaggaagaccatcagcaccatctccgtctggtattgggaaagctgcgggaacatcaattgtatgccaaacttagcaagtgtgagttctggttgtccgaagtcaaattcttagggcacgtgatatctgctaaaggagttgctgtggaccccgaaacagtgatcgccgtcaccgattggaagcaacccaagacagtcactcaagttcgcagtttcttaggtttggcaggatactaccgaaggttcatcgagaacttctccaaaatcgctcgacccatgacacagttgttgaagaaagaagagaaatttgtgtggagcccgcaatgcgagaaggcgtttcaaactctcaaagaaaagctggtttcctcgccggtgttaatcttgccagatactcacaaggacttcatggtgtattgtgacgcttcgcgccaaggataggggtgcgtgctcatgcaggatggttatgtggtggcctatgcctcacgccagcttcggcctcatgaaggcaactaccctactcatgatttggagttagccgcggtggttcatgccctaaaaatctggtggcactatctcattgggaatcgctgtgaaatatatactgatcataagagtttgaaatacatcttcactcagtcggatctgaatcttcggcaaaggagatggttagaactcatcaaggattatgatgtgggaattcactatcatcctggtaaggccaacgtggtcgccgacgctctaagtcgaaagagccattgcaacactcttaacgtccgtggcattccaccggaacttaatcaacagatggaagccctgaacctaagcatagttagtcgtggattcttggctacgctggaagccaagcctaccttgctcgatcaaatctgcaaggctcagaagaatgacccggatatgcatgggctcctcaagaatatgaaacagggtaaagccgctggtttcacagaggatgaacatggaaccctatggaacggaaatcggcgtgtcaaggcagagcaccaacgaccggccggacttctccaacctctccaagtaccagaatggaaatgggatgaaattgggatggattttatcaccggacttccaaaaacccaaggcggatatgattctatatgggtagtcgtggatcgactaaccaaggtagcacggttcattcccgtaaagaccacctatggagggaacaaactagctgaactctacttcgctaggatcgtcagtctgcatggcgtccccaagaaaattgtatctgatcggggaagccagttcacctctcacttttggaagaagctccaagaagagctgggtacccgattaaatttcagcaccgcgtatcacccgcagacagatggacagaccgagcgtctaaatcagatcctagaggatatgcttcgcgcatgtgtcctagatttcgggaagacctgggataagagtctcccctatgccgagttctcctacaataacagttatcaagccagcatacaaatggcaccttatgaagcgttgtatgggcgcaaatgccggacaccgctattgtgggaccaagttggagaaagccaagtgttcgggactgatatcctgagagaagctgaagcgaaggtcagaaccattcgggataatctaaagatggcacagtcccggcagaaaagttatgcagataaccgtcgccgtgacctggaattcgcagcggatgactttgtgtatgttcgggtcacgccattgcgaggtgtacacaggtttcggacaaaggggaagctcgcacctcggtatgtgggtcctttccgtatcactgctcggcgcggagaagttgtcacgaccggaaataacccaacgggcattccttacgtgggtgcattaatccttgt

SEQ ID NO: 14118 - DNA, 2056 bp, Oryza sativa
  Clone ID: TFbOSC15186j.C1.o2.gm
atgatgactgcttttctccaccacctccaaaatccgccacaacataatgctccaccaccacctccccaacactctaaactcgccgagttcctccgcatccgtccacctaccttctctagctccaacaaccccgtggatgcgttggattggttgcatgccgtggggaaaaagctagacactgtggagtgcagcgatgaggagaaagtcatcttcgccgcccatcagctgcaggggcccgcatctctatggtgggaccatttccaggctacgcagccagagggacagcctattacttgggcccgtttcaccgccgctttccggagaacccatgtgcccgccggagtcgtggcccttaagaaaagggaattccgagagttgaagcaaggcaaccgctccgtgatggagtatttgcatgagttcaacaacctggcccgttacgccccggaggatgtgcgggaagatgaggagaagcaagagaagttcttggcaggaatggaccctgagctgtccgtccgtctagtctccggggactatctggatttccaacgtctggtggacaagagcatccgcttggaagccaagcacaaggaactggagtcgcacaagcgccgcttggcgaatttccgcaatcaacagggagctaaccaaagggtccgctacaccaatccctatccagggggatcctcctcgcagcagcaacaacagcagcagcaacctcgctccgcgccccgccctcaattcgtggtgcgcgtcccacagccgcagcaacagcagagtcagcaagggacccgtgcgcctcgtcctcctacgccaactgtgcagcctggccaaggccgcagggacgcttcaggtccgcagcgtctgtgcttcaattgcttcgagcccgggcactttgcggataaatgcccaaagccgaggcatcagcaaggccaagcgcctccctgctccaacaacggtggtaaggatgtcattcggggtcgtgtgaaccatgtgacggccgaggacgtgctgacaactccagacgtcatcgttggtacgttcctcattcattccatccctgctaccattttgttcgactctggagcttcccactcgtttatatctgtgccattcatggggagaaatcagttggggatagaaaggcttaggaaccctctgctcatcaccacccctggaggggttatgacagcaaagtactatagccctgccgtccctatagaaattcaggggattccttttccctcggatctgattctgctagacaccaagaacttggatgtgatccttgggatgaattggttggctcaattccaaggagtagtggattgtgcgagacgcaccgtcactctgtaccgagggccgggacaaccggttgttttctttgcacccccaacctctgtcagtagttcagaactgcatcagataggtctgtcagaaatccccatagtcagagagttcggagacgtgtttccggaagaactacctggtatgccgcccaagcgagagattgagttccagatagatcttgctccaggaaccactcctctgtgcaagcgaccctaccgtatggcagcaaatgaactggccgaagtcaagaaacagctggaagagttgaaagaaaaggggtacatacgtccgagcacttccccctggggtgctcctgtgatttttgtggagaagaaagacaagacgaagaggatgtgcgttgactatagagctctcaatgaagtcaccataaaaaacaagtaccctcttccccggatcgatgatctgttcgatcagcttaaaggtgccactgtattttccaagattgatcttcgttccggatatcaccaactgcgtattcgtgatgaagatattccgaagaccgcattcaccacgcgatacggactgtatgaattcacggtgatgtcattcggtttaaccaatgcacccgccttcttcatgaacttaatgaacaaagtgttcatggaatacttggataaatttgttgtggttttcattgatgacattctgatatactcacaatccgaggaagaccatcagcaccatctcg

SEQ ID NO: 14119 - DNA, 5014 bp, Oryza sativa
  Clone ID: TFbOSC15467j.C1.o1.np
ctgcttcacttatcatcaaaatctgatcttttaaaatgttgcttttcttttgtttttgtttgtagatggccggcagcgttacccgtcgtggtttggacatgactggcttcgtcttggagctgcgaggcatgtgcgtggtcttggggtatccacatggagtggattaccaggccaggccgctcccggagcaggagggtgaggatgcagagcctcacgctggttgggaggtcactgcagtaatcctctccggctctcccgagcggacttcgctggcagtcaccgcgggtggggattccttccccgccgcttgccagaacgccgctctcctcgccatcggcaccctgcaccagcgctacccggacgagttgcagcactcgccctaccgctaccacccccgtcgcggaggagccagcgaccatgccaccttccgagacgccagctcggaggatgacgctaccgtcgtgcatctggcacgcatggtggaggcgtacgacgcggctcgtatcgacttccaccagatggtgcgccgtggcatggtggagaacaacctgaagatcctggagctgcgtcaggagaatctgcagctcaagaaggacctcgacgcgttggaggcgcagctgcaccagctcaaggtcgcccaaggagagatcagccgtcccaagcgtcgccgcgtctgccgcagccagaagatcaccgcccgcaagagcacctccaggcctgagcttgttcgtcagtccctggcgtggacctgcttcgtcgagacccctcgtgccgagcctgcgcccgtggttccccaggagggggaagcctccggcgttggtagctcggagggtgcgctgttgctcaccttccgtcctggcccgtcgcagcgctcttcttctctgtttgctggttctatgtggggttttcagatggtgacgaccaggagaaatgttaacaccggtgaaggcaaccaacccgaaggcagcaaccccaaccaccaaggcaatccacctccacctccacctccgcctccaccaccaccaccagacaccaacgccattctcacccaaatcctcgcccaacaagccaacatgatgaatgctttcctccaccacctccaaaacccgccacaacagaatgctccaccaccccctccccaacactccaaactcgccgaattcctccgtatccgcccacctaccttctctagctccaacaatcccgtggatgcgttggattggttgcatgccgtggggaagaagttagacacggtgcagtgcagcgatgaggagaaagtcgtcttcgccgcccatcagctgcagggacccgcatctctctggtgggaccacttccaggctacgcagccagagggacagccgattacttgggctcgcttcaccgccgctttccggagaacccatgtgcccgctggagtcgtggctcttaagaaaagggaattccgggagttgaagcaaggcaaccgctccgtgatggagtatttgcatgagttcaacaatctagcccgttatgccccggaggatgtgcgggaagatgaggagaagcaggagaagttcttggcgggaatggaccctgagctgtccgttcgtctagtctctggggattacccggacttccaacgactggtggacaagagcatccgcttggaagccaagcacaaggagctggagtcgcacaagcgccgcttggcgaacttccgaaatcagcaaggtgctaaccagagggtccgctacaccaatccctatccagggggatcctcctcgcagcagcagcagcagcaatcgcgatccgcgcctcgacctcaattcgtggtgcgcgtcccacagccgcagcagcagcagaatcagcaagggactcgtgcaccccgtccccctacgccaactgtgcagcctgttcaaggccgcagggacgctcaaggtcagcagcgtctgtgcttcaactgcttcgagcccgggcactttgcggacaaatgcccgaagccaaggcgtcagcaaggccaagcgcctccccgctccaacaacggtggcaaggatgtcattcggggtcgcgtgaatcacgtgacggccgaggacgtgctgacaactccggacgtcatcgttggtacgttcctcgtccattccatccctgctacaattttgttcgactctggagcttcccactcgtttatatctgtgccattcgtggaaaaaaaatcagttgggggtagaaaggcttagaaaccctctgctcatcaccacccctggcggggttatgacggcaaagtattatagccctgccgttcctatagaaattcaggggattctttttccctcggatctgattctgttagacacaaagaacttggatgtgattcttgggatgaattggttggctcaattccaaggggtagtggattgcgcgaggcgcactgtcactctgtaccgaggaccagaacaaccggttgttttctttgcacctccaacctctgtcagaagttcagaactgcatcagataggtctgtcagaaatccccatagtcagagagttcggagacgtgtttccggaggaactacctggtatgccgcccaagcgagaaattgagttccggatagatcttgctccaggaaccactcctctgtacaagcgaccctaccgtatggcagcaaatgaactggccgaagttaagaaacagttggaagagttgaaagaaaaggggtatatacgtccgagtacttccccatggggtgctcctgtgatttttgtagagaagaaagacaagacgaagaggatgtgcgttgactacagagctctcaatgaagtcaccatcaaaaacaagtaccctcttccccggatcgatgatctattcgatcagcttaaaggtgccactgtattctccaagattgatcttcgttccggatatcaccaattacgtattcgtgaagaagatattccgaagaccgcattcactacgcgatatggactgtatgaattcacggtgatgtcgttcggcttaaccaatgctcctgccttcttcatgaacttgatggacaaagtgttcatggaatacttggataagttcgttgtggttttcatcgatgatattctgatatactcacaatcagaggaagaccatcagcaccatctccgcctggtattgggaaagttgcgggaacatcaattgtatgccaagcttagcaagtgtgagttctggctgtccgaagtcaaattcttggggcacgtgatatctgctaaaggagttgctgtggatcccgaaacagtgaccgccgtcaccgattggaagcaacctaagacagtcactcaaattcgcagtttcttgggtttggcaggatactaccggagattcatcgagaacttctccaaaatcgctcgacccatgacacagttgttgaagaaagaagagaagtttgtgtggagcccgcaatgcgagaaggcgttccaaactctcaaagaaaagctggtttcctcgccagtgttaatcttgccggatactcgcaaggatttcatgatgtactgtgatgcttcgcgccaaggattggggtgcgtgctcatgcaggacggtcatgtggtagcctatgcctcacgtcagctacgacctcatgaaggcaactaccctacacatgacttggagctagcagcggtggttcatgctctaaaaatctggcggcactatctcattgggaatcgctgtgaaatatatactgatcacaagagcttgaaatacatcttcactcagtcggacctgaatcttcgacaaaggagatggttagaactcatcaaggattatgatgtgggaattcactatcatcccggcaaggccaacgtcgtcgccgacgctctaagtcgaaaaggccattgcaacactctcaacgtccgaggcattccacccgagcttaatcaacagatggaagccctgaacctaagcatagttggtcgcggattcttggctgcgttagaagccaagcctaccttgctcgatcaaatccgcgaggctcagaagaatgatccggacatgcatggactcctcaagaatatgaaacagggtaaagccgctggtttcacagaagatgaacacggaaccttatggaacggaaagcgggtgtgcgttcccgataatagagaacttaaacagctgatacttcaggaagctcacgaaagtccttattccattcatccgggcagtaccaagatgtacttagacttgaaggagaaatactggtgggttagcatgaagcgggaaattgcagagtttgtggctctatgtgatgtgtgccagcgtgtcaaggcagaacaccaacgaccggccggacttctccaacctctccaagtgccggaatggaaatgggatgaaattgggatggatttcatcaccggcctcccaaaaacccaaggtgggtatgattctatatgggtaatagtggatcgattaaccaaggtagctcgattcattcatgtgaagaccacctatggagggaacaaactagcggagctctacttcgctaggatcgtgagtctccatggcgttcccaagaaaatcgtatctgataggggaagccaattcacctctcacttttggaagaagctccaagaagagctgggtactcgattgaatttcagcaccgcatatcacccgcagacagatggacagaccgagcgtctgaatcagattctagaagatatgctccgcgcatgtgtcctagacttcgggaagacttgggataagagtctcccctatgccgagttctcctacaataacagctatcaagccagcatacaaatggcaccctatgaagcgttgtacgggcgcaaatgccggacaccgctattgtgggaccaagttggagaaagtcaagtgttcgggactgatatcctgagagaagctgaagctaaagtcagaatcattcgggataatctaaaggtggcacagtctcggcagaaaagttatgcagataaccgtcgtcgtgacttggaattcgcagtggatgactttgtgtatcttcgggtcacgccattgcgag

SEQ ID NO: 14120 - DNA, 5271 bp, Oryza sativa
  Clone ID: TFbOSC15719j.C1.o1.fg
atgtcatggcacagggccggtgtcctgctgctaggggctcagtcctgcctgcctgtcccgggggttccggccgtaggtgggattgggtcggtactcttgtctatggctaggatgggttggaaactatgtcacgtctttcgtctgtataccgtggtgatggccggcagcgtcacccgtcgcggtttggacatgactggtttcgtcttggagctgcggggcatgtgcgttgtcctggggtatccacatggagtggactaccagggcaggccgcttccggagcaggagggtgacgatggagagccccacgctgcttgggaggtcactgcagtgatcctcgctggctctcccgagcggacttcgctggcagtcaccgcgggtggagattctttccccgccgctagccagagcgccgctctcctcgccatcggcactcttcaccagcgctacccggacgagttgcagcactcgccctaccgctaccaccctcgccgcggaggagcccgcgactacgccaccttccgggatgctagctcggaggatgacgctaccatcgtgcacctggcgcgcatggtggaggcgtacgacgcggctcgtatcgacttccatcagatggtgcgccgtgggatggtcgagaacaacttgaagatcctggagctgcgtcaggagaacctgcagctcaagaaggacctagacgcggtggaggcgcagctgcatcagctcaagatcgcccagggagaggtctgccgccccaagcgtcgccgcgtctgccgcagccagaagatcaccgcccgcaagagcacctccaggcccgagcttgttcgtcagtccctggcgtggacttgcttcgtcgagacccctcgtgccgagcctgcgcccgtggttccccaggagggggaagcctccggcgttggtagcacggaggatgcgctgttgctcaccttccgtcctggcccgtcgcagcggaggagtgctaacaccggtgatggcaaccagcctgaaggaagcaaccaccaccaccagggcagcccacctccacctcctcctccgcctccaccaccaccaccagataccaacgccattctcacccaaatcctcgcccagcaggccaacatgatgactgctttcctccaccacctccaaaatccgccacaacataatgctccaccaccacccccacaacactctaaactcgccgagttcctccgcatccgcccacctaccttctctagctccaataaccccgtggatgcgttggattggttgcatgccgtggggaaaaagctagacactgtgcagtgcagcgatgaggagaaagtcatcttcgccgcccaccagctgcaggggcccgcatctctatggtgggaccatttccaggctacgcagccagaggggcaacctattacatgggcccgtttcaccgccgctttccggagaacccatgtgcccgccggagtcgtggcccttaagaaaagggaattccgagagttgaagcaaggcaaccgctccgtgatggagtatttgcatgagttcaacaacctggcccgttacgccccggaggatgtgcgggaagatgaggagaagcaagagaagttcttggcaggaatggaccctgagctgtccgtccgtctagtctccggggactatccggatttccaacgtctggtggacaaaagcatccgcttggaagccaagcacaaggaactggagtcgcacaagcgccgcttggcgaatttccgcaatcaacagggtgctaaccaaaggatccgctacaccaatccctatccagggggatcttcctcgcagcagcaacaacagcagcagcaacctcgcttcgcgcctcgacctcaattcgtggtgcgcgtcccacagccgcagcagcagcagaatcaacaagggactcgtgcgccccgtcctcctacgccaactgtgcaacctggtcaaggccgcagggacgctcaaggtccgcaacgtctgtgcttcaactgcttcgagcccgggcactttgcggataaatgcccaaagctgaggcgtcagcaaggccaagcgccttcccgctccaacaacggtgagaaggatgtcatttggggtcgggtgaaccacgtgacagccgaggacgtgctgacaactccagacgtcatcgtcggtacgttcctcattcattccatccctgctaccattctgttcgactctggagcttcccactcgtttatatctgtgccattcgtggggagaaatcagttgggggtagaaaggcttaggaaccctctgctcatcaccacccctggaggggttatgacagcaaagtactatagccctgccgtccctatagaaattcaggggattccttttccctcggatctgattctgctagacaccaagaacttggatgtgatccttgggatgaattggttggctcaattccaaggagtagtggattgtgcgagacgcactgtcactctgtaccgagggccggaacaaccggttgttttctttgcacccccaacctctgtcagtagttccgaacttcaccagatagaactgttagaaatccccatcgtcagggagttcggagacgtgtttccggaagaactacccggtatgccgcccaaacgagagattgagttccggatagatcttgctccaggaaccactcctctgtacaagcgaccctaccgtacggcagcaaatgaactggccgaagtcaagaaacagttggaagagttgaaagaaaaggggtatatacgtccgagtacttccccctggggtgctcctgtgatttttgtggagaagaaagacaagacgaagaggatgtgcgttgactacagagctctcaatgaacttaaaggtgctactgtattctccaagatcgatcttcgttccggatatcaccaattacgtattcgtgaagaagacattccgaagaccgcattcaccacgcgatacggactgtatgaattcacggtgatgtcgttcggtttaaccaatgcacctgcctttttcatgaacttaatgaacaaagtgttcatggaatacttggataagtttgttgtggttttcattgatgacattctggtatactcacaatccgaggaagaccatcagcaccatctccgtctggtattgggaaagttgcgggaacatcaattgtatgccaaacttagcaagtgtgagttctggttgtccgaagtcaaattcttagggcacgtgatatctgctaaaggagttgctgtggaccccgaaacagtgaccgccgtcactgattggaagcaacccaagacagtcactcaagtccgcagtttcttaggtttggcaggatactaccgaaggtttatcgagaacttctccaaaatcgctcgacccatgacacagttgttgaagaaagaagagaaatttgtgtggagcccgcaatgcgagaaggcgtttaaaactctcaaagaaaagctggtttcctcgccagtgttaatcttgccggatactcgcaaggatttcatggatggtcatgtggtggcctacgcctcacgccagctacggcctcatgaaggcaactaccctacccatgatttggagttagctgcggtggttcatgctctaaaaatctggcggcactatctcattgggaatcgctgtgaaatatatactgatcataagagtttgaaatacatcttcactcagtccgacctgaatcttcggcaaaggagatggttagaactcatcaaggattatgatgtgggaattcactatcatcctggtaaggccaacgtggtcgccgacgctctaagtcgagaaagccattgcaacactcttaacgttcgtggcattccacccgaacttagtcaacagatggaagccctgaacctaagcatagttggtcgcggattcttggctgcgttggaagccaagcctaccttgctcgatcaaatccgcgaggctcagaagaacgatccggacatgcatggactcctcaagaatatgaaacagggtaaagccgctggtttcacagaggatgaacacggaaccctatggaacggaaatcgagtatgcgttccagataacagagaacttaaacagctgatacttcaggaagctcacgaaagtccttattccatccaccctggcagtacgaagatgtacttagacttgaaggagaaatactggtgggttagtatgaagcgggaaattgcagagttcgtggccctttgtgatgtgtgccagcgtgtcaaggcagagcaccaacgaccggccggacttctccaacctctccaagtacctgaatggaaatgggatgaaattgggatggatttcatcaccggacttccaaagacccaaggtggatatgattctatatgggtagttgtggatcgattaaccaaggtagctcgattcattcctgtgaagaccacctatggagggaacaaactagccgagctctacttcgctaggatcgtgagtctccatggcgttcccaagaaaatcgtatctgacaggggaagccaattcacctctcacttttggaagaagctccaagaagagctgggtacccgattaaacttcagcaccgcataccacccgcagacagatgggcagaccgagcgtctgaatcagatcctagaagatatgcttcgcgcatgtgtcctggatttcgggaagacctgggataagagtctcccctatgccgagttctcctacaataacagctatcaagccagcatacaaatggcaccttatgaagcgttgtatgggcgcaaatgccggacaccgctcttgtgggatcaagttggggaaagccaagtgttcgggactgatatcctgagagaagctgaagctaaagtcagaaccattcgagataatctaaaggtggcacagtcccggtttcggacaaaagggaagctcgcacctcggtatgtgggtcctttccgtatcgttgcccgacgcggagaagtcgcttaccaattggagctgcccgcctccttgggcaacgtgcatgatgtgttccatgtgtcgcaactcaagaaatgccttcgagtgccatccgagcagactgacccagagcaaattgaagttcgcgaagacttgacctacgtggagaggccagtgaaaatcctggacaccatggagcgcaggaccaggaaccgggtaatccgtttttgcaaggtccagtggagcaaccacgccgaagaagaagctacctgggagcgtgaagacgagctgaaggcagcccatcctgatctcttcgccagttcttccgaatctcggggtcgagattccgtttaa

SEQ ID NO: 14121 - DNA, 5070 bp, Oryza sativa
  unsure (1)..(5070): unsure at all n locations
  Clone ID: TFbOSC15723j.C1.o1.fg
atgccctccctaggccaaataaggcttacacancttcggcccggtattcaagttgtcatgcacaagggcgggtgtcttgtgctaggggctcagtcctgcctgcctgtccggggggttccggccgtaggtggaattgagtcggtactcttgtctatggctaggatgggttggaaactatgtcacgtcttccgtctgtacaccgtggtgatggccggcagcgtcagccgtcgtggtctggacatgactggtttcgtcttggagctgcggggcatgtgcgttgtcctggggtatccacatggagtggactaccagggcaggccgcttccggagcaggagggtgacgatgcagagccccacgctgcttgggaggttactgcagtgatcctcactggctctcccgagcggacttcgttggcagtcaccgcgggtggagattctttccccgccgcttgccagaacgccgctctcctcgccatcggcactcttcaccagcgctacccggacgagttgcagcactcgccctaccgctaccaccctcgccgcggaggagcccgcgactacgccatcttccgggatgctagctcggaggatgacgctaccatcatgcacctggcgcgcatggtggaggcgtacgacgcggctcgtatcgacttccatcagatggtgcgccgtgggatggtcgggaacaacatgaagatcctggagctgcgtcaggagaatctgcagctgaagaaggacctagacgcagtagaggcgcagctgcatcagctcaagatcgcccagggagagatggtgaagaccaggagaaatgctgccaccggtgatggcaaccaacccgaaggcagcaaccacaaccaccagggcagcccacctccacctccttctccgcctccaccaccaccaccagacaccaacgccattctcacccaaatcctcgcccagcaggccaacatgatgactgctttcctccaccacctccaaaatccgccacaacagaatgcaccaccaccacccccacaacactctaaactcgccgagttcctccgcatccgtccacctaccttctctagctccaacaaccccgtggatgcgttggattggttgcatgccgtggggaaaaagctagacactgtgcagtgcagcgatgaggagaaagtcatcttcgccgcccaccagctgcaggggcccgcatctttatggacccatgtgcccgccggagtcgtggcccttaagaaaagggaattccgagagttgaagcaaggcaaccgctctgtgatggagtatttgcatgagttgaacaacctggcccggtacgccccggaggatgtacgggaagatgaggaaaagcaggagaagttcttggcaggaatggaccctgagctgtccgtgcgcctagtctccggggactatccggatttccaacgtctgatggacaagagcatccgcttggaagccaagcacaaggaactggagtcgcacaagcgccgcttggcgaatttccgcaatcaacagggtgctaaccaaagggtccgctacaccaatccctatccagggggatcctcctcgcagcagcaacaacagcagcagcaacctcgctccgcgccccgacctcaattcgtgcctggtcaaggccgcagggacgctcaaggtccgcagcgtctgtgcttcaactgcttcgagcccgggcactttgcggataaatgcccaaagccgaggcgccagcaaggccaagcgcctccccgctccaacaacggtggtaaggatgtcattcggggtcgtgtgaaccacgtgacggccgaggacgtgctgacaactccagacgtcatcgttggtacgttcctcattcattccatccctgctaccattttgttcgactctggagcttcccactcgtttatatttgtgccattcgtggggagaaaacagttgggggtagaaaggcttaggaaccctctgctcatcaccacccctggaggggttatgacagcaaagtattatagccatgccgtccctatagaaattcaggggattccttttccctcggatctgattcttctagacaccaagaacttggatgtgatccttaggatgaattggttggctcaattccaaggagtagtggattgcgcgagacgcactgtcactctgtaccgagggccggaacaaccggttgttttctttgcacccccaacctctgtcagtagttcagaacttcatcagataggactgtcagaaatccccatcgtcagagagttcggagacgtgtttccggaagaactacccggtatgccgcccaagcgagagattgagttccggatagatcttgctccaggaaccactcctttgtacaagcgaccctaccgtatggcagcaaatgaactggccgaaaagaaagacaagatgaagaggatgtgcgttgactacagagctctcaatgaagtcaccatcaaaaacaagtaccctcttccccgtatcgatgatatgttcgatcagcttaaaggtgccactgtattctccaagattgatcttcgttccggatatcaccaattacgtattcgtgaagaagacattcctaagaccgcattcaccacgcgatacggactgtatgaattcacagtgatgtcgttcggtttaaccaatgcacctgccttcttcatgaacttaatgaacaaagtgttcatggaatacttggataagtttgtggtggttttcattgatgacattctgatatactcacaatccgaggaagaccatcagcaccatctccgtctggtgttgggaaagttgcgggaacatcaattgtatgccaaacttagcaagtgtgagttctggttgtccgaagtcaaattcttaggacacgtgatatctgctaaaggagttgcggtggaccccgaaacagtgaccgccgtcactgattggaagcaacccaagacagtcactcaagttcgcagtttcttaggtttggcaggatactaccggaggtttatcgagaacttctccaaaatcgctcgacccatgacacagttgttgaagaaagaagagaaatttgtgtggagcccgcaatgcgagaaggcgttccaaactctcaaagaaaagctggtttcctcgccggtgttaatcttgccggatactcgcaaggacttcatggtgtattgtgacgcttcgcgccaaggattggggtgcgtgctcatgcaggacggtcatgtggtggcctatgcctcacgccagctacggcctcatgaaggcaactaccctacccatgatctggaattagccgcggtggttcatgctctaaaaatctggcggcactatctcattgggaatcgctgtgaaatatatactgatcataagagtttgaaatacatcttcacccagtcggatctgaatcttcggcagaggagatggttagaactcatcaaggattatgacgtgggaattcactatcatcctggtaaggccaacgtggttgccgacgctctaagtcgaaaaagccattgcaacactcttgacgtccgtggcattccacccgaacttaaccaacagatggaagccctgaacctaagcatagttggtcgtggattcttggctacgctggaagccaagcccaccttgctcgatcaaatccgcgaggctcagaagaacgacccggacatgcgtggactcctcaagaatatgaaacagggtaaagccgctggtttcacagaggatgaacacggaaccctatggaacggaaatcgggtatgcgttccagatgacagagaacttaaacagctgatacttcaggaagctcacgaaagtccttattccatccaccctggcagtacgaagatgtacttagacttgaaggagaaatactggtgggttagtatgaagcgggaaattgcagagttcgtggccctttgtgatgtgtgccagcgtgtcaaggcagagcaccaacgaccggccggacttctccaacctctccaagtaccagaatggaaatgggatgaaattgggatggatttcatcaccggacttccaaaaacccaaggtggatatgattctatatgggtagttgtggatcgattaaccaaggtagctcggtttattcctgtgaagaccacctatggagggaacaaactagccgagctttacttcgctaggatcgtgagtctccatggcgttcccaagaaaatcgtatctgataggggaagccaattcacctctcacttttggaagaagctccaagaagagttgggtacccgattaaatttcagcaccgcgtatcacccgcagacagatggacagaccgagcgtctaaatcagatcctagaagatatgcttcgcgcatgtgtcctagatttcgggaagacctgggataagagtctcccctatgccgagttctcctacaataacagctaccaacccagtatacaaatggcaccttatgaagcgttgtatgggcgcaaatgccggacaccgctattgtgggaccgagttggggaaagccaagtgttcgggactgatatcctgagagaagctgaagcgaaggtcagaaccattcgggataatctaaaggtggcacagtcccggcagaaaagttatgcagataaccgtcgccgtaacctggaattcgcagtggacgattttgtgtaccttcgggtcacgccattgcggggtgtgcacaggtttcagacaaaggggaagctcgcacctcggtatgtgggtcctttccgtatcattgctcggtgcggagaagtcgcttaccagttggagctgcccgcctccttgggcaacgtgcacgatgtgttccatgtgtcgcaactcaagaaatgtcttcgagtgccatccgagcaggccgactcagagcaaattgaagttcgcgaagacttgacctacgtggagaggccagtgaaaatcctggacacaatggaacgcaggaccaggaaccgggtaatccatttttgcaaggtccagtggagcaaccacgccgaggaagaagctacttgggagcgtgaagacgagctgaaggcagcccatcccgatctcttcgctagttcttccgaatctcggggtcgagattccgtttaa

SEQ ID NO: 14122 - DNA, 2685 bp, Oryza sativa
  Clone ID: TFbOSC15765j.C1.o1.fg
atggccggcagcgtcagccgtcgtggcttggacatgactggtttcgtcttggagctgcggggcatgtgcgttgtcctggggtatccgcatggagtggactaccaggccaggccgcttccggatcaggagggtgacgatgcagagccccacgctgcgtgggagcactcgccctaccgctaccaccctcgccgtggaggagcccgcgactacgccaccttccgggatgctagctcggaggatgacgctaccatcgtgcacctggcgcgcatggtggaggcgtacgacgcggctcgtatcgacttccatcagatggtgcgccgtgggatggtcgagaacaacttgaagatcctggagctgcatcaggagaacctgcagctcaagaaggacctagacgcagtggaggcgcagctgcatcagctcaagatcgcccagggagaggtctgccgccccaagcgccaccgcgtctaccgcagccagaagatcaccgcccgcaaaagcacctccaggcccgagcttgttcgtcagtccctggcgtggacctgcttcgtggagacccctcgtgccgagcccgcgcccgtggttccccaggagggggaagcctccggcgttggtagcacggaggatgcgctgttgctcaccttccgtcctggcccgtcgcagcggagaagtgctaataccggtgatggcaaccaacctgaaggcagcaaccacaaccaccagggcagcccacctccacctcctcctccgcctccaccaccaccaccagataccaacgccattctcacccaaatcctcgcccagcaggccaacatgatgactgctttcctccaccacctccaaaatccgccacaacagaatgctccaccaccacccccacaacactctaaactcgccgagttcctccgcatccgcccacctaccttctctagctccaacaaccccgtggatgcgttggattggttgcatgccgtggggaaaaagctagacactgtgcagtgcagcgatgaggagaaagtcatcttcgccgcccaccagctgcaggggcccgcatctctatggtgggaccatttccaggctacgcagccagaggggcagcctattacttgggcccgtttcaccgccgctttccggaggacccatgtgcctgccggagtcatggcccttaagaaaagggaattccgggagttgaagcaaggcaaccgctctgtgatggagtatttgcatgagttcaacaacctggcccgttacgccccggaggatgtgcgggaagatgaggagaagcaagagaagttcttggcaggaatggaccctgagctgtccgtccgtctagtctccggggactatccggatttccaacgtctggtggacaagagcatccgcttggaagccaagcacaaggaactggagtcgcacaagcgccgcttggcgaatttccgcaatcaacaggatgctaaccaaagggtccgctacaccaatccctatccagggggatcctcctcgcagcagcaacaacagcagcagcaacctcgctccgcgcctcgacctcaattcgtggtgcgcgtcccacagccgcagcagcagcagaatcaacaagggactcgtgcgccccgtcctcctacgccaactgtgcagcctggtcaaggccgcagggacgctcaaggtccgcagcgtctgtgcttcaactgcttcgagcccgggcactttgcggataaatgcccgaagccgaggcgccagcaaggccaagcgcctccccgctccaacaatggtggtaaggatgttattcggggtcgtgtgaaccatgtgacggccgaggacgtgctgacaactccagacgtcatcgttgggcacgtgatatctgctaaagaagttgctgtggaccccgaaacagtgaccgccgtcactgattggaagcaacccaagaccgtcactcaaattcgcagtttcttaggtttggcaggatactaccggagcgtgtcaaggcagagcaccaacgaccggccggacttctccaacctctccaagtaccagaatggaaatgggatgaaattgggatggatttcatcaccggacttccaaaaacccaaggtagctcgatttattcctgtgaagaccacctatggagggaacaaactagccgagctctacttcgctaggatcctccggtccgccgccgtcgtcaccccggaccgcctcccacctcggggccggctccttcggcttcgccgcatcctcgccgacctcgtccacctctccgtttcggtcgccgaccgccggagcgccgccgcccccgtctacccgagccgcgccgccaccttcctccgctccggtcgccgttcccgtcgtcgccgtcgacccggggtgagccgtggaccgccgtttcacttcccccttccctcccctctctcgggcgccgctccgccgcgccggtggtcgccggcggcgaccatcagggcgcgggtgcgccgcctcccgtcggctgtgccggcgtggccgccttcgggcgcgccccgcggctgccatgtggggcccggccgtcagccgcccgcgccctcgggtgcggctgacgcgtgggacccacggcgccggccggcgcaagccgcgtgcacccggtccaccgtggaccgtgaggctgccgcgtgggccccactcccgtggacccggtccgcgcgcccctccctcggctga

SEQ ID NO: 14123 - DNA, 4907 bp, Oryza sativa
  Clone ID: TFbOSC15868j.C1.o2.np
atggcggccggatcttccgcgcccgtttccccctcgtccggccgccctctcccactcccaaccctatataaaccttccccgtgcctccctccaccgtttccgccactcgccgctctctctccccgccggaatcgagctcgcgccatcgctctctctctccgccgtcgccgccgagctccggtccgccgccgtcgtcgccccggaccttctcccgcttcggcgtcaccttcttcgggttcgccgcaacctcgccgacctcgtccacctctccgtttcggtcgccgaccgccggaacgccgccgtccccgtcgacccgagccgcgccgccgcctctatccgctccggtcgccgttcccgtcgtcgccgtcgacccggggtgagccgtggatcgccgattcgtttcccccttccctcccctctctcgggcaccgctccgccgcgccggtggtcgccggcggcgaccatcggggcacgagtgcgccgcctcccgtcggctgtgccggcgtggccgccttcgggcgcgccccgcggctgccgcgtggggcccggccgtcagccgcccgcgccctcgggtgcggctgacgcgtgggacccacggcgccggtcggtgcgagcccgggtgcacccggtccaccgtggacccaccttggccatataaggaccggtcttcgggcctctgttgcaaagcactaccgtacttccacatgtctagtgggacaaatgaaggctacacgagctacggcccggtagtcgagatgtcatggcacagggccggtgtcctgctgctaggggctcagtcctgcctgcctgtcccggaggttccggccgtaggtgggattgggtcgatgtacacctctgatcagagtataatctattcgaatagccgcgccctcggttatgggcaagccgagcaatgtacccaaatggccggcagcatcagccgtcgtggtctggacctgactggtttcgtcttggagctgcggggcatgtgcgttgtcctggggtatccacatggagtggactaccagggcaggccgcttccggagcaggagggtgacgatgcagagccccacgctgcttgggaggttactgcagtgatcctcactggctctcccgagcggacttcgttggcagtcaccgcgggtggagattctttccccgccgcttgccagaacgccgctctcctcgccatcggcactcttcaccagcgctacccggacgagttgcagcactcgccctaccgctaccaccctcgccgcggaggagcccgcgacttcgccaccttccgggatgctagctcggaggatgacgctaccatcatgcacctggcgcgcatggtggaggcgtacgacgcggctcgtatcgacttccatcagatggtgcgccgtgggatggtcgagaacaacatgaagatcctggagctgcgtcaagagaatctgcagctgaagaaggaactagacgcagtggaggcgcagctgcatcagctcaagatcgcccagggagaggtctgtcgccccaagcgtcgccgcgtctgccgcagccagaagatcaccgcccgcaagagcacctccaggcccgagcttgttcgtcagtccctggcgtggacttgcttcgtcgagacccctcgtgccgagcccgcgcccgtggttcctcaggagggggaagcctccggcgttggtagcacggaggatgcgctgttgctcaccttccatggtgacgaccaggagaagtgctaataccggtgatggcaaccaacccgaaggcagcaaccacaacaaccatggcagtccacctccacctcctcctccgcctccaccaccaccaccagacaccaacgctattctcacccaaatcctcgcccagcaggccaacatgatgactgctttcctccaccacctccaaaatccgccacaacagaatgctcctccaccacccccacaacactgtaaactcgccgagttcctccgcatccgtccaccaaccttctctagctccaataaccccgtggatgcgttggattggttgcatgccgtggggaaaaagctagacactgtgcagtgcagcgatgaggagaaagtcatcttcgccgcccaccagctgcaggggcccgcatctctatggtgggaccatttccaggctacgcagccagaggggcagcctattacttgggctcgcttcaccgccgctttccggagaacccatgtgcccgccggagtcgtggcccttaagaaaagggaattccgagagttgaagcaaggcaaccgctccgtgatggagtatttgcatgagttcaacaacctggcccgttacgccctggaggatgtgcgggaagatgaggaaaagcaggagaagttcttggcaggaatggaccctgagctgtccgtccgtctagtctccggtgactatccggatttccaacgtctggtggacaagagcatccgcttggaagccaagcacaaggaactggagtcgcacaagcgccgcttggcgaatgtccgcaatcaacagggtgctaaccaaagggtccgctacaccaatccctatccagggggatcgtcctcgcagcagcaacagcagcaacaacctcgctccgcgccccgacctcaattcgtggtgcgcgtcccacagccgcagcaacagcagagccagcaagggacccgtgtgccccgtcctcctacgccagctgcgcagtctggtcaaggccgcagggacgcttcaggtccgcagcgtctgtgcttcaactgcttcgagcccgggcactttgcggataaatgcccgaagccgaggcgccagcaaggccaagcgcctccccgctccaacaacggtggtaaggatgtcattcggggtcgtgtgaaccacgtgacggccgaggacgtgctgacaactccagacgtcatcgttggtacgttcctcattcattccatccctgctaccattttgttcgactctggagcttcccactcgtttatatctgtgccattcgtggggagaaatcagttgggggtagaaaggcttaggaaccctctgctcatcaccacccctggaggggttatgacagcaaagtattatagtcctgccgtccctatagaaattcaggggattccttttccctcggatctgattctgctagacaccaagaacttggatgtgatccttgggatgaattggatggctcaattccaaggagtagtggattgcgcgagacgcactgtcactctgtaccgagggccggaacaatcggttgttttctttgcacccccaacctctgtcagtagttcagaacttcatcagataggactgtcagaaatccccatcgtcagggagttcggagatgtgtttccggaagaactacccggtatgccgcccaagcgagagattgagttccggatagatcttgctccaggaaccactcctctgtacaaacgaccctaccgtatggcagcaaatgaattggccgaagtcaagaaacagttggaagagttgaaagaaaaggggtatatacgtccgagtacttccccctagggtgctcctgtgatttttgtggagaagaaagacaagacgaagaggatgtgcgttgactacagagctctcaatgaagtcaccatcaaaaacaagtaccctcttccccggatcgatgatctgttcgatcagcttaaaggtgccactgtattctccaagattgatcttcgttccggatatcaccaattacgtattcgtgaagaagatattcctaagaccgcattcaccacgcgatacggactgtatgaattcacggtgatgtcgttcggtttaaccaatgcacctgccttcttcatgaacttaatgaacaaagtgttcatggaatacttggataagtttgttgtggtgttcattgatgacattctggtgtactcacaatcagaggaagaccatcagcaccatctccgtctggtgttgggaaagttgcgggaacatcaattgtatgccaaacttagcaagtgtgagttctggttgtccgaagtcaaattcttagggcacgtgatatctgctaaaggagttgctgtggaccccgaaacagtgaccgccgtcaccgattggaagcaacccaagacagtcactcaagtccgcagtttcttaggttttgcaggatactaccggaggttcatcgagaacttctccaaaatcgctcgacccatgacacagttgttgaagaaagaagagaaatttgtgtggagcccgcaatgcgagaaggcgtttcaaactctcaaagaaaagctggtttcctcgccggtgttaaccttgccagatactcgcaaggatttcatggtgtattgtgatgcttcgcgccaaggattggggtgcgtgcttatgcaggatggtcatgtggtggcctatgcctcacgccagctacggcctcatgaaggcaactaccctacccatgatttggagttagccgcggtggttcatgctctaaaaatctggcggcactatctcattgggaatcgcagtgaaatatatactgatcataagagtttgaaatacatcttcacccagtcggatctgaatcttcggcagaggagatggttagaactcatcaaggattatgatgtgggaattcactaccatcctggtaaggccaacgtggtcgccgacgctctaagtcgaaagagccattgcaacactcttaacgtccgtggcattccacccgaacttaaccaacagatggaagccctgaatctaagcatagtgggtcgtggattcttggttgcgttggaagccaagcccaccttgctcgatcaaatccgcgaggctcagtgtcgcgaccgggaaaattgccttttcccgaacgccagtaacggctcgacggagggacgaacgccacgacgaccgggaacgacgagaggacgacgacgacgacgacgaccggg

SEQ ID NO: 14124 - DNA, 2110 bp, Oryza sativa
  Clone ID: TFbOSC16514j.C1.o1.fg
tgatcctcgctggctctcccgagcggacttcgctggcagtcaccgcgggtggagattctttccccgccgcttgcaaaacgccgcttttctcgccatcggcactcttcaccagcgctacccggacgagttgcagcactcgccctaccgctaccaccctcgtcgcggaggagcccgcgactacgccaccttccgggatgctagctcggaggatgacgctaccatcatgcacctggcgcgcatggtggaggcgtacgacgcggctcgtatcgacttccatcagatggtgcgccgtgggatggtcgagaacaacatgaagatcctggagctgcgtcaggagaacctgcagctcaagaaggacctagacgcggtggaggcgcagctgcatcagctcaagatcgcccagggagaggtctgccgccccaagcgtcgccgcgtctgccgcagccagaagatcaccgcccgcaagagcacctccaggcccgagcttgttcgtcagtccctggcgtggacttgcttcgtcgagacccctcgtgccgagcccgcgcccgtggttcctcaggagggggaagcctccggcgttggtagcacggaggatgcgctgttgctcaccttccgtcctggcccgtcgcagcggagaagtgctgccaccggtgatggcaaccaacctgaaggcagcaaccaccaccagggcagcccacctccacctcctcctccgcctccaccaccaccgccagataccaacgccattctcacccaaatcctcgcccagcaggccaacatgatgactgctttcctccaccacctccaaaatccgccacaacataatgctccaccaccacctccccaacactctaaactcgccgagttcctccgcatccgcccacctaccttctctagctccaacaaccccgtggatgcgttggattggttgcatgccgtgggaaaaaagctagacactgtgcagtgcagcgatgaggagaaagtcatcttcgccgcccaccagctgcaggggcccgcatctctatggtgggaccatttccaggctacgcagccagaggggcagcctattacttgggcccgtttcaccgccgctttccggaggacccatgtgcccgccggagtcgtggcccttaagaaaagagaattccgagagttgaagcaaggcaaccgctccgtgatggagtatttgcatgagttcaacaacctggcccgttacgccccggaggatgtgcgggaagatgaggagaagcaagagaagttcttggcaggaatggaccctgagctgtccgtccgtctagtctccggggactatctggatttccaacgtctggtggacaaaagcatccgcttggaagccaagcacaaggaactggagtcgcacaagcgccgcttggcgaatttccgcaatcaacagggtgctaaccaaagggtccgctacaccaatccctatccagggggatcctcctcgcagcagcaacaacagcagcagcaacctcgctccgcgcctcgacctcaattcgtggtgcgcgtcccacagccgcagcagcagcagaatcaacaagggactcgtgcgccccgtcctcctacgccaactgtgcagcctggtcaaggccgcagggacgctcaaggtccgcagcgtctgtgcttcaactgcttcgagcccgggcactttgcggataaatgcccaaagccgaggcgtcagcaaggccaagcgcctccccgctccaacaacggtgggaaggatgtcattcggggtcgggtgaaccacgtgacggccgaggacgtgctgacaactccagacgtcatcgttggtacgttcctcattcattccatccctgctaccattctgttcgactctggagcttcccactcgtttatgtctgtgccattcgtggggagaaatcagttgggggtagaaaggcttaggaaccctctgctcatcaccacccctggaggggttatgacagcaaacgtgtcaaggcagagcaccaacgaccggccggacttctccaacctctccaagtaccagaatggaaatgggatgaaattgggatggatttcatcaccggacttccaaaaacccaaggttgatatgattctatatgggtag

SEQ ID NO: 14125 - DNA, 1174 bp, Oryza sativa
  Clone ID: TFbOSC16518j.C1.o1.fg
atggtgacgaccaggagaaatgttaacaccggggaaggcaaccaacccgagggcagcaaccccaacccccaagggaatccacctccaccaccaccaccagacaccaacgccattctcacccagatcctcgcccaacaagccaacatgatgaatactttcctccaccacctccaaaacccgccacaacagaatgctccaccaccaccaccccaacactctaaactcgccgagttcctccgcatccgcccacctaccttctctagctccaacaaccccgtggatgcgttggattggttgcatgccgtggggaagaagctggacactgtgcagtgcagtgatgaagagaaagtcatcttcgccgctcaccagctgcaggggcccgcatctctatggtgggaccacttccaggctacgcagccagaggggcaaccgattacttgggctcgcttcaccgccgctttccggagaacccatgtgcccgctggagtcgtggctcttaagaaaagggaattccgggagttgaagcaaggcaaccgctccgtgatggagtatttgcacgagttcaacaatctggcccgttatgccccggaggatgtgcgggaagatgaggagaagcaagagaagttcttggcaggaatggaccctgagctgtctgttcgtctagtctctggagactatccggatttccaacgtctggtggacaagagcatccgcttggaagccaagcacaaggagctggaatcgcacaagcgccgcttggcgaatttccgcaatcaacagggtgctaaccagagggtccgctacaccaatccctacccagggggatcctcctcgcaacagcagcagcagcagcaacctcgcccagcgcctcgacctcaattcgtggtgcgcgtcccacagccgcagcagcagcagaatcagcaagggactcgtgcaccccgtcctcctacgccaactgtgcagcccgttcaaggccgcagggacgcttcaggtccgcagcggctgtgcttcaactgcttcgagcccgggcactttgcggataaatgcccaaagccaaggcgtcagcaaggccaagcgcctccccgctccaacaacggcgggaaggatgtcattcggggccgtgtgaaccacgtgacggccgaggacgtgctgacgactccagacgtcatcgttg

SEQ ID NO: 14126 - DNA, 2274 bp, Oryza sativa
  Clone ID: TFbOSC1667j.C1.o1.fg
atgtcatggcacagggccggtgtcctgctgctaggggctcagtcctgcctgcctgtcccgggggttccggccatggccggcagcgtcagccgtcgtggtctggacatgactggtttcgtcttggagctgcggggcatgtgcgttgtcctggggtatccgcatggagtggactaccagggcaggccgctcccggagcaggagggtgacgatgcagagccccatgctgcttgggaggttactgcagtgatcctcactggctctcccgagcggacttcgttggcagtcaccgcgggtggagattctttccccgccgcttgccagagcgccgctctcctcgccatcggcactcttcaccagggctacccggacgagttgcagcactcgccctaccgctaccaccctcgtcgcggaggagcccgcgacttcgccaccttccgggatgctagctcggaggatgacgctaccatcatgcacctggcgcgcatggtggaggcgtacgatgcggctcgtatcgacttccatcagatggtgcgtcgtgggatggtcgagaacaacatgaagatcctggagctgcgtcaggagaatctgcagctgaagaaggacctagacgcagtggaggcgcagctgcatcagctcaagatcacccagggagaggtctgtcgccccaagtgtcgccgcgtctgccgcagccagaagatcaccgcccgcaagagcacctccaggcccgagcttgttcgtcagtccctggcgtggacttgcttcgtggagacccctcgtgccgagcctgcgcccgtggttccccaggagggggaagcctccggcgttggtagcatggaggatgcgctgttgctcaccttccgtcctggcccgtcgcagcggagaagtgctgccaccggtgagggcaaccaatctgaaggcagcaaccacaaccaccagggcagcccacctccacctcctcctccgcctccaccaccaccaccagacaccaacgccattctcactcaaatcctcgcccagcaggccaacatgatgactgctttcctccaccacctccaaaatccgccacaacagaatgctccaccaccacccccacaacactctaaactcgccgagttcctccgcatccgtccacctaccttctctagctccaacaaccccgtggatgcgttggattggttgcatgccgtggggaaaaagctagacactgtgcagtgcagcgatgaggagaaagtcatcttcgccgcccaccagctgcaggggcccgcatctctatggtgggaccatttccaggctacgcagccagaggggcagcctattacttgggcccgcttcaccgctgctttccggagaacccatgtgcccgccggagtcgtggcccttaagaaaagggaattccgagagttgaagcaaggcaaccgctctgtgatggagtatttgcatgagttcaacaacctggcccggtacgccccggaggatgtacgggaagatgaggaaaagcaggagaagttcttggcgggaatggatcctgagctgtccgtccgtctagtctccggggactatccggatttccaacgtctggtggacaagagcatccgcttggaagacaagcacaaggaactggagtcacacaagcgccgcttggcgaatttccgcaaccaacagggtgctaaccaaagggtccgctacaccaatccctatccagggggatcctcctcgcagcaggaacaacagcagcagcaaccacgctccgcgcctcgacctcaattcgtggtgcgcgtcccacagccgcagcagcagcagagtcaacaagggactcgtgcgccccgtcctcctatgccaactgtgcagcctggtcaaagccgcagggacgctcaaggtccgcagcgtctgtgcttcaactgcttcgagccggggcactttgcggataaatgcccaaagctgaggcgtcagcaaggccaagcgcctccccgctccaacaacggtggtaaggatgtcattcggggtcgtgtgaaccacgtgacagccgaggacgtgctgacaactccagacgtcatcgttgtcggacctgaatcttcggcaaaggagatggttagaactcatcaaggattacgatgtgggaattcactatcatcctgcgtgtcaaggcagagcaccaacgaccggccggacttctccaacctctccaagtaccagaatggaaatgggatgaaattgggatggatttcatcaccggacttccaaaaacccaaggtggatatgattctatatgggtag

SEQ ID NO: 14127 - DNA, 5315 bp, Oryza sativa
  unsure (1)..(5315): unsure at all n locations
  Clone ID: TFbOSC16834j.C1.o1.np
gtggatgaagtcgggggtcgatggacattctccagggcaaatgaaggctacacgagctgcggcccggtagtcgagatgtcatggcacagggccggtgtcctgctgctaggggctcagtcctgcctgcctgtcccgggggttccggccgtagatgggattgggtcgatgtacacctctgatcagagtaaaatctattcgaatagccgcgccctcggttatgggcaagccgagcaatgtacccaaatggccggcagcgtcagccgtcgtggtttggacatgactggcttcgtcttggagctgcggggcatgtgcgtggtcctggggtatccacatggagtggactaccaggccaggccatttccggagcaggagggtgacgatgcagagccccacgctgcttgggaggtcactgcagtgatcctcgctggctctcccgagcggacttcgctgacagtcaccgcgggtggggactccttccccgccgcttgccagagcgccgctctcctcgccatcggcactcttcaccagcgctacccggacgagttgcagcactcgccctaccgctaccaccctcgtcgcggaggagcccgcgactacgccaccttccgggacgctagctcggaggatgacgctaccatcgtgcacctggcgcgcatggtggaggcgtacgacgcggctcgtatcgacttccatcagatggtgcgtcgtgggatggtcgagaacaacatgaagatcctggagctgcgtcaggagaacctgcagctcaagaaggacctagacgcggtggaggcgcagctgcatcagctcaagatcgcccagggagaggtctgccgccccaagcgccgccgtgtctgccgcagccagaagatcaccgcccgcaagagcacctccaggcccgagcttgttcgtcagtccctggcgtggacttgcttcgtggagacccctcgtgccgagcccgcgcccgtggttccccaggagggggaagcctccggcgttggtagcacggaggatgcgctgttgctcaccttccgtcctggcccgtcgcagcagtagacgagcagttagtaggcttgcgcgtgtgttctaccaggagaaatgctggcaccagtgatggcaaccaacccgaaggcagcaaccacaacaaccatggcagcccaccttcacctnctnctncgccttcaccaccaccaccagataccaatgccattctcacccaaatcctcgcccagcaggccaacatgatgactgcttttctccaccacctccaaaatccgccacaacataatgctccaccaccacctccccaacactctaaactcgccgagttcctccgcatctgtccacctaccttctctagctccaacaaccccgtggatgcgttggattggttgcatgccgtggggaaaaagctagacactgtgcagtgcagcgatgaggagaaagtcatcttcgccgcccaccagctgcagggacccgcatctctatggtgggaccatttccaggctacgcagccagagggacagcctattacatgggctcgcttcacccccgctttccgaagaacccatgtgcccgccggagtcgtggcccttaagaaaagggaattccgagagttgaagcaaggcaaccgctccgtgatggagtatttgcacgagttcaacaacctggcccgttacgctccggaggatgtgcgggaagatgaggagaagcaagagaagttcctggcaggaatggaccctgagctgtccgtctgtctagtctccggggattatccggatttccaacgtctggtggacaagagcatccgcttggaagccaagcacaaggaactggagtcgcacaagcgccgcttggcgaatttccacaaccaacagggtgctaaccaaagggtccgctacaccaatccctatccagggggatcctcctcgcagcagcaacagcagcagcagcaacctcgctccgcgcctcgacctcaattcgtggtgcgcgtcccacagccgcagcaggagcagaatcaacaagggactcgtgcgccccgtcctcctccaccgactgtgcagcctggtcaaggccgcagggacgctcaaggtccgcagcgtctgtgcttcaactgcttcgagcccgggcactttgcggataaatgcccgaagccaaggcgtcagcaaggccaagcgcctccccgccccaacaacggtggtaaggacgtcattcggggtcgtgtgaaccatgtgacggccgaggacgtgctgacaactccagacgtcatcgttggtacgttcctcattcattccatccctgctaccattttgttcgactctggagcttcccactcatttatatctgtgccattcgtggggagaaatcagttgggggtagaaaggcttagaaaccctctgctcatcaccacccctggaggggttatgacagcaaagtattatagccctgccgtccctatagaaattcaggggattccttttccctcggatctgattctgctaggcaccaagaacttggatgtgatccttgggatgaattggttggctcaattccaaggagtagtggattgcgcgagacgcactgtcactctgtaccgagggccgggacaaccggttgttttctttgcacccccaacctctgtcagtagttcagaactgcatcagataggtctgtcagaaatccccatagtcagagagttcggagacgtgtttccggaagaactacctggtatgccgcccaagcgagagattgagttccagatagatcttgctccaggaaccactcctctgtgcaagcgaccctaccgtatggcagcaaatgaactggccgaagtcaagaaacagctggaagagttgaaagaaaaggggtacatacgtccgagcacttccccctggggtgctcctgtgatttttgtggagaagaaagacaagacgaagaggatgtgcgttgactatagagctctcaatgaagtcaccataaaaaacaagtaccctcttccccggatcgatgatctgttcgatcagcttaaaggtgccactgtattttccaagattgatcttcgttccggatatcaccaactgcgtattcgtgatgaagatattccgaagaccgcattcaccacgcgatacggactgtatgaattcacggtgatgtcattcggtttaaccaatgcacccgccttcttcatgaacttaatgaacaaagtgttcatggaatacttggataaatttgttgtggttttcattgatgacattctgatatactcacaatcagaggaagaccatcagcaccatctccgtctggtattgggaaagctgcgggaacatcaattgtatgccaaacttagcaagtgtgagttctggttgtccgaagtcaaattcttagggcacgtgatatctgctaaaggagttgctgtggaccccgaaacagtgatcgccgtcaccgattggaagcaacccaagacagtcactcaagttcgcagtttcttaggtttggcaggatactaccgaaggttcatcgagaacttctccaaaatcgctcgacccatgacacagttgttgaagaaagaagagaaatttgtgtggagcccgcaatgtgagaaggcgttcagaactctcaaagaaaagctggttgcctcgccagtgttaatcttgccggatactcgcaaggacttcatagtgtattgtgacgcttcgcgccaaggattggggtgcgtgctcatgcaggacggtcatgtggtggcctatgcctcacgccagcttcgacctcatgaaggcaactaccctacccatgacttggaattagccgcggtggttcatgctctaaaaatctggcggcactatctcattgggaatcgctgtgaaatatatactgatcataagagtttgaaatacatcttcacccagtcggatctgaatcttcggcaaaggagatggttagaactcatcaaggattatgatgtgggaattcactatcatcctggtaaggccaacgtggtcgccgacgctctaagtcgaaagagccattgcaacactcttaacgtccgtggcattccaccggaacttaatcaacagatggaagccctgaacctaagcatagttagtcgtggattcttggctgcgctggaagccaagcctaccttgctcgatcaaatccgcgaggctcagaagaatgatccggacatgcatgggctcctcaagaatatgaaacagggtaaagccgctggtttcacagaggatgaacacggaaccctatggaacggaaatcgggtatgcgttccagatatcagggaacttaaacagttgatacttcaggaagctcacgaaagtccttattccatccaccctggcagtacgaagatgtacttagacttgaaggagaaatactggtgggttagtatgaagcgggaaattgcagagttcgtggccctttgtgatgtgtgccagcgtgtcaaggcagagcaccaacgaccggccggacttctccaacctctccaagtaccagaatggaaatgggatgaaattgggatggatttcatcaccggacttccaaaaacccaaggtggatatgattctatatgggtagttgtggatcgattaaccaaggtagcacggttcattcccgtaaagaccacctatggagggaacaaactagctgaactctacttcgctaggatcgtaagtctgcatggcgtccccaagaaaatcgtatctgataggggaagccagttcacctctcacttttggaagaagctccaagaagagctgggtacccgattaaacttcagcaccgcgtatcacccgcagacagatgggcagaccgagcgtctaaatcagatcctagaagatatgcttcgcgcatgtgtcctggatttcgggaagacctgggataagagtctcccctatgccgagttctcctacaataacagctaccaagccagcatacaaatggcaccttatgaagcgttgtatggacgcaaatgccggacaccgctattgtgggaccaagttggggaaagccaagtgttcgggactgatatcctgagacaagctgaagcgaaggtcagaaccattcgggataatctaaagatggcacagtcccggcagaaaagttatgcagataaccgtcgccgtgacctggaattcgcagcggatgactttgtgtatgttcgggtcacgccattgcgaggtgtacacaggtttcggacaaaggggaagctcgcacctcggtatgtgggtcctttccgtatcactgctcggcgcggagaagttgtcacgaccggaaataacccaacgggcattccttacgtgcgtgcatta

SEQ ID NO: 14128 - DNA, 4992 bp, Oryza sativa
  Clone ID: TFbOSC16878j.C1.o1.fg
atggccggcagcgttacccgtcgtggtttgagcatgactggcttcgtcttggagctgcgaggcatgtgcgtggtcttggggtatccacatggagtggattaccaggccaggccgctcccggagcaggagggtgaggatgcagagcctcacgctggttgggaggtcactgcagtgattctctccggctctcccgagcggacttcgctggcagtcaccgcgggtggggattccttccccgccgcttgccagaacgccgctctcctcgccatcggcacccttcaccagcgctacccggacgagttgcagcactcgccctaccgctaccacccccgtcgcggaggagccagcgaccacgccaccttccgagacgctagctcggaggatgacgctaccgtcgtgcatctggcacgcatggtggaggcgtacgacgcggctcgtatcgacttccaccagatggtgcgtcgtggcatggtggagaacaacatgaagatcctggagctgcgtcaggagaacctgcagctcaagaaggacctcgacgcgttggaggcgcagccgcaccagctcaaggtcgcccagggagagatcagccgtcccaagcgtcgccgcgtctgccgcagccagaagatcaccgcccgcaagagcacctccaggcccgagcttgtccgtcagtccctggcgtggacttgcttcgtcgagacccctcgtgccgagcctgcgcccgtggttccccaggagggggaagcctccggcgttggtagctcggagggtgcgctgttgctcaccttccgtcctggcccgtcgcagcggcaaccacccgagggcagcaaccccaacccccaaggcaatccacctccaccaccaccaccagacaccaacgccattctcacccagatcctcgcccagcaagccaacatgatgaatgctttcctccaccacctccaaaatccaccacaacagaatgctccaccacctcctccccaacactccaaactcgccgaattcctccgcatccgcccacccaccttctctagctccaacaatcctgtagatgcgttggattggttgcatgccgtggggaagaagctagacacggtgcagtgcagcgacgaagagaaagtcatcttcgccgcccatcagctgcaaggacccgcatctctctggtgggaccatttccaggctgcgcagccagaagggcaaccgatcacttggactcgcttcaccgccgctttccggagaacccatgtgcccgctggagtcgtggctcttaagaaaaaggaattccgggagttgaagcaaggcaaccgctccgtgatggagtacttgcatgagttcaacaatctggcccgttacgcccctgaggatgtgcgggaagatgaggagaagcaagagaagttcctggcaggaatggaccccgagctgtccgttcgtctagtctctggggactacccggacttccaacgactggtggacaagagcatccgcttggaagccaagcacaaggagctggagtcgcacaagcgccgcttggcgaacatccgcaatcaacagggtgctaaccagagggtccgctacaccaatccctacccagggggatcctcctcgcagcagcagcagcagcagcagcagcaacctcgctccgcgcctcgacctcaattcgtggtgcgcgtcccacagcagcaaccgcagcagaatcagcaagggactcgtgcaccccgtcctcctacgccagctgggcagcccgttcaaggccgcagggacgcttcaggtccgcagcggctgtgcttcaactgcttcgagcccgggcactttgcggataaatgcccaaagccaaggcgtcagcaaggccaagcgcctccccgccccaacaacggtggcaaggatgtcatccgtggtcgcgtgaaccacgtgacggccgaggacgtgctgacaactccggacgtcatcgttggagtagtggattgcgcgagacgcactgtcactctgtaccgaggtccggaacaaccggttgttttctttgcacccccaacctctgtccgaagttcagaactgcatcagataggactgtcagaaatccccatcgtcagagagttcggagatgtatttccggaagaactacctggtatgccgcccaagcgagagattgagttccggatagatcttgctccaggaaccactcctctgtacaagcgaccctaccgtatggcagcaaatgaactggccgaagtaaagaaacagttggaagagttgaaagaaaaggggtacatacgtccgagtacttccccatggggtgctcctgtgatttttgtggagaagaaagacaaaacgaagaggatgtgcgttgactacagagctctcaatgaagttaccatcaaaaacaagtaccctcttcctcgaatcgatgatctgttcgaccagcttaaaggtgccactgtattctccaagattgatcttcgttccggatatcaccaattacgtattcgtgaagaagatattccgaagaccgcattcaccacgcgatatgggctgtatgaattcacggtgatgtcgttcggtttgaccaatgctcctgccttcttcatgaacttgatgaacaaagtgttcatggaatacttggataagttcgttgtggttttcatcgacgacattctgatatactcacaaacagaagaagaccatcagcaccatctccgtctggtattgggaaagctgcgggaacatcaattgtatgccaagcttagcaagtgtgagttctggttgtccgaagtcaaattcttggggcacgtgatatctgctaaaggagttgctgtggatcccgaaacagtgaccgccgtcaccgaatggaagcaacccaagacagtcactcaaattcgcagtttcttgggtttggcaggatactaccggagattcatcgagaacttctccaagatcgctcgacccatgacacagttgttgaagaaagaagagaaatttgtgtggagcccgcagtgcgagaaggcgttccaaactctcaaggaaaagctggtttcctcgccagtgttaatcttgccggatactcgcaaggatttcatggtgtattgtgatgcttcgcgccaaggattggggtgcgtgctcatgcaggacggtcatgtggtagcctatgcctcacgtcagctacgtcctcatgaaggcaactaccctacgcatgacttggagctagcagcggtggttcatgctctaaaaatttggcggcactatctcattgggaaccgctgtgaaatatatactgaccataagagtttgaaatacatcttcacccagtcggatctgaatcttcggcaaaggagatggttagaactcatcaaggattatgatgtgggaatacactatcatcctggtaaggccaacgtggttgccgacgctctaagtcgaaagagccactgcaacactctcaacgtccgaggcattccacccgagcttaatcaacagatggaagccctgaacctaagcatagttggtcgcggattcttggctgcgttggaagccaagcctaccttgctcgatcaaatccgcgaggctcagaagaatgatccggacatgcatggactcctcaagaatatgaaacagggtaaagccgcaggtttcacagaggatgaacacggaactctatggaacggaaagcgggtgtgcgttcccgataacagagaacttaaacagctgatacttcaggaagctcacgaaagtccttattccattcacccgggcagtaccaagatgtacttagacttgaaggagaaatactggtgggtcagcatgaagcgggaaattgcagagtttgtggctctatgtgatgtgtgccagcgtgtcaaggcagaacaccaacgaccggccggacttctccaacctctccaagtgccggaatggaaatgggatgaaattgggatggatttcatcaccggacttccaaaaacccaaggaggatatgattccatatgggtagttgtggatcgattaaccaaggtagctcgattcattcctgtgaagaccacctatggagggaacaaactagcggagctctacttcgctaggatcgtgagtctccatggtattcccaagaaaatcgtatctgataggggaagccaattcacctctcacttttggaagaagctccaagaagagctgggtactcgattgaatttcagcaccgcgtatcacccgcagacagatggacagaccgagcgtctgaatcagattctagaagatatgctccgcgcatgtgtcctagatttcgggaagacttgggataagagtctcccctatgccgagttctcctacaataacagctatcaagccagcatacaaatggcaccctatgaagcgttgtacgggcgcaaatgccggacaccgctattgtgggaccaagtcggagaaagccaagtgttcgggactgatatcctgagagaagctgaagctaaagtcagaatcattcgggataatctaaaggtggcacaatctcggcagaaaagttatgcagataaccgtcgtcgtgacttggaattcgcagtggatgattttgtgtaccttcgggtcacgccattgcgaggcgtgcacaggtttcagacgaaagggaagctcgcacctcggtatgtgggtcccttccgtatcatcgctcgacgcggagaagttgcttaccagctggagttgcccgcctccttgggcaacgtgcatgatgtgttccatgtgtcgcaactcaagaaatgtctccgagtgccatccgagcaggccaactcagagcaaattgaagtccgcgaagacctgacctatgtggagaggccagtgaaaatcctggacaccatggagcgcaggaccaggaaccgagtaatccgtttttgcaaggtccagtggagcaaccacgccgaagaagaagctacttgggagcgcgaagacgagctgaaggcagcccatcctgatctcttcgccagttcttccgaatctcggggtcgagattccgtttaa

SEQ ID NO: 14129 - DNA, 471 bp, Oryza sativa
  Clone ID: TFbOSC16878j.C1.o2.gm
atgtggaagtacggtagtgctttgcaacagaggcccgaagaccgccgcgagggcgcgcccgagggcggcctcgccggcgcggccgacgggagcggcgcgcccgcgccccgatggtcaccgccggcgaccaccggcgcggcggagcggcgcccgagagagaggagggaagggggaaggcgaaggggacggtccacggctcaccccgagacagcgaaggcggcggaaacggcggacggagcggaggaagacggcggcgcggctcgggaagacgatgacgacggtgctccggcggtcggcggacgaagcggagcggcggacggggtcggcggcgatgcggcgatgccgaaggaggggtcgccgagccgggaggagaaccggagcggcggcggcggcggaacggaactcgtcggcgacggcggagagaaggaaaagcggcgcgagcacgattccgacggcgagagcgagcggtga

SEQ ID NO: 14130 - DNA, 541 bp, Oryza sativa
  Clone ID: TFbOSC16881j.C1.o1.fg
atggaccctgagctgtccgtccgtctagtctccgtggactatccggatttccaatgtctggtggacaagagcatccgcttggaagccaagcacaaggaactggagtcgcacaagcgccgcttggcgaatttccgtaatcaacagggtgctaaccaaagggtccgctacaccaatccctatccagggggatcctcctcgcagcagcaacaacagcagcagcaacctcgctccgcgccccgccctcaattcatggtgcgcgtcccacagccgcagcaacagcagagtcagcaagggactcgtgcgccccgtcctcctacgccaactgtgcagcctggtcaaggccgcagggacgttcaaggtccgcagcgtctgtgcttcaactgcttcgagcccgggcactttgcggacaaatgcccaaaaccgcggcgtcagcaaggccaagtgcctccccgctccaacaacggtggtaaggatgtcattcggggtcgtgtgaaccacgtgacggccgaggacgtgctgacaactccagatgtcatcgttg

SEQ ID NO: 14131 - DNA, 3903 bp, Oryza sativa
  Clone ID: TFbOSC16923j.C1.o1.np
atggagcccgagagcgccgcgccggtttccttctcctccggccgccctctctcactcccaaccctatataaaccatccccgtgcctccctcctccgtttccgccgctcgccgctctctctccccgtcggaatcgagctcgcgccgtcgccctctctctccgccgccgccgccgagctccggtctgccgccgtcgtcgccccggaccttctcccgtttcggcgtcgccttcttcgggttcgccgcaacatcgccgacctcgtccacccctccgtttcgcccgccgaccgccggaacgccgccgtcctcgtcgacccgagccgcgccgccgcctttttccgctccggtcgccgttcccgtcgtcgccgtcgacccggggtgagccgtggaccgcccatttcgtttcccccttccctcccctctctcggccgccgctccgccgtgcctatggccgccgccggcgaccataggggcgcgggcgcgccgcctcccgtcggctgtgccggcgaggccgccttcgggcgcgccccgcggctgccatgtggggcccggccgtcagccgcccgcgcctcgggtacggctgacgcgtgggacccacggcgccggccggcgtaagccgcgtgcacccgttccaccgtggacccacctcggccatataaggaccggtcttcgggcctctgttgcaaagcactaccgtacttccacatgtctagtggggcaaatgaaggctacacgagctgcggcccggtagtcgagatgtcatggcacagggccggtgtcctgctgctaggggctcagtcctgcctacctgtcccgggggttccggccgtaggtgggattgggtcgatgtacacctctgatcagagtataatctattcgaatagccgcgccctcggttatgggcaagccgagcaatgtacccaaatggccggcagcgtcacccgtcgtggtttggacatgactggcttcgtcttggagctgcggggcatgtgcgtggtcctggggtatccgcatggagtggactaccaggccaggccgcttccgaagcaggagggtgacgatgcagagccccacgctgcttgggaggtcactgcagtgatcctcgctggctctcccgagcggacttcgctggcagtcaccgcgggtggagattctttccccgccgcttgccagaacgccgctctcctcgccatcggcactcttcaccagcgctacccggacgagttgcagcactcgccctaccgctaccaccctcaccgcggaggagcccgcgactacgccaccttccgggatgctagctcggaggacgacgctaccatcgtgcacctggcgcgcatggtggaggcgtacgacgcggctcgtatcgacttccatcagatggtgcgccgtgggatggtcgagaacaacctgaagatcctggagctgcgtcaggagaacctgcagctcaagaaggacctagacgcggtggaggcgcagctgcatcagctcaagatcgcccagggagaggtctgccgccccaagcgtcgccgtgtctgccgcagccagaagatcaccgcccgcaagagcacctccaggcccgagcttgttcgtcagtccctggcgtggacctgcttcgtggagacccctcgtgccgagcccgcgcctgtggttccccaggagggggaagcctccggcgttggtagcacggaggatgcgctgttgctcaccttccatggtgacgaccaggagaagtgctaatgccggtgatggcaaccaacctgaaggcagcaaccgcaaccaccatggcagcccacctccacctcctcctccgcctccaccaccaccaccagataccaacgccattctcacccaaatcctcgcccagcaggccaacatgatgactgctttcctccaccacctccaaaatccgccacaacagaatgctccaccaccacccccgcaacactctaaactcgccgagttcctccgcatccgcccacccaccttctctagctccaacaaccccgtggatgcgttggattggttgcatgccgtggggaaaaagctagacactgtgcagtgcagcgatgaggagaaagtcatcttcgccgcccaccaactgcaggggcccgcatctctatggtgggaccatttccaggctacgcagccagaggggcagcctattacttgggcccgtttcaccgccgctttccggagaacccatgtgcccgccggagtcgtggctcttaaaaaaagggaattctgagagttgaagcaaggcaaccgctccgtgatggagtatttgcatgagttcaacaacctggcccgttacgccccggaggatgtgcgggaagatgaggagaagcaagagaagttcttggcaggaatggaccctgagctgtccgtccgtctagtctccggggactatccggatttccaacgtctggtggacaagagcatccgcttggaagccaagcacaaggaactggagtcgcacaagcgccgcttggcgaatttccgcaatcaacagggtgctaaccaaagggtccgctacaccaatccctatccagggggatcctcctcgcagcagcaacaacagcagcagcaacctcgctccgtgcctcgacctcaatacgtggtgcgcgtcccacagccgcagcagcagcagagtcagcaagggactcgtgcgccccgtcctcctacgccagccgtgcagtctggtcaaggctgcagggacgctcaaggtcagcagcgtctgtgcttcaactgcttcgagcccgggcactttgcggataaatgcccgaaaccgaggcgccagcaaggccaagcgcctccccgctccaacaacggtgggaaggatgtcattcagggtcgtgtgaaccacgtgacggccgaggacgtgctgacaactccagacgtcatcgttggtacgttcctcattcattccatccctgctaccattttgttcgactctggagcttcccactcgtttatatctgtgccattcgtggggagaaatcagttgggggtagaaaggcttagaaaccctctgctcatcaccacccctggaggggttatgacagcaaagtattatagtcctgccgtccctatagaaattcaggggattccttttccctcggacctgattctgctagacaccaagaacttggatgtgatccttggaatgaattggttggctcaatttcaaggagtagtggattgcgcgagacgcactgttactctgtaccgaggaccggaacaaccggttgttttctttgcacccccaacctctgtcagtagttcagaacttcatcagataggactgtcagaaatccccatcgtcagagagttcggagatgtgtttccggaagaactacccggtatgccgcccaagcgagagattgagttccggatagatcttgctccaggaaccactcctctgtacaagcgaccctaccgtatggcagcaaatgaactggccgaagttaagaaacagttggaagagttgaaagagaaggggtatatacgtccgagtacttccccctggggcgctcctgtgatttttgtggagaagaaggacaagacgaagaggaggtgcgtcgactacagagccctcaatgaagtcaccatcaaaaacaagtaccctcttccccggatcgatgacctgttcgatcagcttaaaggtgccacggtattctccaagattgatcttcgttccggatatcaccagttgcgcatccgcgaagaagatattccgaagaccgcattcaccacgcgatacggactgtatgaattcacggtgatgtcgttcggtttaaccaatgcacctgccttcttcatgaacttaatgaacaaagtgttcatggaatacttggataagtttgttgtggttttcattgacgacattctgatatactcacaatcag

SEQ ID NO: 14132 - DNA, 1840 bp, Oryza sativa
  Clone ID: TFbOSC17346j.C1.o1.gm
agtcgttttgggacgcgacaaagcacaaggaactggagtcgcacaagcgccgcttggcgaatttccgcaatcaacagggtgctaaccaaagggtccgctacaccaacccctatccagggggatcctcctcgcaacagcaacaacagcagcagcaacctcgctccgcgccgcgacctcaattcgtggtgcgcgtcccacagccgcagcagcagcagaatcagcaagggactcgtgcgccccgtcctcctacgccaaccgtgcagtctggtcaaggccgcagggacgctcaaggtcagcagcgtctgtgcttcaactgcttcgagcccgggcactttgcggataaatgcccgaagccaaggcgtcagcaaggccaagcgcctccccactccaacaacggtgggaaggatgtcattcggggtcgtgtgaatcacgtgacggccgaggacgtgctgacaactccagacgtcatcgttggtacgttcctcgttcattccatccctgctaccattttgttcgactctggagcttcccactggtttatatctgtgccattcgtggggagaaatcagttgggggtagaaaggcttaggaaccctctgctcatcaccacccctggaggggttatgacagcaaagtattatagccctgccgtccctatagaaattcaggggattccttttccctcggatctgattctgctagacaccaagaacttggatgtgatccttgggatgaattggttggctcaattccaaggagtagtggattgcgcgaggcgcactgtcactctgtaccgagggccggaacaaccggttgttttctttgcacccccaacctctgtcagtagttcagaactgcatcagataggactgtcagaaatccccatcgtcagggagttcggagatgtgtttccggaagaactacccggtatgccgcccaagcgagagattgagttccggatagatcttgctccaggaaccactcctctgcacaagcgaccctaccgtatggcagcaaatgaactggccgaagtaaagaaacagttggaagagttgaaagaaaaggggtatatacgtccgagtacttccccctggggtgctcctgtgatttttgtggagaagaaagacaagactaagaggatgtgcgttgactacagagctctcaatgaagtcaccatcaaaaacaagtaccctcttccccggatcgatgatctgttcgatcagcttaaaggtgccactgtattctccaagattgatcttcgttccggatatcaccaattacgtattcgtgaagaagatattccgaagaccgcattcaccacgcgatacgggctgtatgaattcacggtgatgtcattcggcctaaccaatgcacctgccttcttcatgaacttaatgaacaaagtgttcatggaatacttggataagtttgttgtggttttcattgatgacattctggtatactcacaatcagaggaagaccatcagcaccatctccgtctggtgttgggaaagctgcgggaacatcaattgtatgccaaacttagcaagtgtgagttctggctgtccgaagtcaaattcttaggacacgtgatatctgctaaaggagtttctgtggaccccgaaacagtgaccaccgtcaccgattggaagcaacccaagacagttactcaagtccgcagtttcttaggtttggcaggatactaccggagattcatcgagaacttctccaaaatcgctcgacccatgacacagttgttgaagaaagaagagaaatttgtgtggagcccgcaatgcgagaaggcgttccaaactctcaagaaaagctggtttcctcgccg

SEQ ID NO: 14133 - DNA, 5205 bp, Oryza sativa
  Clone ID: TFbOSC17984j.C1.o1.fg
atggccggcagcgtcacccgtcgtggtttggacatgactggtttcgtcttggagctgcggggcatgtgcgttgtcctggggtatccacatggagtggactaccagggcaggccgcttccggagcaggagggtgacgatgcagagccccacgctgcttgggaggtcactgcagtaatcctcgctggctctcccgagcggacttcgctgacagtcaccgcgggtggagattctttccccgccgcttgccagagcgccgctctcctcgccatcggcactcttcaccagcgctacccggacgagttgcagcactcgccctaccgctaccaccctcgccgcggaggagcccgcgactacgccaccttccgggatgctagctcggaggatgacgctaccatcatgcacctggcgcgcatggtggaggcgtacgacgcggctcgtatcgacttccatcagatggtgcgccgtgggatggtcgagaacaacatgaagatcctggagctgcgtcaagagaacctgcagctcaagaaggacctagacgcggtggaggcgcagctgcatcagctcaagatcgcccagggagaggtctgccgccccaagcgtcgccgtgtctgccgcagccagaagatcaccgcccgcaagagcacctccaggcccgagcttgttcgtcagtccctggcgtggacttgcttcgtcgagacccctcgtgccgagcccgcgcccgtggttccccaggagggagaagcctccggcgttggtagcacagaggatgcgctgttgctcaccttccgtcctggcccgtcgcagcggagaagtgctgccaccggtgatagcaaccaacctgaaggcagcaaccaccaccaccagggcagcccacctccacctcctcctccgcctccaccaccgccagataccaacgccattctcacccaaatcctagcccagcaggccgacatgatggctgctttcctccaccacatccaaaatccgccacaacataatgctccaccaccaccttcccaacactctaaactcgccgagttcctccgcatccgcccacttaccttctctagctccaacaaccccgtggatgcgttggattggctgcatgccgtggggaaaaagctagacactgtgcagtgcagcgatgaggagaaagtcatcttcgccgcccaccagctgcaggggcccgcatctctatggtgggaccatttccaggctacgcagccagaggggcaacctattacttgggcccgtttcaccgccgctttccggagaacccatgtgcccgccggagtcgtggcccttaagaaaagagaattccgagagttgaagcaaggcaaccgctccgtgacggagtatttgcatgagttcaacaacctggcccgttacgccccggaggatgtgcgggaagatgaggagaagcaagagaagttcttggcaggaatggaccctgagctgtccgtccgtctagtctccgggaactatccggatttccaacgtctggtggacaagagcatccgcttggaagccaagcacaaggaactggagtcgcacaagcgccgcttggcgaatttccgcaatcaacagggtgctaaccaaagggtccgctacaccaatccctatccagggggatcctcctcgcagcagcaacaacagcagcagcaacctcgctccgcgcctcgacctcaattcgtggtgcgcgtcccacagccgcagcagcagcagaatcaacaagggactcgtgcgccccgtcctcctacgccaactgtgcagcctggtcaaggccgcagggacgctcaaggtccgcagcgtctgtgcttcaactgcttcgagcccgggcactttgcggataaatgcccaaagccgaggcgtcagcaaggccaagcgcctccccgctccaacaacggtgggaaggatgtcattcggggtcgggtgaaccacgtgacggccgaggacgtgctaacaactccagacgtcatcgttggtacgttcctcattcattccatccctgctactattctgttcgactctggagcttcccactcgtttatatctgtgccattcgtggggagaaatcagttgggggtagaaaggcttaggaaccctctgctcatcaccacccctggaggggttatgacagcaaagtattatagccctgccgtccccatagaaattcaggggattccttttccctcggatctgattctgctagacaccaagaacatggatgtgatccttgggatgaattgtagttccgaacttcatcagataggactatcagaaatccccatcgtcagagagttcggagacgtgtttccggacgaactacccggtatgccgcccaagcgagagattgagttccggatagatcttgctccaggaaccactcctctgtacaagcgaccctatcgtatggcagcaaatgaactggccgaagttaagaaacagttggaagagttgaaagaaaaggggtatatacgtccgagtacttccccctggggtgctcctgtgatttttgtggagaagaaagacaagacgaagaggatgtgcgttgactacagagctctcaatgaagtcaccatcaaaaacaagtaccctcttccccggatcgatgatctgttcgatcagcttaaaggtgccactgtattctccaagatcgatcttcgttccggatatcaccaattacgtattcgtgatgaagatattccgaagaccgcattcaccacgcgatatggactgtatgaattcacggtgatgtcgttcggtttaaccaatgcacctgcctttttcatgaacttaatgaacaaagtgttcatggaatacttggataagtttgttgtggttttcattgatgacattctggtatactcacaatcagaggaagaccatcagcaccatctctgtctggtgttgggaaagttgcgggaacatcaattgtatgccaaacttagcaagtgtgagttctggttgtccgaagtcaaattcttagggcacgtgatatctgctaaaggagttgctgtggaccccgaaacagtgaccgccgtcactgattggaagcaacccaagacagtcactcaagtccgcagtttcttaggtttggcaggatactaccggaggttcatcgagaacttctccaaaatcgctcaacccatgacacagttgttgaagaaagaagagaaatttgtgtggagcccgcaatgcgagaaggcgttcaaaactctcaaagaaaagctggttgcctcgccagtgttaatcttgccggatactcgcaaggatttcatggtgtattgtgacgcttcgcgccaaggattggggtgcgtgctcatgcaggatggtcatgtggtggcctatgcctcacgccagctacggcctcatgaaggcaactaccctacccatgatttggagttagctgcggtggttcatgctctaaaaatctggcggcactatctcattgggaatcgctgtgaaatatatactgatcataagagtttgaaatacatcttcactcagtcggacctgaatcttcggcaaaggagatggttagaactcatcaaggattatgatgtgggaattcactatcatcctggtaaggccaacgtggtcgccgacgccctaagtcgaaaaagccattgcaacacccttaacgtccgtggcattccacccaaacttagtcaacagatggaagccctgaacctaagcatagttggtcgcggattcttggctgcgttggaagccaagcctaccttgctcgatcaaatccgcgaggctcagaagaacgatccggacatgcatggactcctcaagaatatgaaacagggtaaagccgctggtttcacagaggatgaacacggaaccctatggaacggaaatcgagtatgcgttccagataacagagaacttaaacagctgatacttcaggaagcccacgaaagtccttattccatccaccctggcagtacaaagatgtacttagacttgaaggagaaatactggtgggttagtatgaagcgggaaattgcagagttcgtggccctttgtgatgtgtgccagcgtgtcaaggcagagcaccaacgaccggccggacttctccaacctctccaagtacctgaatggaaatgggatgaaattgggatggatttcatcaccggacttccaaagacccaaggtggatatgattctatatgggtagtggtggatcgattaaccaaggtagctcgattcattcctgtgaagaccacctatggagggaacaaactagccgagctctacttcgctaggatcgtgagtctccatggcgttcccaagaaaatcgtatctgataggggaagccaattcacctctcacttttggaagaagctccaagaagagctgggtacccgattaaacttcagcaccgcataccacccgcagacagatgggcagaccgagcgtctaaatcagatcctagaagatatgcttcgcgcatgtgtcctggatttcgggaagacctgggataagagtctcccctatgccgagttctcctacaataacagctatcaagccagcatacaaatggcaccttatgaagcgttgtatgggcgcaaatgccggacaccgctcctgtgggatcaagttggggaaagccaagtgttcgggactgatatcctgagagaagctgaagctaaagtcagaaccattcgggataatctaaaggtggcacagtcccggcagaaaagttatgcagataaccgtcgccgtaacctagaattcgcagtggacgattttgtgtatcttcgggtcacgccattgcggggtgtacacaggtttcagacaaaagggaagcttgcacctcggtatgtgggtcctttccgtatcgttgcccgacacggagaagtcgcttaccaattggagctgcccgcctccttgggcaacgtgcatgatgtgttccatgtgtcgcaactcaagaaatgccttcgagtgccatccgagcaggccgactcagagcaaattgaagttcgcgaagacttgacctacgtggagaggccagtgaaaatcctggacaccatggagcgcaggaccaggaaccgggtaatccgtttttgcaaggtccagtggagcaaccacgccgaagaagaagctacctgggagcatgaagacgagctgaaggcagcccatcctgatctcttcgccagttcttccgaatctcggggtcgagattccgtttaa

SEQ ID NO: 14134 - DNA, 1371 bp, Oryza sativa
  Clone ID: TFbOSC17991j.C1.o1.fg
atggcaatcaacctgaaggcagcaaccacaaccaccagggcaacccacctccaccttcttcttccgcctccgccaccaccaccagacaccaacgccattctcacccaaatcctcgcccagcaagccaacatgatgactactttcctccaccacctccaaaatccgccacaacagaatgctccaccaccacctccccaacactctaaactcgccgagttcctccgcatccgcccacctaccttctctagctccaacaaccccgtggatgcgttggattggttgcatgccgtggggaaaaagctggacactgtgcagtgcagtgatgaagagaaagtcatcttcgccgcccaccagctgcagggacccgcatctctatggtgggaccacttccaagctacgcagccagagggacagcctattacatgggctcgcttcaccgccgctttccggagaacccatgtgctcgccggagtcgtggccctcaagaaaagggaattccgagagttgaagcaaggcaaccgctccgtgatggagtatttgcatgagttcaacaacctggcccgttacgccccggaggatgtgcgggaagatgaggagaagcaagagaagttcctggcaggaatggaccccgagctgtccgtccgtctagtctctggggactatccggatttccaacgtctggtggacaagagcatccgcttggaagccaagcacaaggagctggagtcgcacaagcgccgcttggcgaatttccgcaatcaacagggtgctaaccaaagggtccgctacaccaatccctatccagggggatcctcctcgcagcagcaacaacagcagcagcaacctcgctccgcgcctcgacctcaattcgtggtgcgcgtcccacagccgcagcagcagcagaatcaacaagggactcgtgcgccccgtcctcctacgccagccgtgcagcctggtcaaggccacagggacgctcaaggtcagcagcgtctgtgcttcaactgctttgagcccgggcactttgcggataaatgcccgaagccaaggcgtcagcaaggccaagcgcctccccgctccaacaacggtggcaaggacgtcattcggggtcgtgtgaatcacgtgacggccgaggacgtgctgacaactccagacgtcatcgttgagaagaaagacaagacgaagaggatgtgcgtcgactacagagctctcaatgaagtcaccatcaaaaacaacgtgtcaaggcagagcaccaacgaccggccggactcctccaaccactccaagtacccgaatggaaatgggatgaaattgggatggatttcatcaccggacttccaaagacccaaggtggatatgattctatatgggtag

SEQ ID NO: 14135 - DNA, 4536 bp, Oryza sativa
  Clone ID: TFbOSC18069j.C1.o1.fg
atggtggaggcgtacgatgcggcccgtatcgacttccatcatatggtgcgccgtgggatggtcgtgaacaacatgaagatcctggagctgcgtcaggagaatctgcagctgaagaaggacctagacgcgctggaggcgcagctatgtcagctcaagatggtgacaaccaggagaactgctgctatcggtgatggcaaccaacccgaaggtagcaaccccaacatccaaggcggcccacctccacctcctcccccgccaccaccaccaccaccagacaccaaccccatcctcactcaaatcctcgcccagcaggccaacatgatggctgctttcctccaccacatccaaaatccaccacagcataatgctccacctccaccaccacccccgcagcattctaagctcgccgagttccttcgcatccgcccgcctaccttctccagctccaataaccccgtggatgccttggattggttgcatgccgtggggaagaagttagacaccgtgcagtgcaacgatgaggaggaagtcatctttgccacccaccagctgcaggggcccgcatctctatggtgggaccacttccaggctacgcagcccgaggggcagcctattacctgggcccgcttcaccgccgctttccggaggacccatgtgcctgccggagtcatggcccttaagaaaagggaattccgggagttgaagcaaggcaaccgctctgtgatggagtatttgcatgagtttaacaacctggcccggtacgccccggaggatgttcgggaagatgaggaaaagcaggagaagttcttggcaggaatggaccctgagctatctgtgcgtctggtctccggggattatccggattttcagcgtctggtggacaagagcatccgcttggaagccaagcacaaggaactggagtcgcacaagcgtcgcttggcgaattttcgcaatcaacagggggctaaccaaagggtccgctacaccaatccctatctagggggatcctcctcgcagcagcagcagcagcaacctcgctccgcgccccgaccccaattcgtggtgcgcgtcccacagccgcagcaacagcagggccgcagagacgctcaaggacagcagcgtctgtgcttcaactgcttcgagcccgggcactttgcggacaaatgcccgaagccgcggcgccagcaaggccaagcgcctccccgccccaacaacggtggtaaggacgtcgctcagggtcgtgtgaaccacgtgactgtcgaggatgtgctgacgactccggacgtcatcgttggtacgttcctcatacattccattcctgctaccattttgttcgactctggagcttcccactcgtttatatctgtgcctttcgtgggaagaaatcaactgggggtagaacggcttaggaaccctctgctcatcaccacccctggaggggatatgacagcaaagtattacagcccggccgttcctatagaaatccagggaatcccttttccctcggatttgattcttctggacaccaagaacttggatgtgatccttgggatgaattggttggctcaattccaaggtgtagtggattgcgtaaggcgcacggtcactctgtaccgagggccggaacaaccagttgtgttctttgcacccccaacctctgttggcagttcagaacttcatcagataggactgtcagaaatccctatcgccagtgaattcggtgacgtgtttccggaagaactacccggtatgccgcccaagcgggagatcgagttccggatagatcttgctccaggaacaactcctctgtacaagcggccctaccgtatggcagcgaatgaacttgccgaagtcaagaagcaattggaagagctgaaggaaaaggggtatattcggccgagcacttccccctggggtgctcccgtgatttttgtggaaaagaaggacaagacaaagaggatgtgtgttgactacagagctctcaatgaagtcactatcaaaaacaagtaccctcttcctcggatcgatgatctgttcgaccagctcaagggtgccaccgtcttttctaaaatcgatcttcgctccggatatcatcaattgcgtattcgtgaagaagatatcccgaagaccgcattcaccacgcgatatgggctgtatgaattcacggtgatgtcgttcggtctgactaatgctcctgccttcttcatgaacttaatgaacaaagtgttcatggaatacttggataagtttgttgtggtcttcatcgacgacatcttggtgtactcgcaatcagaggaagaccatcagcagcatctccgtttggtgttgggaaagttacgggaacatcaactgtatgccaagcttagcaagtgtgagttctggttgtccgaagtcaagttcttagggcacgtgagatctgctaaaggagttgctgtggaccccgaaacggtgaccgccgtcaccgattggaagcaacccaagacggtcactcaagtccgcagctttttgggtttggccgggtactatcggagtgtgagaaagcattccaaactcaaagaaaagctggtttcctcgccagtgttaatcttaccggatactcgcaaggacttcctggtgtactatgacgcttcgcgccaaggattggggtgcgtattaatgcaggaaggtcatgtggtagcctatgcctcacgccagctacggcctcatgaaggcaactaccctacccatgatttggaattggccgctgtggttcatgctctaaagatctggcggcactatctcattgggaatcgttgtgaaatatatactgatcataagagtttgaaatacatcttcactcagtcagatctgaatcttcggcaaaggagatggttagaactcatcaaggattatgatgtgggaattcactatcaccctggcaaggccaacgtagtcgccgacgctctaagtcgaaaaagccattgcaacactcttggcgtccgtggcattccaccggaacttaatcaacagttggaagccctgaacctaagcatagttggtcgtggattcttggctatgctggaagccaagcctaccttgctcgatcaaatccgcgaggctcagaagaatgatccggatatgcatgggctcctcaagaatatgaaacaaggtaaagccgctggtttcacagaggatgaacacggaaccctatggaatggaaatcgggtatgcgttccagacgtcagggaacttaaacagttgatacttcaggaagctcacgaaagtccctattccatccatcctggcagcacgaagatgtacttggacttgaaagagaagtattggtgggttagtatgaaacgggaaattgcagagttcgtggccctttgtgatgtgtgccagcgtgtcaaagccgagcaccaacgaccggccggactcctccaacctctacaagtgctagaatggaaatgggatgaaattgggatggattttatcaccggacttccaaaaacccaaggcggatatgattctatatgggtagtcgtggatcgactaaccaaggtagcacgattcattcccgtaaagaccacctatggagggaacaaactagctgaactctacttcgctaggatcgtaagtctccatggcgttcctaagaaaattgtatctgatcggggaagccagttcacctctcatttttggaagaaactccaagaagagttgggaacccgattaaatttcagcaccgcgtaccacccgcagacagatgggcagaccgagcgtctgaaccagatcctcgaagatatgcttcgcgcatgtgtcctagattttgggaagacatgggataagagtctcccttatgccgagttctcctacaataacagctaccaagccagcatacagatggcaccgtacgaagcgttgtatggccgcaaatgccggacaccactattgtgggaccaagttggggaaagccaagtgttcgggaccgatatcttgagagaagctgaagcgaaggtcaggaccattcgggaaaacctaaaggtggcacagtctcggcagaagagttatgcagacaaccgacgccgtgacctggaattcgcagtggatgactttgtgtatctccgggtaacgccgttgcggggtgtacacaggtttcaagcgaaagggaagctcgcccctcggttcgtgggtcctttccgcatcattgctcgacgcggagaagttgcttaccagttggagctgcccgcttccttgggcaacgtgcatgatgtgttccatgtgtcgcaactcaagaaatgtcttcgagtgccgtccgagcaggccgactcagagcagattgaagttcgcgaagacttgacctacgtggagagaccagtgaaaatcctggacaccatggagcgcaggaccaggaatcgggtaatccgtttttgcaaggtccaatggagcaaccatgccgaggaagaagctacttgggagcgtgaagacgagctgaaggcagcccatccagatctcttcgccagttcttccgaatctcggggtcgagattccgtttaa

SEQ ID NO: 14136 - DNA, 1971 bp, Oryza sativa
  Clone ID: TFbOSC18168j.C1.o1.fg
atgactggcttcgtcttggagctgcggggcatgtgcgtggtcttggggtatccacatggagtggattaccaggccaggccgctcccggagcaagagggtgaggatgcagagcctcacgctggttgggaggtcactgcagtgattctctccggctctcccgagcggacttcgctggcagtcaccgcgggtggggattccttccccgccgcttgccagaacgccgctctcctcgccatcggcacccttcaccagcgctacccggacgagttgcagcactcgccctaccgctaccaccctcgtcgcggaggagcccgcgactacgccaccttccgagacgccagctcggaggatgacgccaccgtcgtgcacctggcacgcatggtggaggcgtacgacgcggctcgtatcgacttccaccagatggtgagccgtggcatggtggagaacaacttgaagatcctggagctgcgtcaggagaatctgcagctcaagaaggacctcgacgcgttggaggcgcagctgcaccagctcaagatcgcccagggagagatctgccgccccaagcgtcgccgcgtctgccgcagccagaagatcaccgcccgcaagagcacctccaggcctgagcttgtccgtcagtccctggcgtggacctgcttcgtcgagacccctcgtgccgagcctgcgcccgtggttccccaggagggggaagcctccggcgttggtagctcggaggctccttctctgtttgctggttctgggtggggttttcagatggtgacgaccaggagaaatgttaacaccggtgaaggcaaccaacccgaaggcagcaaccccaaccaccaaggcaatccacctccgccaccaccaccagacaccaacgccattctcacccagatcctcgcccagcaagccaacatgatgaatgctttcctccaccaccttcaaaacccgccacaacagaatgctcccccaccacctccccaacactctaaactcgccgagttcctccgcatccgcccacctaccttctctagctccaacaaccccgtggatgcgttggattggttgcatgccgtggggaagaagttagacactgtgcagtgcagtgacgaagagaaagtcatcttcgccgcccatcagctgcagggacccgcatctctctggtgggaccacttccaggctacgcagccagagggacagccgatcacttgggcccgcttcaccgccgctttccggaaaacccatgtgcccgccggagtcgtggctcttaagaaaagggaattccgagagttgaagcaaggcaaccgctccgtgatggagtatttgcatgagttcaacaatctggcccggtacgctccggaggatgtgcgggaagatgaggagaagcaggagaagttcttggcgggaatggaccctgagctgtccgtccgtctagtctctggggactatcctgattttcaacgactggtggacaagagcatccgcttggaagccaagcacaaggagctggaatcgcacaagcgtcgcttggcgaatttccgcaatcaacagggtgctaaccagagggtccgctacaccaatccctacccagggggatcctcctcgcagcagcagcagcagcagcagcaacctcgcccagcgccccgacctcaattcgtggtgcgcgtcccacagcagcaacagcagcagaatcagcaagggactcgtgcgccccgtcctcctacgccagctgggcagcccgttcaaggccgcagggacgcttcaggtccgcagcgtctgtgcttcaactgcttcgagcccggacactttgcggataaatgcccaaagccaaggcgtcagcaaggccaagcgcctccccgccccaacaacggtggccaggacgtcatccgtggtcgtgtgaatcacgtgacggccgaggacgtgctgacaactccagacgtcatcgttgaagttcagaactgcagcagatag

SEQ ID NO: 14137 - DNA, 1947 bp, Oryza sativa
  Clone ID: TFbOSC1822j.C1.o3.fg
atgactggcttcgtcttggagctgcgaggcatgtgcgtggtcttggggtatccacacggagtggattaccaggccaggccgctcccggagcaggagggtgaggatgcagagcctcacgctggttgggaggtcactgcagtgatcctctccggctctcccgagcggacttcgctggcagtcaccgcgggtggggattccttccccgccgcttgccagaacgccgctctcctcgccatcggcacccttcaccagcgctacccggacgagttgcagcactcgccctaccgctaccaccctcgtcgcggaggagcccgcgactacgccaccttccgagacgccagctcggaggatgacgctaccgtcgtgcatctggcacgcatggtggaggcgtacgacgcggctcgtatcgacttccatcagatggtgcgccgtggcatggtggagaacaacatgaagatcctggagctgcgccaagagaatctgcagctcaagaaggacctcgacgcgttggaggcgcagctgcatcagctcaagatcgcccagggagaggacagccgtcccaagcgtcgccgcgtctgccgcagccagaagatcaccgcccgcaagagcacctccaggcccgagcttgttcgtcagtccctggcgtggacctgcttcgtcgagacccctcgtgccgagcctgcgcccgtggttccccaggagggggaagcctccggcgttggtagctcggaggttgtgtggggcatggttatgccgatggtgacgaccaggagaaatgttaacaccggtgaaggcaaccaacccgagggcagcaaccccaaccaccaaggcaatccacctccaccaccaccaccagacaccaacgccattctcacccaaatcctcgcccagcaagccaacatgatgaatgctttcctccaccacctccaaaatccgccacaacagaatgctccaccaccacccccacaacactctaaactcgccgagttcctccgcatccgcccacctaccttctccagctccaacaaccccgtggatgctttggattggttgcatgccgtggggaagaagctagacacggtgcagtgcagtgatgaggagaaagtcaccttcgccgcccatcagctgcaggggcccgcatctctatggtgggaccatttccaggccacgcagccagaagggcaacctattacttggactcgcttcaccgccgctttccggagaacccatgtgcccgctggagtcgtggctcttaagaaaagggaatttcgggagttgaagcaaggcaaccgctccgtgatggagtatttgcatgagttcaacaatctagcccgttatgccccggaggatgtgcgggaagatgaggagaagcaagagaagttcttggcaggaatggaccctgagctgtccgttcgtctagtctctggggactatcctgattttcaacgactggtggacaagagcatccgcttggaagccaagcacaaggagctggaatcgcacaagcgccgcttggcgaatttccgcaatcagcagggtgctaaccagagggtccgctacaccaatccctacccagggggatcctcctcgcagcagcagcagcagcagcagcaacctcgctccgcgcctcgacctcaattcgtggtgcgcgtcccacagcagcaacagcagcagaatcagcaagggactcgtgcgccacgtcctcctacgccaactgtgcagcctgttcaaggtcgcagggacgcttcaggtccgcagcgtctgtgcttcaactgcttcgagcccgggcactttgcggataaatgcccaaagccaaggcgtcagcaaggccaagcgcctccccgctccaacaacggtggcaaggatgtcattcggggtcgtgtgaatcacgtgacggccgaggacgtgctgacaactccagacgtcatcgttgagaatgatttttaa

SEQ ID NO: 14138 - DNA, 785 bp, Oryza sativa
  Clone ID: TFbOSC20764j.C1.o3.np
cacgccggcgcagcggcgggaggcggcacgcccgcgcccctatggtcgccggcggcggccataggcacggcggagcggcggccgagagaggggaagggaagggggaaaagaagcggcggtccacgactcaccccgggtcgacggcaacgacggaaacggcgaccggtgcggaggaaggcggtggcgcggctcgggtggatggggtcgacggtgctccggcggtcggcgagcgaaacggaggggtggacaaggtcgccggggatgcggcgaagccgaaggaggcggcgccgaggggagaggtggtccggggcgacaacggcggcggaccggagctcggcggcgacgacggagagagagggcgacggcgcgagctcgattccggcggggagagagagcggcgagtggcgaaaacggtggagggaggcacggggagggtttatatagggtcgggagggggacagagcggccggacgagggggaaacggcgcggaagatccggccgccattgatggcgccggcgaggttaggggagaggtttccaaacgaatccgagggagagagggagggaaaaatggggggaaagagagagggaatcacggggaataattcccccctattgattgcacgcggggacgacgggatgcggcggattcggcgacggcggcggcgctagggcgcgggcgaggcggcgggagcggcgggaggacagggatgacaggtgggccccacccgtcagcgagggtggcgggcgggcccgcccgtcagcggcgcgcgcgcggagagag

SEQ ID NO: 14139 - DNA, 547 bp, Oryza sativa
  Clone ID: TFbOSC2192j.C1.o1.fg
atggcccttaagaaaagggaattccgagagttgaagcaaggcaaccgctctgtgatggagtatttgcatgggtttaacaacctggcccggtacgccccggaggatgttcgtgaagatgaggagaagcaagagaagttcttggcaagaatggaccctgagctgtccgtgcgtctggtctccggggactatccggatttccaacgtctggtggacaagagcatccgcttggaagccaagcacaaggaactggagtcgcagaagcgtcgcttggcgaatctccgcaatcaacagggggctaaccaaagggtccgctacaccaatccatatccagggggatcctcctcacagccgcagcaacagcagagtcagcaagggacccgtgtgccccgtcctcctgcgcccgttgtgcagcctggtcaaggccgcagagaagttcaaggtcagcagcgtctgtgcttcaactgcttcgagcccgggcactttgcggataaatgcccaaagccgaggcgccagcaaggccaagcgcctccccgccccaacaatggtg

SEQ ID NO: 14140 - DNA, 5926 bp, Oryza sativa
  unsure (1)..(5926): unsure at all n locations
  Clone ID: TFbOSC22607j.C1.o1.np
tatataaaccatccccgtgcctccttcttcggtttccgccgctcgccgctctctctcccggtcggaatagagcttgcgcngtcgccctctctttccgccgccgccgccgagatccggtctgccgccgtcgtcgccccggaccttctcccgtttcggcgtcgcctcttcgggttcgccgcaacatcgccgacctcgtccacccctccgtttcgcccgccgaccgccggaacgccgccgtcctcgtcgacccgagccgcgccgccgcctttttccgctccggtcgccgttcccgtcgtcgccgtcgacccggggtgagccgtggaccgcccatttcgtttcccccttccctcccctctctcggccgccgctccgccgtgcctatggccgccgccggcgaccaaaggggcgcgggcgcgccgcctcccgtcggctgtgccggcgaggccgccttcgggcgcgccccgcggctgccatgtggggcccggccgtcagccgcccgcgcctcgggtacggctgacgcgtgggacccacggcgccggccggcgtaagccgcgtgcacccgttccaccgtggacccacctcggccatataaggaccggtcttcgggcctctgttgcaaagcactaccgtacttccacatgtctagtggggcaaatgaaggctacacgagctgcggcccggtagtcgagatgtcatggcacagggccggtgtcctgctgctaggggctcagtcctgcctacctgtcccgggggttccggccgtaggagggattgggtcgttgtacacctctgatcagagtataatctattcgaatagccgcgccctcggttatgggcgagccgagcaatgtacccaaatggccggcagcgtcacccgtcgtggtttggacatgactggcttcgtcttggagctgcggggcatgtgcgtggtcctggggtatccgcatggagtggactaccaggccaggccgcttccgaagcaggagggtgacgatgcagagccccacgctgcttgggaggtcactgcagtgatcctcgctggctctcccgagcggacttcgctggcagtcaccgcgggtggagattctttccccgccgcttgccagaacgccgctctcctcgccatcggcactcttcaccagcgctacccggacgagttgcagcactcgccctaccgctaccaccctcaccgcggaggagcccgcgactacgccaccttccgggatgctagctcggaggacgacgctaccatcgtgcacctggcgcgcatggtggaggcgtacgacgcggctcgtatcgacttccatcagatggtgcgccgtgggatggtcgagaacaacctgaagatcctggagctgcgtcaggagaacctgcagctcaagaaggacctagacgcggtggaggcgcagctgcatcagctcaagatcgcccagggagaggtctgccgccccaagcgtcgccgtgtctgccgcagccagaagatcaccgcccgcaagagcacctccaggcccgagcttgttcgtcagtccctggcgtggacctgcttcgtggagacccctcgtgccgagcccgcgcctgtggttccccaggagggggaagcctccggcgttggtagcacggaggatgcgctgttgctcaccttccatggtgacgaccaggagaagtgctaatgccggtgatggcaaccaacctgaaggcagcaaccgcaaccaccatggcagcccacctccacctcctcctccgcctccaccaccaccaccagataccaacgccattctcacccaaatcctcgcccagcaggccaacatgatgactgctttcctccaccacctccaaaatccgccacaacagaatgctccaccaccacccccgcaacactctaaactcgccgagttcctccgcatccgcccacccaccttctctagctccaacaaccccgtggatgcgttggattggttgcatgccgtggggaaaaagctagacactgtgcagtgcagcgatgaggagaaagtcatcttcgccgcccaccaactgcaggggcccgcatctctatggtgggaccatttccaggctacgcagccagaggggcagcctattacttgggcccgtttcaccgccgctttccggagaacccatgtgcccgccggagtcgtggctcttaaaaaaagggaattctgagagttgaagcaaggcaaccgctccgtgatggagtatttgcatgagttcaacaacctggcccgttacgccccggaggatgtgcgggaagatgaggagaagcaagagaagttcttggcaggaatggaccctgagctgtccgtccgtctagtctccggggactatccggatttccaacgtctggtggacaagagcatccgcttggaagccaagcacaaggaactggagtcgcacaagcgccgcttggcgaatttccgcaatcaacagggtgctaaccaaagggtccgctacaccaatccctatccagggggatcctcctcgcagcagcaacaacagcagcagcaacctcgctccgtgcctcgacctcaatacgtggtgcgcgtcccacagccgcagcagcagcagagtcagcaagggactcgtgcgccccgtcctcctacgccagccgtgcagtctggtcaaggctgcagggacgctcaaggtcagcagcgtctgtgcttcaactgcttcgagcccgggcactttgcggataaatgcccgaaaccgaggcgccagcaaggccaagcgcctccccgctccaacaacggtgggaaggatgtcattcagggtcgtgtgaaccacgtgacggccgaggacgtgctgacaactccagacgtcatcgttggtacgttcctcattcattccatccctgctaccattttgttcgactctggagcttcccactcgtttatatctgtgccattcgtggggagaaatcagttgggggtagaaaggcttagaaaccctctgctcatcaccacccctggaggggttatgacagcaaagtattatagtcctgccgtccctatagaaattcaggggattccttttccctcggacctgattctgctagacaccaagaacttggatgtgatccttggaatgaattggttggctcaatttcaaggagtagtggattgcgcgagacgcactgttactctgtaccgaggaccggaacaaccggttgttttctttgcacccccaacctctgtcagtagttcagaacttcatcagataggactgtcagaaatccccatcgtcagagagttcggagatgtgtttccggaagaactacccggtatgccgcccaagcgagagattgagttccggatagatcttgctccaggaaccactcctctgtacaagcgaccctaccgtatggcagcaaatgaactggccgaagttaagaaacagttggaagagttgaaagagaaggggtatatacgtccgagtacttccccctggggcgctcctgtgatttttgtggagaagaaggacaagacgaagaggaggtgcgtcgactacagagccctcaatgaagtcaccatcaaaaacaagtaccctcttccccggatcgatgacctgttcgatcagcttaaaggtgccacggtattctccaagattgatcttcgttccggatatcaccagttgcgcatccgcgaagaagatattccgaagaccgcattcaccacgcgatacggactgtatgaattcacggtgatgtcgttcggtttaaccaatgcacctgccttcttcatgaacttaatgaacaaagtgttcatggaatacttggataagtttgttgtggttttcattgacgacattctgatatactcacaatcagaggaagaccatcagcaccatctccgtctggtgttgggaaagttgcgggaacatcaattgtatgccaaacttagcaagtgtgagttctggttgtccgaagtcaaattcttagggcacgtgatatctgctaaaggagttgctgtggaccccgaaacagtgaccgccgtcactgattggaagcaacccaagaccgtcactcaagtccgcagtttcttaggtttggcaggatactaccggaggttcatcgagaacttctccaaaatcgctcgacccatgacacagttgttgaagaaagaagagaaatttgtgtggagcccgcaatgcgagaaggcgtttcaaactctcaaagaaaagctggtttcctcgccagtgttagtcttgccagatactcgcaaggatttcatggtgtattgtgacgcttcgcgccaaggattggggtgcgtgctcatgcaggacggtcatgtggtggcctatgcctcacgccagctacgacctcatgaaggcaactaccctacccatgatttggagttagccgcggtggttcatgctctaaaaatctggcggcactatcttattgggaatcgctgtgaaatatataccgatcataagagtttgaaatacatcttcacccagtcggatctgaatcttcggcagaggagatggttagaactcatcaaggattatgatgtgggaattcactatcatcctggtaaggccaacgtggtcgccgacgctctgagtcgaaaaagccattgcaacactcttaacgtccgtggcattccacccgaacttaatcaacagatggaagccctgaaccttggcatagttagtcgtggattcttggctgcgttggaagccaaacctaccttgctcgatcaaatccgcgaggctcagaagaacgacccggacatgcatggactcctcaagaatatgaaacagggtaaagccgctggtttcacagaggatgaacacgggaccctatggaatggaaatcggcgtgtcaaggcagagcaccagcgaccggccggacttctccaacctctccaagtaccagaatggaaatgggatgaaattgggatggatttcatcaccggacttccaaaaacccaaggtggatatgattctatatgggtagttgtggatcgattaaccaaggtagctcgatttattcctgtgaagaccacctatggagggaacaaactagccgaactctacttcgctaggatcgtgagtcttcatggcgttcccaagaaaatcgtatctgataggggaagccaattcacctctcacttttggaagaagctccaagaagagctgggtaaatcagatcctagaagatatgcttcgcgcatgtgtcctagattttgggaagacctgggataagagtctcccctatgccgagttctcctacaataacagctaccaggccagtatacaaatggcaccttatgaagcgttgtacgggcgcaaatgccggacaccgctattgtgggaccaagttggggaaagccaagtgttcgggactgatatcctgagggaagctgaagctaaagtcagaaccattcgggataatctaaaagtggcacagtcccggcagaaaagttatgcagataaccgtcgccgtgacctggaattcgcagtgggtgactttgtgtatcttcgggtcacgccattgcgaggtgtacacaggtttcagacaaaagggaagctcgcacctcggtatgtgggtcctttccgtatcattgctcggcgcggagaagtcgcttaccagttggagctgcccgcctccttgggcaacgtgcatgatgtgttccatgtgtcgcaactcaagaaatgtctccgagtgccatccgagcaggccgactcagcgcaaattgaagttcgcgaagacttgacctacgtggagaggccagtgaaaatcctggacaccatggagcgcaggaccaggaaccgggtaatccgtttttgcaaggtccaatggagcaaccacgccgaggaagaagctacctgggagcgtgaagacgagctgaaggcggcccatcccgatctcttcgccagttcttccgaatctcggggtcgagattccgtt

SEQ ID NO: 14141 - DNA, 5373 bp, Oryza sativa
  Clone ID: TFbOSC23004j.C1.o1.fg
atggatgaagtcgggcgtcgatggacattctccagggcaaatgaaggctacacgagctgcggcccgatggccggcagcgttacccgtcgtggtttggacatgactggcttcgttttggagctgcggggcatgtgcgtggtcttggggtatccacatggagtggattaccaggccaggccgctcccggagcaggagggtgaggatgcagagccccgcgctggttgggaggtcactgcagtgatcctcgccggctcttctgagcggacttcgctgacagtcaccgcgggtggcgactccttccccgccgcttgccagaacgccgctctcctcgccatcggcacccttcaccagcgctacccggacgagttgcagcactcgccctaccgctaccaccctcgtcgcggaggagcccgcgactacgccaccttccgagacgccagctcggaggatgacgctaccgtcgtgcatctggcacgcatggtggaggcgtacgacgcggctcgtatcgacttccatcagatggtgcgccgtggcatggtcgagaacaacatgaagatcctggagctgcgtcaggagaacctgcagctcaagaaggacctcgacgcgttggaggcgcagctgcatcagctcaagatcgcccagggagaggacagccgacccaagcgtcgccgcgtctgccgcagccagaagatcaccgcccgcaagagcacctccaggcctgagcttgttcgtcagtccctggcgtggacctgcttcgtcgagacccctcgtgccgagcctgcgcccgtggttccccaggagggggaagcctccggcgttggtagctcggaggttgtgtggggcatggttacaccgatggtgacgaccaggagaaatgttaacaccggtgaaggcaaccaacccgaaggcagcaaccacaaccaccaaggcaatccacctccacctcctcctccgcctccaccaccaccaccagacaccaacgccattctcacccaaatcctcgcccagcaagctaacctgatgaatgctttcctccaccacctccaaaacccgccacaacagaatgctccaccaccacctccccaacactctaaactcgccgagttcctccgcatccgtccacctaccttctccagctccaacaatcccgtagatgctttggattggttgcatgccgtggggaagaagttagacactgtgcagtgcagtgacaaggagaaagtcgtcttcgccgcccaccagctgcaggggcccgcatctctctggtgggaccacttccaggctacgcagccagaggggcagccgatcacttgggctcgcttcaccgccgctttccggaaaacccatgtgcccgccggagtcgtggctctcaagaagagggaattccgagagttgaagcaaggcaaccgctccgtgatggagtacctgcatgagttcaacaatctagcccgttatgccccggaggatgtgcgggaagatgaggagaagcaagagaagttcttggcaggaatggaccccgagctgtctgttcgtctagtctctggagactacccggacttccaacgactggtggacaagagcatccgcttggaagccaagcacaaggagctggaatcgcacaagcgccgcttggcgaatttccgcaatcaacagggtgctaaccagagggtccgctacaccaatccctacccagggggatcctcctcgcagcagcagcagcagcagcaacctcgcccagcgcctcgacctcaattcgtggtgcgcgtcccacagccgcagcagcagcagaatcaacaagggactcgtgcgccccgtcctcctacgccagctgtgcagcccgttcaaggccgcagggacgctcaaggtcagcagcgtctgtgcttcaactgcttcgagcccgggcactttgcggataaatgcccgaagccaaggcgtcagcaaggccaagcgcctccccgctccaacaacggtggcaaggacgtcattcggggtcgtgtgaatcacgtgacggccgaggacgtgctgacaactccagacgtcatcgttggtacgttcctcgttcattccatccctgctacaattttgttcgactctggagcttcccactcgtttatatctgtgccattcgtggggagaaatcagttgggggtagaaaggcttagaaaccctctactcatcaccacccctggaggggttatgacagcaaagtattatagccctgccgtccctatagaaattcaggggattccttttccctcggatctgattctgctagacaccaagaatttggatgtgattcttgggatgaattggttggctcaattccaaggagtagtggattgcgcgaggcgcactgtcactctgtaccgagggccagaacaaccggttgttttctttgcacccccaacctctgccagaagttcagaacttcatcagatagaactgtcagaaatccccatagtcagagagttcggagacgtgtttccggaagaactacctggtatgccgcccaagcgagagattgagttccggatagatcttgctccaggaaccactcctctgtacaagcgaccctaccgtatggcagcaaatgaactagccgaagtaaagaaacagttggaagagttgaaagaaaaggggtacatacgtccgagtacttccccatggggtgctcctgtgatttttgtagagaagaaagacaagacgaagaggatgtgcgttgactacagagctctcaatgaagttaccatcaaaaacaagtaccctcttccccggatcgatgatctgttcgaccagcttaaaggtgccactgtattctccaagattgatcttcgttccggatatcaccaattacgtattcgtgaagaagatattccgaagaccgcattcactacgcgatatggactgtatgaattcacggtgatgtcgttcggcttgaccaatgctcctgccttcttcatgaacttaatgaataaagtgttcatggaatacttggacaagtttgttgtggttttcatcgatgacattctgatatactcacaatcagaggaagaccatcagcaccatctccgtctggtgttgggaaagttgcgggaacatcaattgtatgccaagcttagcaagtgtgagttctggttgtccgaagtcaaattcttggggcacgtgatatctgctaaaggagttgctgtggaccccgaaacagtgatcgccgtcaccgattggaagcaacccaagacagtcactcagattcgcagtttcttgggtttggcaggatattaccggagattcattgagaacttctccaaaatcgctcgacccatgacacagttgttgaaaaaagaagagaaatttgtgtggagcccgcaatgcgagaaggcgtttcaaactctcaaggaaaagctggtttcctcgccagtgttaatcttgccggatactcgcaaggatttcatggtgtattgtgatgcttcgcgccaaggattggggtgcgtgctcatgcaggacggtcatgtggtagcctatgcctcacgtcagctacgacctcatgaaggcaactaccctacacatgacttggagttagcagcggtggttcatgctctaaaaatctggcggcactatctcattgggaaccgctgtgaaatatatactgatcacaagagcttgaaatacatcttcacccagtcggatctgaatcttcggcaaaggagatggttagaactcatcaaggattatgatgtgggaatacactatcatcctggtaaggccaacgtggttgccgacgctctaagtcgaaagagccactgcaacactctcaacgtccgaggcattccacccgagcttaatcaacagatggaagccctgaacctaagcatggttggtcgcggattcttggctgcgttagaagccaagcccaccttgctcgatcaaatccgcgaggctcagaagaatgatccggacatgcatggactcctcaagaatatgaaacagggtaaagccgctggtttcacagaggatgaacacggaaccttatggaacggaaagcgggtatgcgttccagatagcagagaacttaaacagctgatacttcaggaagctcacgaaagtccttattccattcacccgggcagtaccaagatgtacttagacttgaaggagaaatactggtgggttagcatgaagcgggaaattgcagagtttgtggctctatgtgatgtgtgccagcgtgtcaaggcagaacaccaacgaccggccggacttctccaacctctccaagtgccagaatggaagtgggatgaaattgggatggatttcatcaccggacttccaaaaacccaaggtggatatgattctatatgggtaattgtggatcgactaacaaaggtggctcgatttattcctgtgaagaccacttatggagggaacaaactagcggagctctacttcgctaggatcgtgagtctccatggtattcccaagaaaatcgtatctgataggggaagccaattcacctctcacttttggaagaagctccaagaagagctgggtactcgattgaatttcagcaccgcctatcacccgcagacagatggacagaccgagcgtctaaatcagatcctagaagatatgctccgcgcatgtgtcctagatttcgggaagacttgggataagagtctcccctatgccgagttctcctacaataacagctatcaagccagcatacaaatggcaccttatgaagcgttgtacgggcgcaaatgccggacaccgttattgtgggaccaagttggagaaagccaagtgttcgggactgatatcctgagagaagctgaagctaaagtcagaatcattcgggataatctaaaggtggcacagtcccggcagaaaagttatgcagataaccgacgccgtgatctggaattcgcagtggatgattttgtgtatcttcgggtcacgccattgcgaggtgtgcacaggtttcagacaaaagggaagctcgcacctcggtatgtgggtccttttcgtatcactgctcgacgcggagaagtcgcctaccagctggagttgcccgcctccttgggcaacgtgcatgatgtgttccatgtgtcgcaactcaagaaatgtcttcgagtgccatccgagcaggccgactcagagcaaattgaagttcgcgaagatttgacctacgtggagaggccagtgaaaatcctgaacaccatggagcgcaggaccaggaaccgagtaatccgtttttgcaaggtccagtggagcaatcacgccgaaggagaagctacttgggagcgtgaagacgagctgaaggcagcccatcccgatctcttcgccagttcttccgaatctcggggtcgagattccgtttaa

SEQ ID NO: 14142 - DNA, 3609 bp, Oryza sativa
  Clone ID: TFbOSC23023j.C1.o2.fg
atggtcaccgccggcgaccaccggcgcggcggagcggcgcccgagagagcggagaggagagggaagcgagagggacggtccacggctcaccccgggacaacgaggacggcggaaacgacggccggagtggagaaaggcggcggcgcggttcgggatgccgagggcgacggtgctccggcggtcggcgggcgaagcggagcggcggacggggtcgacggcgacgcggcgacgcggaaggaggtgacgccgagtcgggaggaggaccggagcgacgacggtggcgaaacggagctcggcggcgacggcggagagagaggtgcacgacgcgagcacgaatccgacggcgagagcgagcggcgagcggcggaaacggaagagcgaagcacgggggacgattttatagcgccgagagggagagagggcggccggggaggaaggaaaccggccgcggagttctcgggctccattgatgacgccggcgaggattgcgggcgcgattcgaacgaatccgagggagagagagagggaaaagagggggaaacgggagagggaatcacgggggacgtgacactcaggagggggaaacctccggcgttggtagcacggaggatggtgacgaccaggagaaatgttaacaccggtgaaggcaaccaacccgaaggcagcaaccccaaccaccaaggcaatccacctccaccaccaccaccagacaccaatgccattctcacccaaatcctcgctcagcaggccaacatgatgaccgctttcctccaccacctccaaaatccgccacaacagaatgctccaccaccacctccccaacactctaaactcgccgagttcctccgcatccgcccacccaccttctctagctccaacaatcccgtggatgcgttggattggttgcatgccgtggggaagaagctggacactgtgcagtgcagtgatgaagagaaagtcatcttcgccgcccatcagctgcagggacccgcatctctatggtgggaccacttccaggctacgcagccagagggacagccgattacttgggctcgcttcaccgccgctttccggagaacccatgtgcccgccggagtcgtggctctcaagaagagggaattccgagagttgaagcaaggcaaccgctccgtgatggagtatttgcatgagttcaacaatctggcccgttacgctccggaggatgtgcgggaagatgaggagaagcaagagaagttcctggcaggaatggaccccgagctgtccgtccgtctagtctctggggactatccggatttccaacgtctggtggacaagagcatccgcttggaggccaagcacaaggagctggagtcgcacaagcgccgcttggcgaacttccgcaatcagcagggtgctaaccagagggtccgctacaccaatccctatccagggggatcctcctcgcagcagcaacaacagcagcagcaacctcgttccgcgcctcgacctcaattcgtggtgcgcgtcccacagccgcagcagcaacagaatcaacaagggactcgtgcgccccgtcctcctacgccagctgtgcagcccgttcaaggccgcagggacgctcaaggtcagcagcgtctatgcttcaactgcttcgagcccgggcactttgcggataaatgcccgaagccaaggcgtcagcaaggccaagcgcctccccgctccaacaacggagggaaggatgtcattcggggccgtgtgaatcacgtgacggccgaggacgtgctgacaactccagacgtcatcgttggtacgttcctcgttcattccatccctgctaccattttgttcgactctggagcttcccactcgtttatatctgtgccattcgtggggagaaatcagttgggggtagaaaggcttaggaaccctctgctcatcaccacccctggcggggttatgacagcaaagtattatagccctgccgttcctatagaaattcaggggattccttttccctcggatctgattctgctagacaccaagaacttggatgtgatccttgggatgaattggttggctcaattccaaggagtagtggattgcgcgagacgcacggtcactctgtaccgaggaccggaacaaccggttgtcttctttgcacccccaacctctgtcagaagttcagaactgcatcagataggactgtcagaaatccccatcgtcagggagttcggagatgtgtttccggaagaactacctggtatgccgcccaagcgagagattgagttccggatagatcttgctccaggaaccactcctctgcacaagcgaccctaccgtatggcagcaaatgaactggccgaagtaaagaaacagttggaagagttgaaaggaaaggggtatatacgtccgagtacttccccctggggtgcttctgtgatttttgtagagaagaaagacaagacgaagaggatgtgcgttgactacagagctctcaatgaagtcaccatcaaaaacaagtaccctcttcctcggatcgatgatctgttcgatcagcttaaaggtgccactgtattctccaagattgatcttcgttccgggtaccaccaattacgtatccgcgaggaagatattccgaagaccgcattcaccacgcgatacgggctgtatgaattcacggtgatgtcattcggtctaaccaatgcacctgccttcttcatgaacttaatgaacaaagtgttcatggaatacttggataagtttgttgtggttttcattgatgacattctgatatactcacaatcagaggaagaccatcaacaccatctccgtctggtgttgggaaagttgcgggaacatcaattgtatgccaagcttagcaagtgtgagttctggttgtccgaagtcaaattcttggggcacgtgatatctgctaaaggagttgctgtggaccccgaaacagtgaccgccgtcactgaatggaagcaacccaagacagtcacccaaatccgcagtttcttgggtttggcaggatattaccggagattcatcgagaacttctccaaaatcgctcgacccatgacacagttgttgaagaaagaagagaaatttgtgtggagcccgcaatgcgagaaggcgttccaaactctcaaggagaagctggtttcctcgccagtgttaatcttgccggatactcgcaaggatttcatggtgtactgtgatgcttcgcgccaaggattggggtgcgtgctcatgcaggacggtcatgtggtagcctatgcctcacgccaactacgacctcatgaaggcaactaccctacgcatgacttggagttagcagcggtggttcatgctctaaaaatctggcggcactatctcattgggaaccgctgtgaaatatataccgatcataagagcttgaaatacatcttcactcagtcggacctgaatcttcgacaaaggagatggttagaactcatcaaggattatgatgtgggaattcattatcatccgggtaaggctaacgtggttgcctgtcacgtcctgataaattcatcccgaattaaaaatcattcgctaaaaggaataatagaattaattaaaattcgaaaagaaattggcaaacactaa

SEQ ID NO: 14143 - DNA, 5034 bp, Oryza sativa
  Clone ID: TFbOSC23671j.C1.o1.fg
atggaggtggatgaagtcgggggtcgatggacattctccagggcaaatgaaggctacacgagctgcggcccggtagtcgagatgtcatggcacagggccggtgtcctgctgctaggggctcagtcctgcctgcctgtcccgggggttccggccgtaggtgggattgggtcggtactcttgtctatggctaggatgggttggaaactatgtcacgtcttccgtctgtataccgtggtgatggccggcagcgtcacccgtcgtggtttggacatgactggcttcgtcttggagctgcgaggcatgtgcgtggtcttggggtatccacatggagtggattaccaggccaggccactcccggagcaggagggtgaggatgcagagccccacgctggttgggaggtcactgcagtgatcctctccggctctcccgagcggacctcgctggcagtcaccgcgggtggagattccttccccgccgcttgtcagaacgccgctctcctcgccatcggcactcttcaccagcactacccggacgagttgcagcactcgccctaccgctaccaccctcgtcgcggaggagcccgcgactacgccaccttccgggatgctagctcggaggatgacgctaccatcgtgcacctggcgcgcatggtggaggcgtacgacgcggctcgtatcgatttccatcagatggtgcgccgcgggatggtcgagaacaacatgaagatcctggagctgcgtcaggagaacctgcagctcaagaaggacctagatgcggtggaggcgcagctgcatcagctcaagatcgctcagggagaggactgccgtcccaagcgtctgccgcagccagaagatcaccgcccgcaagagcacctccaggcccgagcttgttcgtcagtccctggcgtggacctgcttcgtcgagacccctcgtgccgagcctgcgcccgtggttccccaggagggggaaacctccggcgttggagaaatgttaacaccggtgatggcaatcaacctgaaggcagcaaccccaaccaccagggcaacccaccttcaccttctgcttcgcctccaccaccaccaccagataccaatgccattctcacccaaatcctcgctcagcaggccaacatgatgactgctttcctccaccacctccaaaatccgccacaacagaatgctccaccaccacctccacaacactctaaactcgccgaattcctccgcatccgcccacctaccttctcgagctccaacaaccccgtggatgcgttggattggttgcatgccgtggggaaaaagctagacacggtgcagtgcagcgatgaggagaaagtcatcttcgccgcccaccagctgcaggggcccgcatctctatggtgggaccacttccaggctacgcagccagaggggcaacctatcacctgggctcgcttcaccgccgctttccggagaacccatgtgcccgccggagtcgtggccctcaagaagagggagttccgggagttgaagcaaggcaaccgctccgtgatggagtatttgcacgagttcaacaacctggcccgttacgctccggaggatgtgcgggaagatgaggagaagcaagagaagttcttggcgggaatggaccctgagctgtccgtccgtctagtctccggggactatccggatttccaacgtctggtggacaagagcatccgcttggaagccaagcacaaggaactggagtcgcacaagcgccgcttggcgaatttccgcaatcaacagggtgctaaccagcgggttcgctacaccaatccctacccagggggatcctcttcgcagcagcagcagcaacaacctcgctccgcgcctcgacctcaattcgtggtgcgcgtcccacagccgcagcagcagcagaatcaacaagggactcgtgtgccccgtcctcctacgccagccgtgcagcctggtcaaggccgcagggacgctcaaggtcagcagcgtctgtgcttcaactgcttcgagcccgggcattttgcggataaatgcccaaagccgaggcgtcagcaaggccaagcgcctcctcgctccaacaacggtgggaaggatgtcactcggggtcgtgtgaaccatgtgacggccgaggacgtgctgacaactccagacgtcatcgttggtacgttcctcatccattccgtccctgctaccactttgttcgactctggagcttcccactcgtttatatctgtgccattcgtggggagaaatcagttgggggtagaaaggcttagaaaccctctgctaatcaccacccctggaggggttatgacagcaaagtattatagccctgccgtccctatagaaattcaggggattccttttccctcggatctgattctgctagacaccaagaacttggatgtgatccttgggatgaattggttggctcaattccaaggagtagtggattgcgcgagacgcactgtcaccctgtaccgagggccggaacaaccggttgtcttctttgcacccccaacctctgttagaagttcagaactgcatcagataggactgtcagaaatccccatagtcggagagttcggagacgtgtttccggaagaactacctggtatgccgcccaagcgagagattgagttccggatagatcttgctccaggaaccactcctctgtacaagcgaccctaccgcatggcagcaaatgaactggccgaaaagaaagacaagacgaagaggatgtgcgttgactacagagctctcaatgaagtcaccatcaagaacaaatatcctcttccccggatcgatgatctgttcgatcaacttaaaggtgccactgtattctccaagatcgatcttcgttccggatatcaccaattacgtattcgggaagaagatattccgaagaccgcattcaccacgcgatacgggctgtatgaattcacggtgatgtcattcggtctaaccaatgcacctgccttcttcatgaacttaatgaacaaagtgttcatggaatacttggacaagtttgttgtggttttcattgatgacattctgatatactcacaatctgaggaagaccatcagcaccatctccgtctggtgttgggaaagttgcgggaacatcaattgtatgccaagcttagcaagtgtgagttctggttgtccgaagtcaaattcttagggcatgtgatatctgctgaaggagttgctgtggaccccgaaacagtgaccgccgtcaccgattggaagcaacccaagacagtcactcaaattcgcagtttcttaggtttggcaggatactaccggagattcatcgagaatttctccaaaatcgctcggcccatgacacaattgttgaagaaagaagagaaatttgtgtggagcccgcaatgcgagaaggcattccaaactctcaaagaaaagctggtttcctcgccagtgttaatcttgccggatactcgcaaggatttcatggtgtactgtgatgcttcgcgccaaggattggggtgcgtgctcatgcaggatggtcatgtggtggcctatgcctcacgccagctacggccccatgaaggcaactaccctacccatgatttggagttagcagcggtggttcatgctctaaaaatctggcggcactatctcattgggaatcgctgtgaaatatatactgatcataagagtttgaaatacatcttcacccagtcagatctgaatcttcggcaaaggagatggttagaactcatcaaggattatgatgtgggaattcactatcatcctggtaaggccaacgtggttgccgacgctctaagccggaaaagccattgcaacactcttaacgcccgaggcattccacccgaacttaatcaacagatggaagccctgaacctaagcatagtgggtcgtggattcttagctgcgttggaagccaagcccaccttgctcgatcaaatccgcgaggctcagaagaatgatccggacatgcatggactcctcaagaatatgaaacagggtaaagctgctggtttcacagaagatgaacacggaaccttatggaacggaaatcggcgtgtcaaggcagagcaccaacgaccggccggacttctccaacctctccaagtaccagaatggaaatgggatgaaattgggatggatttcatcaccggacttccaaaaacccaaggtggatatgattctatatgggtagttgtggatcgattaaccaaggtagctcgatttattcctgtgaagaccacctatggagggaacaaactagccgagctctacttcgctaggatcagtcaaactgcaggcatggagttgggaacccggctgaatttcagcaccgcgtatcacccgcagacagatggacagaccgagcgtctaaatcagatcctcgaagatatgcttcgcgcatgtgtcctagatttcgggaagacttgggataagagtctcccctatgccgagttctcctacaataacagctatcaagccagcatacaaatggcaccctatgaagcgttgtacgggcgcaaatgccggacaccgctattgtgggaccaagttggggaaagtcaagtgttcgggactgatatcctgagagaagctgaagctaaagtcagaatcattcgggataatctaaaggtggcacagtcccggcagaaaagttatgcggataaccgtcgccgtgacctggaattcgcagtgggtgattttgtatatcttcgggtcacgccattgcgaggtgtacataggtttcagacaaaggggaagctcgcacctcggtatgtgggtcctttccgcatcattgctcggcgtggagaagtcgcttaccagctggagctgcccgcctccttgggcaacgtgcatgatgtgtttcatgtgtctcaactcaagaaatgtcttcgagtgccatccgagcaggccgactcagagcaaattgaagttcgcgaagatttgacctacgtggagaggccaatgaaaatcctggacaccatggagcgcaggaccaggaaccgggtaatccgtttttgctag

SEQ ID NO: 14144 - DNA, 5106 bp, Oryza sativa
  Clone ID: TFbOSC25209j.C1.o1.fg
atggatgaagtcgggggtcgatggacattctccagggcaaatgaaggctacacgagctgcggcccgatggccggcagcgtcacccgtcgtggtttggacatgactggcttcgttttggagctgcggggcatgtgcgtggtcttgggatatccacatggagtggactaccaggccaggccgctcccggagcaggagggtgaggatgcagagccccacgctggttgggaggcatacgacgcggctcgtatcgacttccatcagatggtgcgtcgtggcatggtggagaacaacatgaagattctggagctgcgtcaggagaacctgcagctcaagaaggacctcgacgcgttggagtcgcagctgcaccagctcaagctcgcccaaggagaggacagccgccccaagcgccgccgcgtctgccgcagccagaagatcaccgcccgcaagagcacctccaggcccgagcttgttcgtcagtccttggcgtggacctgcttcgtcgagacccctcgtgccgagcctgcgcccgtggttcctcaggagggggaagcctccggcgttggtagcacggaggatgcgctgttgctcgccttccgtcctggcccgtcgcagcggagaaatgttagcaccggtgaaggcaaccaacccgaaggcagcaaccccaacccccaaggcaatccacctccaccaccaccaccagacaccaacgccattctcacccaaatcctcgcccagcaggccaacatgatgactgctttcctccaccacctccaaaatccgccacagcagaatgctccaccaccacctccacaacactctaaactcgccgagttcctccgtatccgcccacctaccttctctagctccaacaaccctgtggatgcgttggattggttgcatgccgtggggaaaaagctagacactgtgcagtgcagcgatgaggagaaagtcatcttcgccgcccaccagctgcaggggcccgcatctctatggtgggaccacttccaggctacgcagccagagggacagcctattacttgggcccacttcaccgccgccttccggagaacccatgtgcccgccggagtcatggctctaaagaaaagggaattccgagagttgaagcaaggcaaccgctccgtgatggagtatttgcatgagttcaacaacctggcccggtacgccccggaggatgtgcgggaagatgagaagaagcaagagaagttcttggcaggtatggaccctgagctgtccgtccgtctagtctccggggactatccagatttccaacgtctggtggacaagagcatccgcttggaagccaagcacaaggaactggagtcgcacaagcgccgcttggcgaacttccgcaatcaacagggtgctaaccaaagggtccgctacaccaatccctatccagggggatcctcctcacagcagcaacaacagcagcagcaatctcgctccgcgccccgacctcaattcgtggtgcgcgtcccacagccgcagcagcagcagaatcaacaagggactcgtgcaccccgtcctcctacgccaactgtgcagcccgttcaaggccgcagggacgctcaaggtcagcagcgtctgtgcttcaactgcttcgagcccgggcactttgcggataaatgcccgaagccaaggcgtcagcaaggccaagcgcctccccgccccaacaacggtgggaaggacgtcattcggggtcgtgtgaaccacgtgacggccgaggacgtgctgacaactccggacgtcatcgttggtacgttcctcatccattccatccctgctacaattttgttcgactctggagcttcccactcgtttatatctgtgccattcgtggggaaaaatcagttgggggtagaaaggcttagaaaccctctgctcatcaccacccctggaggggttatgacagcaaagtattatagccctgccgtccctatagaaattcaggggattcctttttcctcggatctgattctgctagataccaagaacttggatgtgattcttgggatgaattggttggctcaattccaaggagtagtggattgcgcgagacgcactgtcactctgtaccgagggccggaacaaccggttgttttctttgcacccccaacctctgtcagaagttcagaacttcatcagataggactgtcagaaatccccattgtcagagagttcggagacgtgtttccggaagaactacctggtatgccgcccaagcgagagattgagttccggatagatcttgctccaggaaccactcctctgcacaagcgaccctaccgtatggcagcaaatcagaacctggcggaattcaagaaacagttggaagagttgaaagaaaaggggtatatacgtccgagtacttccccttggggtgctcctgtgatttttgtggagaagaaagacaaaacgaagaggatgtgcgttgactacagagctctcaatgaagtcaccatcaaaaacaagtaccctcttccccggatcgatgatctgttcgatcagcttaaaggtgccactgtattctccaagattgatcttcgttccggatatcaccaattacgtatccgtgaagaagatattccgaagaccgcattcaccacgcgatacgggctgtatgaattcacggtgatgtcgttcggtctaaccaatgcacctgccttcttcatgaacttaatgaacaaagtgttcatggaatacttggataagtttgttgtggttttcattgatgacattctgatatactcacaatcagaggaagaccatcagcaccatctccgtctggtgttgggaaagttgcgggaacatcaattgtatgccaagcttagcaagtgtgagttctggttgtccgaagtcaaattcttggggcacgtgatatctgctaaaggagttgctgtggaccccgaaacagtgaccgccgtcaccgattggaagcaacccaagacagtcactcaagtccgcagtttcttaggtttggcgggatactaccggagattcatcgagaacttctccaaaatcgctcgacccatgacacagttgttgaagaaagaagagaaatttgtgtggagcccgcaatgcgagaaggcgttccaaactctcaagaaaaagctggtttcctcgccagtgttaatcttgccggatactcgcaaggatttcatggtgtattgtgatgcttcgcgccaaggattggggtgcgtgctcatgcaggatggtcatgtggtagcctatgcctcacgtcagctacggcctcatgaaggcaactaccctacacatgatttggagttagccgcagtggttcatgctctaaaaatctggcggcactatctcattgggaatcgctgtgaaatatatactgatcataagagtttgaaatacatcttcacccagtcagatctgaatcttcggcaaaggagatggttagaactcatcaaggattatgatgtgggaattcactatcatcctggtaaggccaacgtggttgccgacgctctaagtcggaaaagccattgcaatactcttaacgtccgaggcattccacccgaacttaatcaacagatggaagccctgaacctaagcatagttggtcgtggattcttggctgcgttagaagccaagcctaccttgctcgaccaaatccgcgaggctcagaagaatgatccggacatgcatggactcctcaagaatatgaaacagggtaaagccgctggtttcacagaggatgaacacggaactctatggaacggaaagcgggtgtgcgttcccgataacagagaacttaaacagctgatacttcaggaagctcacgaaagtccttattcaatccacccgggcagtacaaagctgtacttagatttgaaggagaaatactggtgggtcagcatgaagcgggaaattgcagagtttgtggccctatgtgatgtgtgccagcgtgtcaaggcagaacaccagcgaccggccggacttctccaacctctccaagtgccagaatggaaatgggatgaaattgggatggatttcatcactggacttccaaaaacccaaggtggatatgattctatatgggtaattgtggatcgactaacaaaggtagctcgatttattcctgtgaagaccacctatggagggaacaaactagcggaactctatttcgctaggatcgtgagtctccatggcattcccaagaaaatcgtatctgataggggaagccaattcacctctcacttctggaagaagctccaagaagagctgggcactcgattgaatttcagcaccgcgtatcacccgcagacagatggacagaccgagcgtctaaaccagatcctagaagatatgctccgcgcatgtgtactagatttcgggaagacctgggataagagcctcccctatgccgagttttcctacaacaacagctatcaagccagcatacaaatggcaccttatgaagcgttgtacgggcgcaaatgccggacaccgctattgtgggaccaagttggagaaagccaagtgttcgggactgacatcctgagagaagctgaagctaaagtcagaatcattcgggataatttaaaggtggcacagtcccggcagaaaagttatgcagataaccgtcgccgtgacctggaattcgcagtgggtgattttgtatatcttcgggtcacgccattgcgaggtgtacacaggtttcagacaaaagggaagctcgcacctcggtatgtgggtcccttccgtatcattgctcgacgcggagaagtcgcctaccagctggagttgcccgcctccttgggtaacgtgcatgatgtgttccatgtgtcgcaactcaagaaatgtcttcgagtgccatccgagcaggccgactcagagcaaattgaagttcgcgaagacttgacctacgtggagaggccagtgaaaatcctggacaccatggagcgcaggaccaggaaccgagtgatccgtttttgcaaggtccagtggagcaaccacgccgaagaagaagctacttgggagcgtgaagacgagctgaaggcagcccatcccgatctcttcgccagttcctccgaatctcggggtcgagattccgtttaa

SEQ ID NO: 14145 - DNA, 1927 bp, Oryza sativa
  Clone ID: TFbOSC25210j.C1.o1.fg
atgtcatggcagagggttggtgccctgctgctaggggctcagtcctgcctgcctgtcccgggggttccggccatggccggcagcgtcacccgtcgtggtttggacatgactggtttcgtcttggagctgcggggcatgtgcgtggtcctggggtatccacatggagtggattaccaggccaggccgctcccggagcaggagggtgaggatgcagagccccacgctggttgggaggtcactacagtgatcctctccggctctcccgagcggacttcgctggcagtcaccgcgggtggagattccttccccgccgcttgccagaacgccgctctcctcgccatcggcactcttcgccagcgctacccggacgagttgcagcactcgccctaccgctaccaccctcgtcgcggaggagcccgcgactacgccaccttccgggatgctagctcggagaatgacgctaccatcgtgcacctggcaggcatggtggaggcgtacgacgcggctcgtatcgacttccaccagatggtgcaccgtgggatggtcgagaacaacatgaagatcctggagctgcgtcaagagaacctgcagctcaagaaggacctcgacgcggtggaggcgcagctgcagcagctcaagatcgcccagggagaggactgccgccccaagcgtcgccgcgtctgccgcagccagaagatcactgcccgcaagagcacctccaggcccgagctgatggtgacgaccaggagaaccgctgttaccggtgatggcaaccaacccgaaggcagcaaccacaaccaccagggcaacccacctccacctccccctccgccaccaccaccaccaccagacaccaacgccattctcacccaaatcctcgcccagcaagccaacatgatgactgctttcctccaccacctccaaaatccgccacaacagaatgctccaccaccacctccacaacactctaaactcgccgagttcctccgcatccgcccacctaccttctcgagctccaacaaccccatggatgcgttggattggttgcatgccgtggggaagaagctggacactgtgcagtgcagtgatgaagagaaagtcatctttgccgcccaccagctgcaggggcccgcatctttatggtgggaccacttccaggctacgcagccagaagggcaaccgattacttgggctcgcttcaccgccgctttccggagaacccatgtgcccgccggagtcgtggctcttaagaagagggagttccgagagttgaagcaaggcaaccgctccgtgatggagtatttgcatgagttcaacaatctggcccggtacgctccggaggatgtgcgggaagatgaggagaagcaagagaagtttctggcgggaatggaccctgagctgtccgttcgtctagtctctggggactacccggacttccaacgtctggtggacaagagcatccgcttggaggccaagcacaaggagctggagtcgcacaagcgccgcttggcgaacttccgcaatcaacagggtgctaatcaaagggtccgctacaccaatccctacccagggggatcctcctcacagcagcaacaacagcagcagcaatctcgctccgcgccccgacctcaattcgtggtgcgcgtcccacagccgcagcagcagcagaatcaaccagggactcgtgcaccccgtcctcctacgccaactgtgcagcctgttcaagtccgcagggacgctcaaggtcagcagcgtctgtgcttcaactgcttcgagcccgggcactttgcggataaatgcccgaagccaaggcgtcagcaaggccaagcgcctccccgccccaacaacggtggcaaggatgtcattcggggtcgtgtgaaccacgtgacggccgaggacgtgctgacaactccagacgtcatcgttg

SEQ ID NO: 14146 - DNA, 1486 bp, Oryza sativa
  Clone ID: TFbOSC25222j.C1.o1.fg
atgaagattctggagctgcgtcaggagaacctgcagctcaagaaggacctcgacgcgttggagtcgcagctgcaccagctcaagctcgcccaaggagaggacagccgccccaagcgccgccgcgtctgccgcagccagaagatcaccgcccgcaagagcacctccaggcccgagcttgttcgtcagtccttggcgtggacctgcttcgtcgagacccctcgtgccgagcctgcgcccgtggttcctcaggagggggaagcctccggcgttggcagcacggaggatgcgctgttgctcgccttccgtcctggcccgtcgcagcggagaaatgttagcaccggtgaaggcaaccaacccgaaggcagcaaccccaacccccaaggcaatccaccttcaccaccaccaccagacaccaacgccattctcacccaaatcctcgcccagcaggccaacatgatgactgctttcctccaccacctccaaaatccgccacagcagaatgctccaccaccacctccacaacactctaaactcgccgagttcctccgtatccgcccacctaccttctctagctccaacaaccccgtggatgcgttggattggttgcatgccgtggggaagaagctggacactgtgcagtgcagtgatgaagagaaagtcatctttgccgcccaccagctgcaggggcccgcatctctctggtgggaccacttccaggctacgcagccagaggggcaacctatcacttgggcccacttcaccgccgctttccggagaacccatgtgcccgccggagttgtggctcttaagaagagggagttccgggagttgaagcaaggcaaccgctccgtgatggagtatttgcatgagttcaacaatctggcccgttacgccccggaggatgtgcgggaagatgaggagaagcaagagaagtttctggcaggaatggaccctgagctgtctgttcgtctagtctctggggactacccggacttccaacgtctggtggacaagagcatccgcttggaggccaagcacaaggagctggagtcgcacaagcgccgcttggcgaacttccgcaatcagcagggtgctaatcaaagggtccgctacaccaatccctatccagggggatcctcctcacagcagcaacaacagcagcagcaatctcgctccgcgcctcgacctcaattcgtggtgcgcgtcccacagccgcagcagcagcagaatcaacaagggactcgtgcaccccgtcctcctacgccaactgtgcagcccgttcaaggccgcagggacgctcaaggtcagcagcgtctgtgcttcaactgcttcgagcccgggcactttgcggataaatgcccgaagccaaggcgtcagcaaggccaagcgcctccccgctccaacaacggtgggaaggacgtcattcggggtcgtgtgaaccacgtgacggccgaggacgtgctgacaactccggacgtcatcgttg

SEQ ID NO: 14147 - DNA, 1959 bp, Oryza sativa
  Clone ID: TFbOSC25596j.C1.o1.fg
atgactggcttcgtcttggagctgcgaggcatgtgcgtggtcttggggtatccacatggagtggattaccaggccaggccactcccggagcaggagggtgaggatgcagagcctcacgctggttgggaggtcactgcagtgatcctctccggctctcccgagcggacttcgctggcagtcaccgcgggtggggattccttccccgccgcttgccagaacgccgctctcctcgccatcggcacccttcaccagcgctacccggacgagttgcagcactcgccctaccgctaccaccctcgtcgcggaggagcttgcgactacgccaccttccgagacgccagctcggaggatgacgctaccgtcgtgcatctggcacgcatggtggaggcgtacgacgcggctcgtatcgacttccatcagatggtgcgccgtggcatggtggagaacaacctgaagatcctggagctgcgacaggagaatctgcagctcaagaaggacctcgacgcgttggaggcgcagctgcaccagctcaagatcgcccagggagagatcagccgtcccaagcgtcgccgcgtctgccgcagccagaagatcaccgcccgtaagagcacctccaggcccgagcttgttcgtcagtccctggcgtggacttgcttcgtcgagacccctcgcgccgagcctgcgcccgtggttccccaggagggggaagcctccggcgttggtagctcggagggtgcgctgttgctcaccttccgtcctggcccgtcgcagcggagaaatgttaacaccggtgaaggcaaccaacccgagggcagcaaccccaacccccaaggcaacccaccttcaccaccaccaccagacaccaatgccattctcacccagatcctcgcccagcaagccaacatgatgaatgctttcctccaccacctccaaaacccgccacaacagaatgctccaccaccccctccccaacactccaaactcgccgaattcctccgcatccgcccacctaccttctccagctccaacaaccccgtggatgctttggattggttgcatgccgtggggaagaagctggacacggtgcagtgcagcgacgaagagaaagtcatcttcgccgcccaccagctgcaggggcccgcatctctctggtgggaccatttccaggccacgcagccagaagggcaaccgattacttgggctcgcttcaccgccgctttccggagaacccatgtgcccgctggagtcgtggctcttaagaaaagggaatttcgggagttgaagcaaggcaaccgctccgtgatggagtatttgcatgagttcaacaatctagcccgttatgccccggaggatgtgcgggaagatgaggagaagcaggagaagttcttggcgggaatggaccctgagctgtccgttcgtctagtctctggggactatccggattttcaacgactggtggacaagagcatccgcttggaagccaagcacaaggagctggaatcgcacaagcgccgcttggcgaatttccgcaatcaacagggtgctaaccagagggttcgctacaccaatccctacccagggggatcctcctcgcagcagcaacaacagcagcagcaacctcgcccagcgccccgacctcagttcgtggtgcgcgtcccacagccgcagcagcagcagaatcagcaagggactcgtgcgccccgtcctcctacgccagctgtgccgcctgttcaaggccgcagggacgctcaaggtcagcagcgtctgtgcttcaactgcttcgagcccgggcactttgcggataaatgcccaaagccaaggcgtcagcaaggccaagcgcctccccgctccaacaacggtggcaaggacgtcatccgtggtcgtgtgaatcacgtgacggccgaggacgtgctgacaactcccgacgtcatcgttgaagttcagaactgcatcagatag

SEQ ID NO: 14148 - DNA, 4254 bp, Oryza sativa
  Clone ID: TFbOSC25709j.C1.o1.fg
atgatgactgctttcctccaccacctccaaaatccgccacaacagaatgctccaccaccacccccacaacactttaaactcgccgagttcctccgcatccgtccacctaccttctctagctccaacaaccccgtggatgcgttggattggttgcatgccgtggggaaaaagctagacaccgtgcagtgcagcgatgaggagaaagtcgtcttcgccgcccaccgactgcaggggcccgcatctctatggtgggaccatttccaggctacgcagccagaggggcagcctattacttgggcccgcttcaccgccgccttccggaggacccatgtgcccgccgaagtcatggcccttaagaaaagggaattccgagagttgaagcaaggcaaccgctccgtgatggagtatttgcatgagtttaacaacctggcccggtacgccccggaggatgtacgggaagatgaggaaaagcaggagaagttcttggcaggaatggaccctgagctgtccgtgcgtctagtctccggtgactatccggatttccaacgtctggtggacaagagcatccgcttggaagccaagcacaaggaactagagtcgcacaagcgccgcttggcgaatttccgcaatcaacagggtgctaaccaaagggtccgctacaccaatccctatccagggggatcgtcctcgcagcagcaacagcagcaacaacctcgctccgcgccccgacctcaattcgtggtgcgcgtcccacagccgcagcaacagcagagtcaacaagggactcgtgcgacccgtcctcctatgccagccgtgcagcctggtcaaggccgcagggacgttcaaggtccgcagcgtctgtgcttcaactgcttcgagcccgggcactttgcggataaatgcccgaagccgaggcgccagcaaggccaaccgcctccccgctccaacaacggtggtaaggatgtcattcgggatcgtgtgaaccacgtgacggccgaggacgtgctgacaactccagacgtcatcgttggtacgttcctcattcattccatccctgctaccattttgttcgactctggagcttcccactcgtttatatcggtgccattcgtggggagaaatcagttgggggtagaaaggcttaggaaccctctgctcatcaccacccctggaggggttatgacagcaaagtattatagtcctgccgtccctatagaaattcaggggattccttttccctcggatctgattcttctagacaccaagaacttggatgtgatccttgggatgaattggttggctcaattccaaggaatagtggattgtgcaagacgcactgtcactctgtaccgagggccggaacaaccggttgttttctttgcacccccaacctctatcagtagttcagaacttcatcagataggactgtcagaaatccccatcgtcagagagttcggagacgtgtttccggaagaactacccggtatgccgcccaagcgagagattgagttccggatagatctttctccaggaaccactcctctgtacaagcgaccctaccgtatggcagcaaatgaactggccaaagttaagaaacagttggaagagttgaaagaaaaggggtatatacgtccgagtacttccccctggggtgctcctgtgatttttgtggagaagaaagacaagacgaagaggatgtgcgttgactacagagctctcaatgaagtcaccatcaaaaacaagtaccctcttccccggatcgatgatctgttcgatcagcttaaaggtgccacggtattctccaagattgatcttcgttccggatatcaccagttgcgcatccgtgaagaagatattccgaagaccgcattcaccacgcgatacggactgtatgaattcacggtgatgtcattcggtttaaccaatgctcctgccttcttcatgaacttaatgaagaaagtgttcatggaatacttggataagtttgttgtggttttcattgatgacattctggtatactcacaatcagaggaagaccataagcaccatctccgtctggtgttggggaagttgcgggaacatcaattgtatgccaaacttagcaagtgtgagttctggttgtccgaagtcaaattcttagggcacgtgatatctgctaaaggagttgctgtggaccccgaaacagtgaccgccgtcactgattggaagcaacccaagacagtcactcaaattcgcagtttcttaggtttggcaggatactaccggaggtttatcgagaacttctccaaaatcgctcgacccatgacacagttgttgaagaaagaagagaaatttgtgtggagcccgcaatgcgagaaggcgttccaaactctcaaagaaaagctggtttcctcgccagtgttaatcttgcaggatactcgcaaggacttcatggtgtattgtgacgcttcgcgccaaggattggggtgcgtgctcatgcatgacggtcatgtggtggcctatgcctcacgccagctacggcctcatgaaggcaactaccctacccatgatttggagttagccgcggtggttcatgctctaaaaatctggcggcactatctcattgggaatcactgtgaaatatatactgatcataagagtttgaaatacatcttcacccagtcggatctgaatcttcggcagaggagatggctagaactcatcaaggattatgatgtgggaattcactatcatcctggtaaggccaacgtggtcgccgacgctctaagtcgaaaaagccattgcaacactcttaacgtccgtggcattccacccgaacttaaccaacagatggaagccctgaatctaagcataaatatgaaacagggtaaagccgctggtttcacagaggatgaacacggaaccctatggaacggaaatcgggtatgcgttccagataacagagaacttaaacaactgatacttcaggaagctcacgaaagtccttattccatccaccctggcagtacgaagatgtacttagacttgaaggagaaatactggtgggttagtatgaagcgggaaattgcagagttcgtggccctttgtgatgtgtgccagcgtgtcaaagcagagcaccaacgaccggccggacttctccaacctctccaagtaccagaatggaaatgggatgaaattgggatggatttcatcaccggacttccaaaaacccaaggtggatatgattctatatgggtagttgtggatcgattaaccaaggtagctcgatttattcctgtgaagaccacctatggagggaacaaactagccgagctctacttcgctaggatcgtgagtctccatggcgttcccaagaaaatcgtatctgataggggaagccaattcacctctcacttttggaagaagctccaagaagagctgggtacccgattaaatttcagcaccgcgtatcacccgcagacggatggacagaccgagcatctaaatcagatcctagaagatatgcttcgcgcatgtgtcctagatttcgggaagacctgggataagagtctcccctatgccgagttctcctacaataacagctaccaagccagtatacaaatggcaccttatgaagcgttgtatgggcgcaaatgccggacaccgctcttgtgggaccaagttggggaaagtcaagtgttcgggactgatatcctgagaaaagctgaagcgaaggtcagaaccattcgggataatctaaaggtggcacagtcccggcagaaaagttatgcagataaccgtcgccgtgacctggaatttgcagtggacgattttgtgtaccttcgggtcacgccattgcggggtgtacacaggtttcagacaaaagggaagctcgcacctcggttcgtgggtcctttccgtatcattgctcggcgcggagaagtcgcttaccagttggagctgcccgcctccttgggcaacgtgcatgatgtgttccatgtgtcgcaactcaagaaatgtcttcgagtgccatccgagcaggccgactcagagcaaattgaagttcgcgaagacttgacctacgtggagaggccagtgaaaatcctggacaccatggagcgcaggaccaggaaccgggtaatccgtttttgcaaggtccaatggagcaaccacgccgaggaagaagctacctgggagcgtgaagacgagctgaaggcagcccatcccgatctcttcgctagttcttccgaatctcggggtcgagattccgtttaa

SEQ ID NO: 14149 - DNA, 1191 bp, Oryza sativa
  Clone ID: TFbOSC25970j.C1.o1.fg
atggtgacaaccaggagaagtgctgctaccggtgaaggcagtcaccccgaaggcagcaaccacaacaaccatgacagcccacctccacctcctcccccgcctccaccaccaccaccagacaccaactccatcctcacccaaatcctcgcccagcaggccaacatgatggctgcttttatccatcacatccaaattccgccacagcataatgctccacctccaccaccacccccgcaacattctaaacttgccgagttcctccgcatccgtccgcctaccttctctagctccaataaccccgtggatgccttggattggttgcatgccgtggggaaaaagttggataccgtgcagtgcaacgatgaggagaaagtcatcttcgccgcccatcaactgcaggggcccgcatctctatggtgggaccacttccaggctacacagctagaggggcagcctattacctgggcccgcttcaccgcagctttccggaggacccatgtgcccgccggagtcatggcccttaagaaaaggaaattccgagagttgaagcaaggcaaccgctctgtgatggagtatttgcatgagtttaacaacctggcccggtacgccccagaagatgttcatgaagatgaggagaagcaggagaagttcttggcaggaatggaccctgagctgtccgtgcgtctggtctccggggattatccggatttccagcgtttggtggacaagagcatccgcttggaagccaagcacaaggaactggagtcgcacaagcgtcgcttggcgaatttccgcaatcaacagggggctaaccaaagggtccgctacactaatccctacccagggggatcctcctcgcagcagcagcagcagcaacctcgctccgcgccccgacctcaattcgtggtgcgcgtctcacagccgcagcaacagcagagtcagcaagggactcgtgcgccccgtcctcctgcaccagccgtgcagcctggacaaggccgcagggatgctcaaggacaacaacgtctgtgcttcaattgctttgagcccgggcactttgcggataaatgcccaaagccgaggcgccagcaaggccaagcgcctccccgccccaacaacggtggtaaggatgtcattccgggtcgtgtgaaccacgtgactgccgaggatgtgctgacgactccggacgtcatc

SEQ ID NO: 14150 - DNA, 5595 bp, Oryza sativa
  Clone ID: TFbOSC26157j.C1.o1.np
atggatgaagtcgggggtcgatggacattctccagggcaaatgaaggctacacgagctgcggcccggtagtcgagatgtcatggcagagggttggtgccctgctgctaggggctcagtcttgcctgcctgtcccgggggttccggccgtaggcgggattgggtcgatgtacacctctgatcagagtataatctattcgaatagccgagccctcggttatgggcaagccgagcaatgtacccaaatggccggcagcgtcacccgtcgtggtttggacatgactggcttcgtcttggagctgcggggcatgtgcgtggtcttagggtatccacacggagtggactaccaggccaggacgcttccggatcaggagggagacgacgcggagccccacgctggttgggaggtcaccgcagtgatcctctccggctctcccgagcggacttcgctggcagtcaccgcgggtggagactccttccccgccgcttgccagaacgccgctctcctcgccatcggcacccttcaccagcgctacccggatgagttgcagcactcgccctatcgctaccaccctcgtcgcggaggagcctgcgaccacgccaccttccgggatgctagctcggaggatgacgctaccatcgtgcacctggcgcgcatggtggaggcgtacgacgcggctcgtatcgacttccatcagatggtgcgccgcgggatggtcgagaacaacatgaagatcctggagctgcgtcaggagaacctgcagctcaagaaggacctcgacgcagtggaggcgcagctgcatcagctcaagatcgcccagggagagatctgccgccccaagcgtcgccgcgtctgccgcagtcagaagatcaccgcccgcaagagcacctccaggcccgagcttgttcgtcagtccctggcgtggacttgcttcgtcgagacccctcgtgccgagcctgcgcccgtggttccccaggagggggaagccttccggcgttggtagcacggagggtgcgctgttgctcaccttccgtcctggcccgtcgcagcagtagacgagcagttagtaggcttgcgcatggtgacgaccaggagaaacgctgctaccggtgatggcaatcaacctgaaggcagcaaccacaaccaccaaggcaatccacctccacctcctcctccgcctccaccaccaccaccagacaccaatgccattctcacccaaatcctcgcccagcaagccaacatgatgaccgctttcctccaccacctccaaaatccgccacaacagaatgctccaccaccacctccccaacactctaaactcgccgagttcctccgcatccgcccacctaccttctccagctccaacaaccccgtggatgctttggattggttgcatgccgtggggaagaagttagacacggtgcagtgcagcgatgaggagaaagtcgtcttcgccgcccaccagctgcggggacccgcatctctatggtgggaccatttccaggctacgcagccaggggagcaacctattacttgggctcgcttcaccgccgctttccggagaacccatgtgcccgctggagtcgtggctcttaagaaaagggaattccgagagttgaagcaaggcaaccgctccgtgatggagtatttgcacgagttcaacaacttggcccgttacgccccagaggatgtgcgggaagatgaggagaagcaagagaagttcctggcaggaatggaccccgagctgtccgtccgcctagtctctggggactatccggattttcaacgattggtggacaagagcatccgcttggaagccaagcacaaggagctggaatcgcacaagcgccgcttggcgaatttccgcaatcaacagggtgctaaccagagggttcgctacaccaatccctatccagggggatcctcctcgcagcagcaacaacagcagcagcaacctcgctccgcgcctcgacctcaattcgtggtgcgcgtcccacagccgcagcagcagcagaatcagcaagggactcgtgcgccccgtcctcttacgccaacggtgcagcctggtcaaggccgcagggacgcttcaggtccgcagcgtctgtgcttcaactgcttcgagcccgggcactttgcggataaatgcccaaagccaaggcgtcagcaaggccaagcgcctccccgctccaacaacggcgggaaggatgtcattcggggtcgtgtgaatcacgtgacggccgaggacgtgctgacaactccggacgtcatcgttggtacgttcctcgttcattccatccctgctacaattttgttcgactctggagcttcccactcgtttatatctgtgccattcgtggggagaaatcagttgggggtagaaaggcttaggaaccctctgctcatcaccacccctggaggggttatgacagcaaagtattatagtcctgccgtccctatagaaattcaggggattccttttccctcggatctgattctgctagacaccaagaacttggatgtgattcttgggatgaattggttggctcaattccaaggagtagtggattgcgcaagacgcactgtcactctgtaccgagggccagaacaaccggttgttttctttgcacccccaacctctgtcagaagttcagaacttcatcagatagaactgtcagaaatccccatcgtcagagagttcggagacgtgtttccggaagaactacctggtatgccgcccaagcgagagattgagttccgaatagatcttgctccaggaaccactcctctgcacaagcgaccctaccgtatggcagcaaatgaactagccgaagtaaagaaacagttggaagaattgaaagaaaaggggtatatacgtccgagtacttccccatggggtgctcctgtgatttttgtagagaagaaagacaagacgaagaggatgtgcgtcgactacagagctctcaatgaagtcaccatcaagaacaagtaccctcttccccggatcgatgatctgttcgaccaactcaaaggtgccactgtattctccaagattgatctccgttccggatatcaccaactacgtattcgtgaagaagatattccaaagaccgcattcaccacgcgatacaggctgtatgaattcacggtgatgtcgttcggtttgaccaatgcgcctgccttcttcatgaacttgatgaacaaagtgttcatggaatacttggataagtttgttgtggttttcattgatgacattctgatatactcacaatcagaggaagaccatcaacaccatctccgtctggtgttgggaaagttgcgggaacatcaattgtatgccaagcttagcaagtgtgagttctggttgtccgaagtcaaattcttagggcacgtgatatctgctaaaggagttgctgtggatcccgaaacagtgaccgccgtcaccgattggaagcaacccaagacagttactcaagtccgcagtttcttaggtttggcaggatactatcggagattcatcgagaacttctccaaaatcgctcgacccatgacacagttgttgaagaaagaagagaaatttgtgtggagcccgcaatgcgagaaggcgtttcaaactctcaaggaaaagctggtttcctcgccggtgttaatcttgccggatactcgcaaggacttcatggtgtattgtgatgcttcgcgccaaggattggggtgcgtgctcatgcaggacggttatgtggtagcctatgcctcacgccagctacgtcctcatgaaggcaactaccctacacatgatttggagttagccgcagtagttcatgctctaaaaatctggcggcactatctcattgggaatcgctgtgaaatctataccgaccataagagtctgaaatacatcttcactcagtcggacctgaatcttcggcaaaggagatggttagaactcatcaaggattatgatgtgggaattcactatcatcctggtaaggccaacgtggttgccgacgctctaagtcgaaagggccattgcaacactcttaacgtccgaggcattccacccgaacttaaccaacagatggaagccctgaatctaagcatagtgggtcgtggattcttagctgcattggaagccaagcccaccttgctcgatcaaatccgcgaggctcagaagaatgatccggacatgcatggactcctcaagaatatgaaacagggtaaggccgctggtttcacagaggatgaacacggaaccctatggaacggaaagcgggtatgcgttccagataacagagaacttaaacagctgatacttcaggaagctcacgaaagtccttattccattcacccgggcagtacaaagatgtacttagacttaagggagaaatactggtgggttagcatgaagcgggaaattgcagagtatgtggccctatgtgatgtgtgccagcgtgtcaaggcagaacaccaacgaccggccggacttctccaacctctccaagtacctgaatggaaatgggatgaaattgggatggatttcatcaccggacttccaaagacccaaggtggatatgattctatatgggtagttgtggatcgattaaccaaggtagctcgatttattcctgtgaagaccacctatggagggaacaagctagctgaactctacttcgccaggatcgtgagtctccatggcgttcccaagaaaatcgtatctgatcggggaagccaattcacctctcacttttggaagaagctccaagaagagttgggtacccgattaaatttcagcaccgcctatcacccgcagacagatggacagaccgagcgtctaaatcagatcctagaagatatgcttcgcgcatgtgtactagatttcgggaagacctgggataagagtctcccctatgccgagttctcctacaataacagctatcaagccagcatacaaatggcaccatatgaagcgttgtatgggcgcaaatgtcggacaccgctattgtgggaccaagttggagaaagtcaagtgttcgggactgatatcctgagagaagctgaagctaaagtcagaatcattcgggataatctaaaggtggcacagtcccggcagaaaagttatgcagataaccgtcgccgtgacctggaattcgcagtggatgattttgtgtatcttcgagtcacgccattgcgaggtgtacacaggtttcagacgaaagggaagcttgcacctcggtatgtgggtcctttccgtatcgttgctcgacgcggagaagtcgcttaccagttggagctacccgcctccttgggcaacgtgcatgatgtgttccatgtgtcgcaactcaagaaatgccttcgagtgccatccgagcaggccgactcagagcaaattgaagttcgtgaagatttgacctacgtggagaggccagtgaaaatcctggacatcatggagcgcaggaccaggaaccgggtaatccgtttttgcaaggtccagtggagtaatcacgccgaagaagaagctacttgggagcgtgaagacgagctgaaggcagcccatcccggtctcttcgccagttcttccgaatctcggggtcgagattccgtt

SEQ ID NO: 14151 - DNA, 4057 bp, Oryza sativa
  Clone ID: TFbOSC26367j.C1.o1.np
cacctcggccatataaggaccggtcttcgggcctctgttgcaaagcactaccgtacttccacatgtctagtgggacaaatgaaggctacacgggctgcggttcggtagtcgagatgtcatggcacagggccggtgtcctgctgctaggggctcagtcctgcctacctgtcccgggagttccggccgtaggtgggattgggtcgatgtacacctctgatcagagtataatctattcgaatagccgcgccctcggttatgggcaagccgagcaatgtacccaaatggccggcagcgtcagccgtcgtggtttggacatgactggcttcgtcttggagctgcggggcatgtgcgtggtcctggggtatccacatggagtggactaccaggccaggccgcttccggagcaggactgtgacgatgcagagccccacgctggttgggaggtcactgcagtgatcctctctggctctcccgagcggacttcgctggcagtcaccacgggtggagattctttccccgccgcttgccagagcgccgctctcctcgccatcggcactcttcaccagcgatacccggacgagttgcagcactcgccctaccgctaccaccctcgccgcggaggagcccgcgactacgccaccttccgggatgctagctcggaggatgacgctaccctcgtgcacctggcgtgcatggtggaggcgtacgacgcggctcgtatcgacttccatcagatggtgcgccgtgggatggtcgagaacaacatgaagatcctggagctgcgtcaagagaatctgcagctcaagaaggacctagacgcagtggaggcgcagctgcatcagctcaagatcgcccagggagaggtctgccgccccaagcgtcgccgtgtctgccgcagccagaagatcaccgcccgcaagagcacctccaggcccgagcttgttcgtcagtccctggcgtggacttgcttcgtcgagacccctcgtgccgagcccgcgcccgtggttccccaggagggggaagcctccagcgttggtagcacggaggatgcgctgttgctcaccttccatggtgacgaccaggagaagtgctaacaccggtgatggcaaccaacctgaaggcagcaaccaccaccaccagggcagcccaccttcaccttcttcttcgccttcaccaccaccaccagataccaacgccattctcacccaaatcctcacccagcaggccaacatgatgactgctttcctccaccacatccaaaatccgccacaacataatgctccaccaccacccccacaacactctaaactcgccgagttcctgcgcatccgcccacctaccttctctagctccaacaaccccgtggatgcgttggattggttgcatgccgtggggaaaaagctggacactgtgcagtgcagcgatgaggagaaagtcatcttcgccgcccaccagctgcaggggcccgcatctctatggtgggaccatttccaggctacgcagccagaggggcaacctattacttggacccgtttcaccgccgctttccggagaacccatgtgcccgccggagtcgtggcccttaagaaaagagaattccgagagttgaagcaaggcaaccgctccgtgatggagtatttgcatgatttcaacaacctggcccgttacgccccggaggatgtgcgggaagatgaggagaagcaagagaagttcttggcaggaatggaccctgagctgtccgtccgtctagtctccggggactatccggatttccaacgtctggtggacaagagcatccgcttggaagccaagcacaaggaactggagtggcacaagcgccgcttggcgaatttccgcaaccaacagggtgctaaccaaagggtccgctacaccaatccctatccagggggatcctcctcgcagcagcaacaacaacagcagcaacctcgctccgcgcctcgacctcaattcgtggtgcgcgtcccacagccgcagcaacagcagagtcagcaagggactcgtgcgcctcgtcctcctacgccaactgtgcagcctggccaaggccgcagggacgcttcaggtccgcagcgtctgtgcttcaactgcttcgagcccgggcactttgcggataaatgcccaaagccgaggcgtcagcaaggccaagcgcctccccgctccaacaacggtgggaaggatgtcattcggggtcgggtgaaccatgtgacggccgagaaggtgttgacaactccagacgtaatcgttggtacgttcttcattcattccatccctgctaccattttgttcgactctggagcttcccactcgtttatatctgtgccattcgtggggagaaatcagttggggatagaaaggcttaggaaccctctgctcatcaccacccctggaggggttatgacagcaaagtattatagtcctgccgtccctatagaaattcagggaattccttttccctcggatttgattctgctagacaccaagaacttggatgtgatccttgggatgaattggttggctcaattccaaggagtagtggattgcgcgagacgcactgtcaccctgtaccgagggccggaacaaccgattgttttctttgcacccccaacctctgtcagaagttcagaacttcatcagataggactgtcagaaatccccatcgtcagagagttcggagacgtgtttccagaagaactacccggtatgccgcccaagcgagagattgagttccggatagatcttgctccaggaaccactcctctgtacaagcgaccctaccgtatggcagcaaatgaactggccgaagtcaagaaacagttggaagagttgaaagaaaaggggtatataggtccgagtacttccccctggggtgctcctgtgatttttgtggagaagaaagacaagacgaagaggatgtgcgttgactacagagctctcaatgaagtcaccatcaaaaacaagtaccctcttccccggatcgatgatctgttcgatcagcttaaaggtgccactgtattctccaagatcgatcttcgttccggatatcaccaattacatattcgtgaagaagatattccgaagaccgcattcaccacgcgatacggactgtatgaattcacggtgatgtcgttcggtttaaccaatgcacctgccttcttcatgaacttaatgaacaaagtgttcatggaatacttggataagtttgttgtggttttcattgatgacattctgatatactcacaatccgaggaagaccatcagcaccatctccgtctggtgttgggaaagttacgggaacatcaattgtatgccaaacttagcaagtgtgagttctggttgtccgaagtcaaattcttagggcacgtgatatctgctaaaggagttgcggtggaccccgaaacagtgaccgccgtcactgattggaagcaacccaagacagtcactcaagtccgcagtttcttaggtttggcaggatactaccgaaggtttatcgagaacttctccaaaatcgctcgacccatgacacagttgttgaagaaagaagagaaatttgtgtggagcccgcaatgcgagaaggcgttcaaaaccctcaaagaaaagctggtttcctcaccagtgttaatcttgccggatactcgcaaggatttcatggtgtattgtgacgcttcgcgccaaggattggggtgcgtgctcatgcaggatggtcatgtggtggcctatgcctcacgccagctacggcctcatgaaggcaactaccctacccatgatttggagttagctgcggtggttcatgctctaaaaatctggcggcactatctcattgggaatcgctgtgaaatatatactgatcataagagcttgaaatacatcttcacccaatcggatctgaatcttcggcaaaggagatggttagaactcatcaaggattatgatgtgggaatttgtcaccggcccggtagtcgagatgtcatggcacagggccggtgtcctgctgctgggggctcagtcctgcctacctgtcccgggggttccggccgtaggt

SEQ ID NO: 14152 - DNA, 3028 bp, Oryza sativa
  Clone ID: TFbOSC27415j.C1.o3.gm
atggagccgagatcgccgcgccggtttccttcccctccggccgccctctctcactcccaacactatttaagcactccctgtgcctccctcctccgtttccgacccttgccgctttctttccccgtcggaatcgagctcgcgccgtcgtcctctctctccgccgtcgccgccgagcttcggttcgccgccgtcgtcgccccggacctcctcccgcttcggcatcgcctcctttggcttcgccgcgtcctcgtcgacctcgtccaccccttcgtttcgcccgccgaccgccggaacgccgccgtcctcgtcgacccgagccgcgccgccgcctctctccgcttcggtcgccgttcccgtcgtcgcagtcgacccggggtgagccgaggaccgccatttcgcttcccccttccctcccctctctcgggcgccgctccgtcgcgccggaggtcgccgccggtgaccatcggggcgcgggcgcgccgcctcccgtcggccgtgccggcgaggccgccttcgggcgcgccctgcggctgccatgtggggcccggccgtcagccgcccgcgccctcgggtgcggctgacgcgtgggacccacggcgccggccggcgcaagccgcgtgcacccggtccaccgtggaccgtgaggctgccgcgtgggccccactcccgtggacccgggcaaatgaaggctacacgagctgcggcccggtagtcgagatgtcatggcacagggccggtgtcctgctgctaggggctcagtcctgcctgcctgtcctgggggttccggccgtaggtgggattgggtcgatggccggcagcgtcacccgtcgtggtttggacatgactggtttcgtcttggagctgcggggcatgtgcgtggccctggggtatccacacggagtggactaccaggccaggccgcttccggagcaggagggtgacgatgcagagccccacgctgcttgggaggtcactgcagtgatcctcgctggctctcccgagcggacttcgctgacagtcaccgcgggtggagactctttccccgccgcttgccagagcgccgctctcctcgccatcggcactcttcaccagcgctacccggacgagttgcagcactcgccctaccgctaccaccctcgtcgcggaggagcccgcgaccacaccaccttccgggatgctagctcggaggatgacgctaccatcgtgcacctggcgcgcatggtggaggcgtacgacgcggctcgtatcgacttccatcagatggtgcgccgtgggatggtcgaggacaacctgaagatcctggagctgcgtcaagagaacctgcagctcaagaaggacctggacgcagtggaggcgcagctgcatcagctcaagatcgcccagggagagatctgccgccccaagcgtcgccgcgtctgccgcagcctgaagatcaccgcccgcaagagcacctccaggcccgagcttgttcgtcagtccctggcgtggacttgcttcgtcgagacccctcgtgccgagcccgcgcccgtggttccccaggagggggaagcctccggcgttgatggtgatgaccagagaagtgctaacaccggtgatggcaaccaacctgaaggcagcaaccacaaccatcagggcaacccacctccacctcctcctctgcctccaccaccaccaccagacaccaacgccattctcacccaaatcctcgcccagcaggccaacatgatgactgctttcctccaccacctccaaaatccgccacaacttaatgctccaccaccacccccacaacactctaaactcgccgagtttctccgcatccgcccacctaccttctctagctccaacaaccccgtggatgcgttggattggttgcatgccgtggggaaaaagctagacactgtgcagtgcagcgatgaggagaaagtcatcttcgccgcccaccagctgcagggacccgcatctctatggtgggaccatttccaggctacgcagccagagggacagcctattacatgggctcgcttcaccgccgttttccgaagaacccatgtgcccgccggagtcgtggcccttaagaaaagggaattccgagagtggaagcaaggcaaccgctccgtgatggagtatttgcacgagttcaacaacctggcccgttacgctccggaggatgtgcgggaagatgaggagaagcaagagaagttcctggcaggaatggaccctgagctgtccgtccgtctagtctccggggattatccggatttccaacgtctggtggacaagagcatccgcttggaagccaagcacaaggaactggagtcgcacaagcgccgcttggcgaatttccgcaaccaacagggtgctaaccaaagggtccgctacaccaatccctatccagggggatcctcctcgcagcagcaacaacagcagcagcaacctcgctccgcgcctcgacctcaattcgtggtgcgcgtcccacagccgcagcagcagcagaatcaacaagggactcgtgcgccccgtcctcctccaccgactgtgcagcctggtcaaggccgcagggacgctcaaggtccgcagcgtctgtgcttcaactgcttcgagcccgggcactttgcggataaatgcccgaagccaaggcgtcagcaaggccaagcgcctccccgccccaacaacggtgttaaggacgtcattcggggtcgtgtgaaccatgtgacggccgaggacgtgctgacaactccagacgtcatcgttgaaattcccatcgtcagagagttcggagacgtgtttccggaagaactacctggtatgccgcccaagcgagagattgagttccggatagatcttgctccaggaaccgctcctctgtacgagcgaccctaccgtatggcagcaaatgaactggccgaagttaaaaaacagttggaagagttgaaagaaaagggagctctcaatgaagtcaccatcaaaaacaagtaccctcttccccggatcgatgatctgttcgatcagcttaaagcgtgccacg

SEQ ID NO: 14153 - DNA, 3652 bp, Oryza sativa
  Clone ID: TFbOSC28701j.C1.o1.gm
atggagtatttgcacgagttcaacaacctggcccgttacgctccggaggatgtgtgggaagatgaggagaagcaagagaagttcctggcaggaatggaccctgagctgtccgtccgtctagtctccggggattatccggatttccaacgtctggtggacaagagcatccgcttggaagccaagcacaaggaactggagtcgcacaagcgccgcttggcgaatttccgcaaccaacagggtgctaaccaaagggtccgctacaccaatccctatccagggggatcctcctcgcagcagcaacagcagcagcagcaacctcgctccgcgcctcgacctcaattcgtggtgcgcgtcccacagccgcagcagcagacgaatcaacaagggactcgtgcgccccgtcctcctccaccgactgtgcagcctggtcaaggccgcagggacgctcaaggtccgcagcgtctgtgcttcaactgcttcgagcccgggcactttgcggataaatgcccgaagccaaggcatcagcaaggccaagcgcctccccgccccaacaacggtggtaaggacgtcattcggggtcgtgtgaaccatgtgacggccgaggacgtgctgacaactccagacgtcatcgttggtacgttcctcattcattccatccctgctaccattttgttcgactctggagcttcccactcgtttatatctgtgccattcgtggggagaaatcagttgggggtagaaaggcttaggaaccctctgctcatcaccacccctggaggggttatgacagcaaagtattatagccctgccgtccctatagaaattcaggggattccttttccctcggatctgattctgctagacaccaagaacttggatataggactgtcagaaattcccatcgtcagagagttcggagacgtgtttccggaagaactacctggtatgccgcctaagcgagaggttgagttccggatagatcttgctccaggaaccgctcctctgtacaagcgaccctaccgtatggcagcaaatgaactggccgaagtcaaggaacagttggaagagctgaaagaaaaggggtatatccgtccgagtacttccccctggggtgctcctgtgatttttgtggagaagaaagacaagacgaaaaggatgtgcgttgactacagagctctcaatgaagtcaccatcaaaaacaagtatcctcttccccgaatcgatgatctgttcgatcagcttaaaggtgccactgtattctccaagattgatcttcgttccggatatcaccaattgcgcattcgtgaagaagatattccgaagaccgcattcaccacgcgatacagactgtatgaattcacggtgaagtcattcggtttaaccaatgcacctgccttcttcatgaacttaatgaacaaagtgttcatggaatacttggataagtttgtggtggtttttattgatgacatcctgatatactcacaatcagaggaagaccatcagcaccatctccgtctggtgttgggaaagttgcgggaacatcaattgtatgccaaacttagcaagtgtgagttctggttgtccgaagtcaaattcttagggcacgtgatatctgctaaaggagttgctgtggaccccgaaacagtgaccgccgtcactgattggaagcaacccaagacagtcactcaagtccgcagtttcttaggtttggcaggatactaccggagattcatcgagaacttctccaaaatcgctcgacccatgacacagttgttgaagaaagaagagaaatttgtgtggagcccgcaatgcgagaagacgttcaaaactctcaaagaaaagctggtttcctcgccagtgttaatcttgccggatactcgcaaggatttcatggtgtattgtgacgcttcgcgccaaggattggggtgcgtgcttatgcaggacggtcatgtggtggcctatgcctcacgccagctacggcctcatgaaggcaattaccctacccatgatttggagttagccgcggtggttcatgctctaaaaatctggcggcactatctcattgggaatcgctgtgaaatatatactgatcataagagtttgaaatacatcttcactcagtcggacctgaatcttcggcaaaggagatggttagaactcatcaaggattatgatgtgggaattcactatcatcctggtaaggccaacgtggttgccgacgctctaagtcgaaaaagccattgcaacactcttaacgtccgtggcgttccacccgaacttaatcaacagatggaagccctgaacctaagcatagttagtcgcggattcttggctgcgctggaagccaagcccaccttgctcgatcaaatccgcgaggctcagaagaatgatccagacatgcatggactcctcaagaatatgaaacagggtaaagccgctggtttcacagaggatgaacacggaaccctatggaacggaaatcgagtatgcgttccagttaacagagaacttaaacagctgatacttcaggaagctcacgaaagtccttattccatccaccctggcagcacgaagatgtacttagacttgaaggagaaatactggtggattagtatgaagcgggaaattgcagagttcgtggccctttgtgatgtgtgccagtgtgtcaaggcagagcaccaacgaccggccggacttctccaacctctccaagtacctgaatggaaatgggatgaaattgggatggatttcatcaccggacttccaaaaacccaaggtggatatgattctatatgggtagttgtggatcgattaaccaaggtagctcgattcattcctgtgaagaccacctatggagggaacaaactagccgaactctacttcgctaggatcacagatgggcagaccgagcgtctaaatcagatcctagaagatatgctccgcgcatgtgttctagatttcgggaagacctgggataagagtctcccctatgccgagttctcctacaacaacagctatcaagccagcatacaaatggcaccttatgaagcgttgtatgggcgcaaatgccggacaccgctaatgtgggatcaagttggggaaagccaagtgttcgggactgatatcctgagagaagctgaagctaaagtcagaaccattcgggataatctaaaggtggcacagtcccggcagaaaagttatgcagataaccgtcgccgtgatctggaattcgcagtggacgattttgtatatcttcgggtcacgccattgcgaggtgtacacaggtttcggacaaaagggaagctcgcacctcggtatgtgggtcctttccgtatcgttgctcgacgcggagaagtcgcttaccaattggagctgcccgcctccttgggcaacgtgcatgatgtgttccatgtgtcgcaactcaagaaatgccttcgagtgccatccgagcaggccgactcagagcaaattgaagttcgcgaagacttgacctacgtggagaggccagtgaagatcctggacaccatggagcgcaggaccaggaaccgggtaatccgtttttgcaaggtccagtggagcaaccacgccgaagaagaagctacttgggagcgtgaagacgagctgaaggcagcccatcctgatctcttcgcca

SEQ ID NO: 14154 - DNA, 2981 bp, Oryza sativa
  Clone ID: TFbOSC28999j.C1.o1.np
atggcggccggacctcccgcgccggtttcctcccttccccggccaccctctctcgacccggctctatttaaaccctccccgctcctcctccttcagtttccgcctctcgccgcccttcctcctcgccggaatcaaggtcgcgccgtcgctctctccctccgccgtcgccatcgagctccggtccgccgccgtcgtcgtcccggatcacctcccacctcggcgccgcctccttcggctttgccgcatcctcgccgacctcgtccacccctccgtttcggtcgccgaccgccggaacgccgtcgaccccgtcgactcgagccgcgccgccgccttcctccgctccggccgcctttttcgtcgtcgccgtcgacctagggtgagccgtggaccgccgcttcttttcccccttcccttcccctctctcggccgccgctccgccgtgcctatggccgccgccggcgaccataggggcgcgggcgccgcctcccgccggccgcaccggcttggccgccctcgggcgcaccgagtggctgccgcgtggggcccggccgtcagccgcccgcgcccttaggtgcggctgacgcgtgggacccacggtgccggccggtgtgagcccgggtgcacccggtccaccgtggacccacctcggccatataaggaccggtcttcgggcctctgttgcaaagcactaccgtacttccacatgtctagtgggacaaatgaaggctacacgagctgcggcccggtagtcgagatgtcatggcacagggccggtgtcctgctgctaggggctcagtcctgcctacctgtcccgggggttccggccgtaggtgggattgggtcgatgtacacctctgatcagagtataatctattcgaatagccgcgccctcggttatgggcaagccgagcaatgtacccaaatggccggcagcatcaatcgtcgtggtctggacctgactggcttcgttttggagctgcggggcatgtgcgttgtcctggggtatccgcatggagtggactaccagggcaagcagctcccggagcaggagggtgacgatgcagagccccacgctgcttgggaggttactgcagtgatcctcactggctcacccgagaggacttcgttggcagtcaccgcgggtggagattccttctccgccgcttgccagaacgccgcactcctcgccatcggcactcttcaccagcgctacccggacgagttgcagcactcgccctaccgctaccaccctcgccgcggaggagcccgcgactacgccaccttccgggatgctagctcggaggatgacgctaccatcatgcacctagcgcgcatggtggaggcgtacgacgcggcccgtatggacttccatcagatggtgcgccgcgggttggtcgagaacaacatgaagatcctggagctgcgtcaggagaatctgcagctgaagaaggacctagacgtagtggaggcgcagctgtgtcagctcaagatcgcccagggagaggtctgtcgccccaagcgtcgccgcgtctgccgcagcctgaagatcaccgcccgcaagagtacctccaggcccgagcttgttcgtcagtccctggcgtggacctgcttcgtcgagacccctcgtgccgagcccgcgcccgtggttcctcaggaggatggagtctccggcgttggcagcacggaggatgcgctgctgctcaccttccatggtgacaaccaggagaagtgctgctaccggtgatggcaaccaacccgtaggcagcaaccacaacaaccatggcagcccacctccacctcctcccccgcctccaccaccaccactagacaccaacaccatcctcacccaaatcatcgcccagcgggccaacatgatggctgctttcctccaccacatccaaaatccgccacaacataatgctccaccaccacccccacaacactctaaactcgccgagttcctccgcatccgtccacctaccttctctagctccaataaccccgtggatgctttggattggttgcatgccgtggggaaaaagttagacaccgtgcagtgcaacgatgaggagaaagtcatctttgccgctcactaactgcaggggcccgcatctctatggtgggaccacttccaggctacgtagccagaggggcagcctattacttgggcccgcttcaccgcctctttccagagaacccatgtgcccgtcggagtcatggcccttaagaaaagggaattctgagagttgaagcaaggcaaccgctccatgatggagtatttgcatgagtttaacaacctggcccggtacgccccggaggatgttcgtgaagatgaggagaagcaagagaagttcttggcaggaatggaccctgagctgtccgtgcgtctggtctccggggactatccggatttccaacgtctggtggacaagagcatccgcttggaagccaagcacaaggaactggagtcgcacaagcgtcgcttggcgaatttccgcaaccaacagggggctaaccaaagggtccgctacaccaatccctatccagggggatcctcctcgcagcagcagcagcagcagcaacctcgctccacgtcccgacctcaattcgtggtgcatgtcccacagccgcagcaacagcagagtcagcaagggactcgtgcgccccgtcctcctacgccagccgtgcagcctgttcaaggccgcagggacgctcaaggtcagcagcgtctgtgcttcaactgcttcgagcctgggcactttgcggataaatgcccaaagccgaggtgccagcaaggccaagcgcctccccgctccaacaacggtggtaaggatgtcattcggggtcgtgtgaaccacgtgacggccgagaacgtgctgacaactccagacgtcatcgttggtacgttcctcattcattccatccctgctaccattttttttaaatgaatatttgcgaatttcttcatttaaattttaatt

SEQ ID NO: 14155 - DNA, 4617 bp, Oryza sativa
  Clone ID: TFbOSC29926j.C1.o5.fg
atgtcatggcacagggccggtgtcctgctgctaggggttcagtcctgcctgcctgtcccgggggttccggccgtaggtgggattgggtcggtactcttgtctatggctaggatgggttggaaactatgtcacgtctttcgtctgtataccgtggtgatgttgacgaccaggagaagtgctgctaccggtgatggcaaccaacccgaaggcagcaaccaccaccaccagggcaggccaccttcacctcctcctacgcctccaccaccaccaccagacaccaacgccattctcacccaaatcctcgcccagcaggccaacatgatgactgctttcctccaccacctccaaaattcgccacaacataatgctccaccaccacctccccaacactctaaactcgccgagttcctccgcatccgcccacctaccttctctagctccaacaaccccgtggatgcgttggattggttgcatgccgtggggaaaaagctagacactgtgcagtgcagcgatgaggagaaagctacgcagccagaggggcaacctattacttgggctcgcttcaccgccgctttccggagaacccatgtgcccgccggagtcatggcccttaagaaaagggaattccgagagttgaagcaaggcaaccgctccgtgatggagtatttgcatgagttcaacaacctggcccgttacgccccggaggatgtgcgggaagatgaggagaagcaagagaagttcttggcaggaatggaccctgagctgtccgtccgtctagtctccggggactatccggatttccaacgtctggtggacaagagcatccgcttggaagccaagcacaaggaactggagtcgcacaagcgccgcttggcgaatttccgcaatcaacagggtgctaaccaaagggtccgctacaccaatccctatccagggggatcctcctcgcagcagcaacaacagcagcagcaacctcgctccgcgcctcgacctcaattcgtggtgcgcgtcccacagccgcagcagcagcagaatcaacaagggactcgtgcgccccgtcctcctacgccaactgtgcagcctggtcaaggccgcagggacgctcaaggtccgcagcgtctgtgcttcaactgcttcgagcccgggcactttgcggataaatgcccaaagccgaggcgtcagcaaggccaagcgcctccccgctccaacaacggtgggaaggatgtcattcggggtcgggtgaaccacgtgacggccgaggacgtgctgacaactccagacgtcatcgttggtacgttcctcattcattccatccctgctaccattctgttcgactctggagcttcccactcgtttatatctgtgccattcgtggggagaaatcagttgggggtagaaaggcttaggaaccctctgctcatcaccacccctggaggggttatgacagcaaagtattatagccctgccgtccccatagaaattcaggggattccttttccctcggatctgattctgctagacaccaagaacttggatgtgatccttgggatgaattggttggctcaattccaaggagtagtggattgtgcgagacgcactgtcactctgtaccgagggccggaacaaccggttgttttctttgcacccccaacctctgtcagtagttccgaacttcatcagataggactgtcagaaatccccattgtcagagagttcggagacgtgtttccggaagaactacccggtatgccgcccaaacgacagattgagttccggatagatcttgctccaggaaccacacctctgtacaagcgaccctaccgtatggcagcaaatgaactggctgaagttaagaaacagttggaagagttgaaagaaaaggggtatatacgtccgagtacttccccctggggtgctcctgtgatttttgtggagaagaaagacaagacgaagaggatgtgcgttgactacagagctctcaatgaagtcaccatcaaaaacaagtaccctcttccccggatcgatgatctgttcgatcagcttaaaggtgccactgtattctccaagatcgatcttcgttccggatatcaccaattacgtattcgtgatgaagatattccgaagaccgcattcaccacgcgatacggactgtatgaattcacggtgatgtcgttcggtttaaccaatgcacctgcctttttcatgaacttaatgaacaaagtgttcatggaatacttggataagtttgttgtggttttcattgatgacattctggtatactcacaatcagaggaagaccatcagcaccatctccgtctggtattgggaaagttgcgggaacatcaattgtatgccaaacttagcaagtgtgagttctggttgtccgaagtcaaattcttagggcacgtgatatctgctaaaggagttgctgtggaccccgaaacagtgaccgccgtcattgattggaaacaacccaagatagtcactcaagtccgcagtttcttaggtttggcaggatactaccggaggttcatcgagaacttctccaaaatcgctcgacccatgacacagttgttgaagaaagaagagaaatttgtgtggagcccgcaatgcgagaaggcgttcaaaactctcaaagaatggctggtttcctcgccagtgttaatcttgccggatactcgcaaggacttcatggtgtattgtgacgcttcgcgccaaggattggggtgcgtgctcatgcaggatggtcatgtggtggcctatgcctcacgccagctacggcctcatgaaggcaactaccctacccatgatttggagttagctgcggtggttcatgctctaaaaatctggcggcactatctcattgggaatcgctgtgaaatatatactgatcataagagtttgaaatacatcttcactcagtcggacctgaatcttcggcaaaggagatggttagaactcatcaaggattacgatgtgggaattcactatcatcctggtaaggccaacgtggtcgctgacgccctaagtcgaaagagccattgcaacactcttaacgtccgcggcattccacccgaacttaatcaacagatggaagccctgaacctaagcatagttggtcgcggattcttggctgcgttggaagccaagcctaccttgctcgatcgaatccgcgaggctcagaagaacgatccggacatgcatggactcctcaagaatatgaaacagggtaaagccgctggtttcacagaggatgaacacggaaccctatggaacggaaatcgagtatgcgttccagataacagagaacttaaacagctgatacttcaggaagcccacgaaagtccttattccatccaccctggcagtacgaagatgtacttagacttgaaggagaaatactggtgggttagtatgaagcgggaaattgcagagttcgtggccctttgtgatgtgtgccagcgtgtcaaggcagagcaccaacgaccggccggacttctccaacctctccaagtacctgaatggaaatgggatgaaattgggatggattttatcaccggacttccaaagacccaaggtggatatgattctatatgggtagtggtggatcgattaaccaaggtagctcgattcattcctgtgaagaccacctatggagggaacaaactagccgagctctacttcgcaaggatcgtgagtctccatggcgttcccaagaaaatcgtatctgataggggaagccaattcacctctcacttttggaagaagctccaagaagagctgggtacccgattaaacttcagcaccgcataccacccgcagacagatgggcagaccgagcgtctaaatcagatcctagaagatatgcttcgcgcatgtgtcctggatttcgggaagacctgggataagagtctcccctatgccgagttctcctacaataacagctatcaagccagcatacaaatggcaccttatgaagcgttgtatgggcgcaaatgccggacaccgctcttgtgggatcaagttggggaaagccaagtattcgggactgatatcctgagagaagctgaagctaaagtcagaaccattcgggataatctaaaggtggcacagtcccggcagaaaagttatgcagataaccgtcgccgtaacctggaattcgcagtggacgattttgtgtaccttcgggtcacgccattgcggggtgtacacaggtttcagacaaaagggaagctcgcacctcggtatgtgggtcctttccgtatcgttgcccgacgcggagaagtcgcttaccaattggacctgcccgcctccttgggcaacgtgcatgatgtgttccatgtgtcgcaactcaagaaatgccttcgagtgccatctgcgcaggccgactcagagcaaattgaagttcgcgaagacttgacctacgtggagaggccagtgaaaatcctggacaccatggagcgcaggaccaggaaccgggtaatccgtttttgcaaggtccagtggagcaaccacgccgaagaagaagctacctgggagcgtgaagacgagctgaaggcagcccatcctgatctcttcgccagttcttccgaatctcggggtcgagattccgtttaa

SEQ ID NO: 14156 - DNA, 2415 bp, Oryza sativa
  Clone ID: TFbOSC29969j.C1.o1.gm
atgtgcgtcgactacagagctctcaatgaggtcaccatcaaaaacaagtaccctcttccccggatcgatgatctgttcgatcagcttaaaggtgccactgtattctccaagattgatcttcgttccggatatcaccaattacgtattcgtgaagaagatattccgaagaccgcattcactacgcgatatggactgtatgaattcacggtgatgtcgttcggcttaaccaatgctcctgccttcttcatgaacttgatgaacaaagtgttcatggaatacttggataagttcgttgtggttttcattgatgacattctgatatactcacaaacagaggaagaccatcagcaccatctccgtctggtgttgggaaagttgcgggaacatcaattgtatgccaagcttagcaagtgtgagttctggttgtccgaagtcaaattcttggggcacgtgatatctgctaaaggagttgctgtggaccccgaaacagtgaccgccgtcaccgattggaagcaacccaagacagtcactcagattcgcagtttcttgggtttggcaggatactatcggagattcatcgagaacttctccaaaatcgctcgacccatgacacagttgttgaagaaagaagagaagtttgtgtggagcccgcaatgcgagaaggcgttccaaactctcaaagaaaagctggtttcctcgcccgtgttaatcttgccggatactcgcaaggatttcatggtgtactgtgatgcttcgcgccaaggattggggtgcgtgctcatgcaggacggtcatgtggtagcctatgcctcacgccagctacgtcctcatgaaggcaactaccctacacatgacttggagttagcagcggtggttcatgctctaaaaatctggcggcactatctcattgggaaccgctgtgaaatatatactgatcataagagtttgaaatacatcttcacccagtcggatctgaatcttcggcaaaggagatggttagaactcatcaaggattatgatgtgggaattcactatcaccctggtaaggccaatgtggttgccgacgctctaagtcgaaagagccactgcaacactctcaatgtccgaggcattccacccgagcttaatcaacagatggaagccctgaacctaagcatagttggtcgcggatttttggccgcgttggaagccaagcccaccttgctcgatcaaatccgcgaggctcagaagaatgatccggacatgcatggactcctcaagaatatgaaacagggtaaagccgctggtttcacagaggatgaacacggaaccttatggaacggaaagcgggagaaatactggtgggtcagcatgaagcgggaaattgcagagtttgtggccctatgtgatgtgtgccagcgtgtcaaggcagaacaccaacgaccggccggacttctccaacctctccaagtgccggaatggaaatgggatgaaattgggatggatttcatcaccggccttccaaaaacccaaggtgggtatgattctatatgggtaatagtggatcgattaaccaaggtagctcgatttattcctgtgaagaccacctatggagggaacaaactagcggagctctacttcgctaggatcgtgagtctccatggcattcccaagaaaatcgtatctgataggggaagccaattcacctctcacttttggaagaagctccaagaagagctgggtactcgattgaattttagcaccgcctatcacccgcagacagatggacagaccgagcgtctaaatcagatcctagaagatatgctccgcgcatgtgtactagatttcgggaagacttgggataagagtctcccctatgccgagttctcctacaataacagctaccaagccagcatacaaatggcaccctatgaagcgttgtacgggcgcaaatgccggacaccgctattgtgggaccaagttggagaaagccaagtgttcgggactgatatcctgagagaagctgaagctaaagtcagaatcattcgggataatctaaaggtggcacagtctcggcagaaaagttatgcagataaccgtcgccgtgatctggaattcgcagtggatgactttgtgtaccttcgggtcacgccattgcgaggtgtgcacaggtttcagacaaaagggaagctcgcacctcggtatgtgggtcccttccgtatcatcgctcgacgcggagaagttgcttaccagctggagttgcccgcctccttgggtaacgtgcatgatgtgttccatgtgtcgcaactcaagaaatgtcttcgagtgccatccgagcaggccgactcagagcaaattgaagttcgcgaagacctgacgtatgtggagaagccagtgaaaatcctggacaccatggagcgcaggaccaggaaccgg

SEQ ID NO: 14157 - DNA, 5238 bp, Oryza sativa
  Clone ID: TFbOSC30011j.C1.o3.fg
atggatgaagtcgggggtcgatggacattctccagggcaaatgaaggctacacgagctgcggcccgatggccggcagcgtcacccgtcgtggtttggacatgactggcttcgttttggagctgcgaggcatgtgcgtggtcctggggtatccacacggagaggactaccaggccaggccgcttccggatcaggagggagatgacgcggagccccacgctgggtgggaggtcaccgcagtgatcctctctggctcccccgagcggacttcgctggcagtcaccgcgggtggagactccttccccgccgcttgccagaacgccgctctcctcgccatcggcacccttcaccagcgctacccggacgagttgcagcactcgccctaccgctaccaccctcgtcgcggaggagcccgcgactacgccaccttctgggatgctagctcggaggatgacgctaccatcgtgcacctggcacgcatggtggaggcgtacgacgcggctcgtatcgacttccatcagatggtacgccgcgggatggtcgagaacaacatgaagatcctggagctgcgtcaggagaacctgcagctcaagaaggacctcgacgcagtggaggcgcagctgcaccagctcaaggtcgcccagggagagatctgccgccccaagcgtcgccgtgtttgccgcagccagaagatcaccgcccgcaagagcacctccaggcccgagcttgtccgtcagtccctggcgtggacttgcttcgtcgagacccctcgtgccgagcctgcgcccgtggttccccaggagggggaagcctccggcgttggtagctcggaggcagtagacgagcagttagtaggcttgcgcgtgtgttctttctcgtttgtcttttttggagtcgtgtggggcatggttatgccgatggtgacgaccaggagaaatgctgttaccggtgatggcaaccaacccgaaggcagcaaccccaaccaccagggcaacccacctccacctcctcctccgcctccaccaccaccaccagacaccaacgccattctcacccaaatcctcgcccagcaagccaacatgatgaatgctttcctccaccacctccaaaatccgccacaacagaatgctccaccaccacccccacaacactctaaactcgccgagttcctccgcatccgcccacctaccttctccagctccaacaaccccgtggatgctttggattggttgcatgccgtggggaaaaagctagacacggtgcagtgcagcgatgaggagaaagtcgtcttcgccgcccatcagctgcagggacctgcatctctatggtgggaccacttccaggctacgcagccagagggacagccgattacttgggctcgcttcaccgccgctttccggagaacccatgtgcccgctggagtcgtggctcttaagaaaagggaattccgagagttgaagcaaggcaaccgctccgtgatggagtatttgcatgagttcaacaacctggcccgttacgctccggaggatgtgcgggaagatgaggagaagcaagagaagttcttggcaggaatggaccctgagctgtccgtccgtctagtctctggggactatccggattttcaacgactggtggacaagagcatccgcttggaagccaagcacaaggagctggaatcgcacaagcgccgcttggcgaatttccgcaatcaacagggtgctaaccaaagggttcgctacaccaatccctatccagggggatcctcctcgcagcagcagcaacagcagcagcaacctcgcccagcgccccgacctcaattcgtggtgcgcgtcccacagccgcagcagcagcagaatcagcaagggactcgtgcgccccgtcctcctacgccaactgtgcagcccgttcaaggccgcagggacgctcaaggtcagcagcgtctgtgcttcaactgcttcgagcccgggcactttgcggataaatgcccaaagccaaggcgtcagcaaggccaagcgcctccccgctccaacaacggcgggaaggatgtcattcggggtcgtgtgaatcacgtgacggccgaggacgtgctgacaactccagacgtcatcgttggtacgttcctcgttcattccatccctgctacaattttgttcgactctggagcttcccactcgtttatatctgtgccattcgtggggaaaaatcagttgggggtagaaaggcttagaaaccctctgctcatcaccacccctggaggggttatgacagcaaagttttatagccctgccgtccctatagaaattcaggggattccttttccctcggatctgattctgctagacaccaagaacttggatgtgattcttgggatgaattggttggcacaattccaaggagtagtggattgcgcgagacgcactgttactctgtaccgagggccggaacaaccggttgttttctttgcacccccaacctctgttagaagttcagaacttcatcagatagaactgtcagaaattcccatcgtcagagagttcggagacgtgtttccggaagaactacctggtatgccgcccaagcgagagattgagttccgaatagatcttgctccaggaactactcctctgcacaagcgaccctaccgtatggcagcaaatgaactagccgaagtaaagaaacagttggaagagttgaaagaaaaggggtacatacgtccgagtacttccccatggggtgctcctgtgatttttgtagagaagaaagacaagacgaagaggatgtgcgttgactacagagctctcaatgaagtcaccatcaaaaacaagtaccctcttccccggatcgatgatttgttcgatcagcttaaaggtgccactgtattctccaagattgatctccgttccggatatcaccaattacgtattcgtgaagaagatattccgaagaccgcattcaccacgcgatacgggctgtatgaattcacggtgatgtcgttcggtttgaccaatgcacctgccttcttcatgaacttaatgaataaagtgttcatggaatacttggataagtttgttgtggttttcattgatgacattctgatatactcacaatcagaggaagaccatcagcaccatctccgtctggtgttgggaaagttgcgggaacatcaattgtatgccaagcttagcaagtgtgagttctggttgtccgaagtcaaattcttagggcacgtgatatctgctaaaggagttgctgtggatcccgaaacagtgaccgccgtcaccgattggaagcaacccaagacagttacccaagtccgcagtttcttaggtttggcaggatactatcggagattcatcgagaacttctccaaaatcgctcgacccatgacacagttgttgaagaaagaagagaaatttgtgtccagcccgcaatgcgagaaggcgttccaaactctcaaggaaaagctggtttcctcgccggtgttaatcttgccggatactcgcaaggacttcatggtgtattgtgatgcttcgcgccaaggattggggtgcgtgctcatgcaggacggtcatgtggtagcctatgcctcacgccagctacgtcctcatgaaggcaactaccctacacatgatttggagttagccgcagtagttcatgctctaaaaatctggcggcactatctcattgggaatcgctgtgaaatctataccgaccataagagtctgaaatacatcttcactcagtcggacctgaatcttcggcaaaggagatggttagaactcatcaaggactatgatgtgggaattcactatcatcctggtaaggccaacgtggttgccgacgctctaagtcgaaagggccattgcaacactcttaacgtccgtggcattccacccgaacttagtcaacagatggaagccctgaacctaaacatagttggtcgtggatttttggccgcgttggaagccaagcccaccttgctcgatcaaatccgcgaggctcagaagaatgatccggacatgcatggactcctcaagaatatgaaacagggtaaagccgctggtttcacagaggatgaacacggaaccctatggaacggaaatcgggtatgcgttccagataaccgagaacttaaacagctgatacttcaggaagctcacgaaagtccttattccatccaccctggcagtacaaagatgtacttagatttgaaggagaaatactggtgggttagcatgaagcgggaaattgcagagtttgtggccctgtgtgatgtgtgccagcgtgtcaaggcagagcaccaacgaccggccggacttctccaaccactccaagtacctgaatggaaatgggatgaaattgggatggatttcatcaccggacttccaaaaacccaaggcggatatgattctatatgggtagttgtggatcgattaaccaaggtggctcgatttattcttgtgaagaccacctatggagggaacaaactagcggagctctacttcgctaggatcgtgagtctccacggcgttcccaagaaaatcgtatctgataggggaagccaattcacctctcacttttggaagaagctccaagaagagctgggtactcgattgaatttcagcaccgcctatcacccgcagacagatggacagaccgagcgtctaaatcaaattctagaagatatgctccgcgcatgtgtactagatttcgggaagacctgggataagagtctcccctatgccgagttctcctacaataacagctatcaatccagcatacaaatggcaccatatgaagcgttgtacgggcgcaaatgccggacaccgctcctgtgggaccaagttggggaaagccaagtgttcgggactgatatcctgagagaagctgaagctaaagtcagaatcattcgggataatctaaaggtggcacagtcacggcagaaaagttatgcagataaccgtcgccgtgacctggaattcgcagtggatgattttgtgtatcttcgagtcacgccattgcgaggtgtccacaggtttcagacgaaagggaagcttgcacctcggtatgtgggtcctttccgtatcgttgctcgacgcggagaagtcgcttaccagttggagctgcccgcctccttgggcaacgtgcatgatgtgttccatgtgtcgcaactcaagaaatgccttcgagtgccatccagcagaccgactcagagcaaattgaagttcgcgaagatttga

SEQ ID NO: 14158 - DNA, 4150 bp, Oryza sativa
  Clone ID: TFbOSC30068j.C1.o1.fg
ggcgaattcgagctcggtacccggggatcctctagagtcgacctgcaggcatgccgtggggaagaagctagacacggtgcagtgcagcgacgaagagaaagtcatcttcgccgcccaccagctgcaggggcccgcatctctctggtgggaccacttccaggctacgcagccagaggggcagccgatcacttgggctcgcttcaccgccgctttccggagaacccatgtgcccgccggagtcgtggctctcaagaagagggaattccgagagttgaagcaaggcaaccgctccgtgatggagtatttgcacgagttcaacaacttggcccgttacgcccctgaggatgtgcgggaagatgaggagaagcaagagaagttcttggcaggaatggaccccgagctgtctgttcgtctagtctctggggactatccggattttcaacgactggtggacaagagcatccgcttggaggccaagcacaaggagctggaatcgcacaagcgccgcttggcgaacttccgcaatcagcagggtgctaaccagagggtccgctacaccaatccctatccagggggatcctcctcgcaacagcaacaacagcagcagcaacctcgcccagcgccccgacctcaattcgtggtgcgcgtcccacagccgcagcagcagaatcagcaagggactcgtgcatcccgtcctcctacgccagctgtgcagcccgttcaaggccgcagggacgcttcaggtccgcagcggctgtgcttcaactgcttcgagcccggacactttgcggataaatgcccaaagccaaggcgtcagcaaggccaagcgcctccccgctccaacaacggcgggaaggatgtcattcggggccgtgtgaatcatgtgacggccgaggacgtgctgacaactcccgacgtcaccgttggtacgttcctcgtccattccatccctgctacaattttgttcgactctggagcttcccactcgtttatatctgtgccattcgtggggaaaaatcagttgggggtagaaaggcttagaaaccctctgctcatcaccacccctggaggggttatgacagcaaagtattatagccctgccgtccctatagaaattcaggggattccttttccctcggatctgattctgctagacaccaagaacttggatgtgatccttgggatgaattggttggcccaattccaaggagtagtggattgcgcgaggcgcactgtcactctgtaccgaggaccagaacaaccggttgttttctttgcacccccaacctctgtcagaagttcaaaacttcatcagatagaactgtcagaaattcccatcgtcagagagttcggagacgtgtttccggaagaactacctggtatgccgcccaagcgagagattgagttccggatagatcttgctccaggaaccactcctctgtacaagcgaccctaccgtatggcagcaaatgaactggccgaagtaaagaaacagttggaagagttgaaagaaaaggggtacatacgtccgagtacttccccatggggtgctcctgtgatttttgtagagaagaaagacaagacgaagaggatgtgcgtcgactacagagctctcaatgaagtcaccatcaaaaacaagtaccctcttccccggatcgatgatctgttcgatcaactcaaaggtgccactgtattctccaagattgatctccgttccggatatcaccaattacgtattcgtgaagaagatattccgaagaccgcattcactacgcgatatggactgtatgaattcacggtgatgtcgttcggcttgaccaatgctcctgccttcttcatgaacttaatgaacaaagcgttcatggaatacttggataagttcgttgtggttttcatcgatgacattctgatatactcacaatcagaggaagaccatcagcaccatctccgtctggtgttgggaaagttgcgggaacatcaattgtatgccaagcttagcaagtgtgagttctggttgtccgaagtcaaattcttggggcacgtgatatctgctaaaggagttgctgtggaccccgaaacagtgaccgccgtcaccgattggaagcaacccaagacagtcactcagattcgcagtttcttgggtttggcaggatactaccggaggttcatcgagaacttctccaaaatcgctcgacccatgacacagttgttgaagaaagaagagaagtttgtgtggagcccgcaatgcgagaaggcgttccaaactctcaaagaaaagctggtttcctcgccagtgttaatcttgccggatactcgcaaggatttcatggtgtattgtgatgcttcgcgccaaggattggggtgcgtgctcatgcaggacggtcatgtggtagcctatgcttcacgtcagctacgacctcatgagggcaactaccctacgcatgacttggagttagcagcggtggttcatgctctaaaaatctggcggcactatctcattgggaaccgctgtgaaatatatactgatcacaagagcttgaaatacatattcacccagtcggatctgaatcttcggcaaaggagatggttagaactcatcaaggattatgacgtgggaatacactatcaccctggtaaggctaacgtggttgccgacgctctaagtcggaagagccattgcaatactctcaacgttcgaggcattccacccgagcttaatcaacagatggaagccctgaacctaaacatagttggtcgtggattcttggctgcgttagaagccaagcccaccttgctcgatcaaatccgcgaggctcagaagaatgatccggacatgcatggactcctcaagaatatgaaacagggtaaagccgctggtttcacagaggatgaacacggaaccttatggaacggaaagcgggtatgcgttccagatagcagagaacttaaacagctgatacttcaggaagctcacgaaagtccttattccattcacccgggcagtaccaagatgtacttagacttgaaggagaaatactgcgtgtcaaggcagagcactagcgaccggctggacttctccaacctctccaagtaccagaatggaaatgggatgaaattgggatggatttcatcaccggacttccaaaaacccaaggtagctcgattcattcctgtgaagaccacctatggaggacacaagctagccgagctctacttcgctaggatcgtgagtctccatggcgttcccaagaaaatcgtatctgataggggaagccaattcacctctcacttttggaagaagctccaagaagagcttggtacccgactaaatttcagcaccgcgtatcacccgcagacagatggacagaccgagcgtctaaatcagatcttagaagatatgcttcgcgcatgtgtcctggacttcgggaagacttgggataagagtctcccctatgccgagttctcctacaataacagctatcaagccagcatacaaatggcaccttatgaagcgttgtatgggcgcaaatgccgaacaccgctattgtgggaccaagttggagaaagccaagtgttcgggactgatatcctgagagaagctgaagctaaagtcagaatcattcgggataatctaaaggtggcacagtctcggcagaaaagttatgcagataaccgtcgccgtgatctggaattcgcagtggatgattttgtgtaccttcgggtcacgccattgcgaggtgtgcacaggtttcagacaaaagggaagctcgcacctcggtatgtgggtccctttcgtatcactgctcgacgcggagaagtcgcttaccagctggagctgcccgcctccttgggcaacgtgcatgatgtgttccatgtgtcgcaactcaagaaatgtcttcgagtgccatccgagcaggccgactcagagcaaatcgaagttcgcgaagatttgacgtatgtggagaagccagtgaaaatcctggacaccatggagcgcaggaccaggaaccgggtaatccgtttttgcaaggtccagtggagcaaccacgccgaagaagaagctacttgggagcgtgaagacgagctgaaggcagcccatcccgatctcttcgccagttcttccgaatctcggggtcgagattccgtttaa

SEQ ID NO: 14159 - DNA, 1162 bp, Oryza sativa
  Clone ID: TFbOSC30470j.C1.o1.fg
atggcaatcaacctgaaggcagcaaccacaaccaccagggcaacccacctccacctcttccttcggcctccgccaccaccaccagacaccaacgccattctcacccaaatcctcgcccagcaagccaacatgatgactactttcctccaccacctccaaaatccgccacaacagaatgctccacctccacctccccaacactctaaactcgccgagttcctccgcatccgcccacctaccttctctagctccaacaaccccgtggatgcgttggattggttgcatgccgtggggaaaaagctggacactgtgcagtgcagtgatgaagagaaagtcatcttcgccgcccaccagctgcagggacccgcatctctatggtgggaccacttccaagctacgcagccagagggacagcctattacatgggctcgcttcaccgccgctttccggagaacccatgtgcccgccggagtcgtggccctcaagaaaagggaattccgagagttgaagcaaggcaaccgctccgtgatggagtatttgcatgagttcaacaacctggcccgttacgctccggaggatgtgcgggaagatgaggagaagcaagagaagttcctggcaggaatggaccccgagctgtccgtccgtctagtctctggggactatccggatttccaacgtctggtggacaagagcatccgcttggaagccaagcacaaggaactggagtcgcacaagcgccgcttggcgaatttccgcaatcaacagggtgctaaccaaagggtccgctacaccaatccctatccagggggatcctcctcgcagcagcaacaacagcagcagcaacctcgctccgcgcctcgacctcaattcgtggtgcgcgtcccacagccgcagcagcagcagaatcaacaagggactcgtgcgccccgtcctcttacgccagccgtgcagcctggtcaaggccacagggacgctcaaggtcagcagcgtctgtgcttcaactgctttgagcccgggcactttgcggataaatgcccgaagccaaggcgtcagcaaggccaagcgcctccccgctccaacaacggtggcaaggacgtcattcggggtcgtgtgaatcacgtgacggccgaggacgtgctgacaactccagacgtcatcgttg

SEQ ID NO: 14160 - DNA, 1956 bp, Oryza sativa
  Clone ID: TFbOSC30764j.C1.o2.gm
atgatgaatgctttcctccaccacctccaaaatccgccacaacagaatgctccaccaccacctccccaacactctaaactcgccgagttcctccgcatccgcccacctaccttctctagctccaacaaccccgtggatgcgttggattggttgcatgccgtggggaagaagttagacacggtgcagtgcagcgatgaggagaaagtcgtcttcgccgcccaccagctgcagggacccgcatctctatggtgggaccatttccaggctacgcagccagaggggcaacctattacttgggctcgcttcaccgccgctttccgaaggacccatgtgcccgctggagtcgtggcacttaagaaaagagaattccgagagttgaagcaaggcaaccgctccgtgatggagtatttgcacgagttcaacaacttggcccgttacgccccagaggatgtgcgggaagatgaggagaagcaagagaagttcttggcaggaatggaccctgagctgtccgtccgtctagtctctggggattatccggattttcaacgactggtggacaagagcatccgcttggaagccaagcacaaggaactggagtcgcacaagcgccgcttggcaaatttccgcaatcagcagggtgctaaccagagggtccgctacaccaatccctatccagggggatcctcctcgcagcagcaacaacagcagcagcaacctcgctccgcgcctcgacctcaattcgtgtctggtcaaggccgcagggacgcttcaggtccgcagcgtctgtgcttcaactgcttcgagcccgggcactttgcggataaatgcccaaagccaaggcgtcagcaaggccaagcgcctccccgctccaacaacggcgggaaggatgtcattcggggtcgtgtgaatcacgtgacggccgaggacgtgctgacaactccggacgtcatcgttggtacgttcctcgtgcattccatccctgctaccattttgttcgactctggagcttcccactcgtttatatctgtgccgttcgtggggagaaatcagttgggggtagaaaggcttagaaaccctctgctcatcaccacccctggaggggttatgacagcaaacaccgcctatcacccgcagacagatgggcagaccgagcgtctaaatcagatcctagaagacatgcttcgtgcatgtgtactagatttcgggaagacctgggataagagtctcccctatgccgagttctcctacaataacagctatcaagccagcatacaaatggcaccttatgaagcgttgtacgggcgcaaatggcggacaccgctattgtgggaccaagttggagaaagccaagtgttcgggactgatatcctgagagaagctgaagctaaagtcagaatcattcgggataatctaaaggtggcacagtcccggcagaaaagttatgcagataaccgtcgccgtgacttggaattcgcagtggatgactttgtgtaccttcgggtcacgccattgcgaggtgtacacaggtttcagacgaaagggaagctcgcacctcggtatgtgggtcctttccgtatcgttgctcgacgcggagaagtcgcttaccagttggagctgcccgcctccttgggcaacgtgcatgatgtgttccatgtgtcgcaactcaagaaatgccttcgagtgccatccgagcaggccgactcagagcaaattgaagttcgtgaagatttgacctacgtggagaggccagtgaaaatcctggacaccatggagcgcaggaccaggaaccgggtaatccgtttttgcaaggtccagtggagcaatcacgccgaagaagaagctacttgggagcgtgaagacgagctgaaggcagcccatcccgtcgtgacagcaaatcagggtcactctgtggctgacgactatgaaatgcttctgggtgagtactggcaaacctga

SEQ ID NO: 14161 - DNA, 546 bp, Oryza sativa
  Clone ID: TFbOSC31097j.C1.o1.fg
atggaccccgagctgtctgttcgtctagtctctggagactacccggacttccaacgtctggtggacaagagcatccgcttggaggccaagcacaaggagctggagtcgcacaagcgccgcttggcgaacttccgcaatcagcagggtgctaaccagagggtccgctacaccaatccctacccagggggatcctcctcgcagcagcaacaacagcagcagccacctcgctccgcgcctcgacctcaattcgtggtgcgcgtcccacagcagcaacagcagcagaatcagcaagggactcgtgcgccccatcctcctacgccagctgggcagcccgttcaaggccgcagggacgcttcaggtccgcagcggctgtgcttcaactgcttcgaacccgggcactttgcggacaaatgcccgaagccaaggcgtcagcaaggccaagcgcctccccgccccaacaacggtggccaggacgtcatccgtggtcgtgtgaatcacgtgacggccgaggacgtgctgacaactcccgacgtcatcgttgcttaa

SEQ ID NO: 14162 - DNA, 1929 bp, Oryza sativa
  Clone ID: TFbOSC31430j.C1.o1.fg
atgactggcttcgtcttggagctgcggggcatgtgcgtggtcttggggtatccacatggagtggattaccaggccaggccgctcccggagcaggagggtgaggatgcagagcctcacgctggttgggaggtcactgcagtgatcctctccggctctcccgagcggacttcgctggcagtcaccgcgggtggggactccttccccgccgcttgccagaacgccgctctcctcgccatcggcacccttcaccagcgctacccggacgagttgcagcactcgccctaccgctaccaccctcgtcgcggaggagcccgcgacttcgccaccttccgagacgccagctcggaggatgacgctaccgtcgtgcacctggcacgcatggtggaggcatacgacgcagctcgtatcgacttccatcagatggtgcgtcgtggcatggtggagaacaacatgaagatcctggagctgcgtcaggagaacctgcagctcaagaaggacctcgacgcgttggaggcgcagctgcaccagctcaagatcgcccagggagaggtcagccgtcccaagcgtcgccgcgtctgccgcagccagaagatcaccgcccgcaagagcacctccaggccagagcttgtccgtcagtccctggcgtggacctgcttcgtcgagacccctcgtgccgagcctgcgcccgtggttccccaggagggggaagcctccggcgttggtagctcggagggtgcgctgttgctcaccttccgtcctggcccgtcgcagcggagaaatgttaacaccggtgaaggcaaccaacccgagggcagcaaccccaacccccaaggcaacccacctccaccaccaccaccagacaccaacgccattctcacccagatcctcgcccaacaagccaacatgatgaatgctttcctccaccacctccaaaacccgccacaacagaatgctccaccaccccctccccaacactccaaactcgccgagttcctccgcatccgcccacctaccttctctagctccaacaaccctgtggatgctttggattggttgcatgccgtggggaagaagctagacacggtgcagtgcagtgatgaggagaaagtcgtcttcgccgcccatcagctgcagggacccgcatctctctggtgggaccacttccaggctacgcagccagagggacagccgattacttgggcccgcttcaccgccgccttccggagaacccatgccccggaggatgtgcgggaagatgaggagaagcaggagaagttcttggcaggaatggaccctgagctgtctgttcgtctagtctctggggactatcctgattttcaacgactggtggacaagagcatccgcttggaggccaagcacaaggaactggaatcgcacaagcgccgcttggcgaacttccgcaatcagcagggtgctaaccagagggtccgctacaccaatccctatccagggggatcctcctcgcagcagcagcagcagcagcaacctcgcccagcgccccgacctcaattcgtggtgcgcgtcccacagccgcagcagcagcagaatcagcaagggactcgtgcgccccgtcctcctacgccaactgtgcagcccgttcaaggccgcagggacgctcaaggtcagcagcgtctgtgcttcaactgtttcgagcccgggcactttgcggataaatgcccgaagccaaggcgtcagcaaggccaagcgcctccccgctccaacaacggcgggaaggatgtcatccgtggtcgtgtgaatcacgtgacggccgaggacgtgctgacaactccagacgtcatcgttgagaagaaagacaagacgaagaggatgtgcgttgatgtcacgaccggaaataacccaacgggcattccttacgtgcgtgcattaatccttgtcccaggaggcaag

SEQ ID NO: 14163 - DNA, 933 bp, Oryza sativa
  Clone ID: TFbOSC31430j.C1.o3.fg
atggctcttaagaaaagggaattccgggagttgaagcaaggcaaccgctccgtgatggagtatttgcatgagttcaacaacctggcccgttacgccccagaggatgtgcgggaagatgaggagaagcaggagaagttcttggcaggaatggaccctgagctgtctgttcgtctagtctctggggactacccggactttcaacggctggtggacaagagcatccgcttggaagccaagcacaaggagctggaatcgcacaagcgccgcttggcaaacttccgcaatcaacagggtgctaaccagagggtccgctacaccaatccctatccagggggatcctcctcgcagcagcagcaacagcagcagcaacctcgcccagcgccccgacctcaattcgtggtgcgcgtcccaccgccgcagcagcagcagaatcagcaagggactcgtgcaccccgtcctcctacgccaactgtgcagcccgttcaaggccgcagggacgctcaaggtcagcagcgtctgtgcttcaactgtttcgagcccgggcactttgcggacaaatgcccgaagccaaggcgtcagcaaggccaagcgcctccccgctccaacaacggtggcaaggatgtcatccgtggtcgagtgaatcacgtgacggccgaggacgtgctgacaactccagacgtcatcgttggagttgctgtggaccccgaaacagtaaccgccgtcaccgaatggaagcaacccaagacagttactcagattcgcagtttcttaggtttggcaggatactaccgaagcgtgtcaaggcagaacaccaacgaccggctggacttctccagcctctccaagtgccggaatggaaatgggatgaaattgggatggatttcatcaccggccttccaaaaacccaaggtggatatgactctatatgggtaa

SEQ ID NO: 14164 - DNA, 5782 bp, Oryza sativa
  Clone ID: TFbOSC31890j.C1.o1.np
atgtcggccagacgtcccggccggtttccttcctctcccggccgccctctcccccttccaaccctatttaaaccctcctgacacctccttcgctcgtttccaccctttgccgtgccttctcctcgccggaatcgagctcgcgccgtcgctctctctctcctccgtcgccgacgacgtccggccggccttctccgctcgccgggaccgtctcccgccccggcgtcgcctcctccggcttcacggcaccgccgccgtccccgtccaccccctcgtcgagctcgccgaccgccgaagcaccgccatccccgtcgacccgagccgcgccgccgccttcctccgctccggccgcctttttcgtcgtcgccatcgacctagggtgagacgtggaccaccgcctcttttcccccttcccttcccctctctcggccgccgctccgccgtgcctatggccgccgccggcgaccataggggcgcgggcgccgcctcccgccggctgcgccgtcgtggccaccttcgggcgcgccgagtggccaccgcgtggggcccggccgtcagccgcccgtgccctcgggtgcggcagacgcgtggggcccacggcgccggtcagtgcgagcccgggtgcgcccggtctaccatggacccacctcggccacataaggaccggtcttcaggcctctgttgcaaagcactaccgtacttccacatgtctagtggggcaaatgaaggctacacgagctgcggcccggtagtcgagatgtcatggcacagggctggtgtcctgctgctaggggctcagtcttgcctacctatcctggaggttccggccgtaggtagggttgggtcgatgtacacctctgatcagagtataacctattcgaatagccgcgccctcggttatgggcaagcctagcaatgtacccaaatggccggcagcctcaaccgtcgtggcctggacctgactggcttcgttttggagctgcggggcatgtgcgttgtcctggggtatccgcatggagtggactaccagggcaagcagctcccggagcaggagggtgacgatgcagagccccacgctgcttgggaggtcactgcagtgatcctcactggctcacccgagaggacttcgttggcagtcaccgcgggtggagattctttctccgccgcttgccagaacgccgcactccttgccatcggcactcttcaccagcgctacccggacgagttgcagcactcgccctaccgctaccacccttgtcgaggaggagcccgcgactacgccaccttcagggatgctagctcggaggatgatgctaccatcatgcatctggcgcgcatggtggaggcgtacaacgcggcccgtatcgacttccatcgtatggtgcgccgtgggttggtcgagaacaacatgaagatcctggagctgcgttaggagaatttgcagctgaagaaggacttggacgcggtggaggcgcagctgtgtcagctcaagatcgcccagggagaggtctgtcgccccaagcgccgccgcgtctgccgcagcctgaagatcaccgcccgcaagagtacctccaggcctgagcttgttcgtcagtccttggcatggacttgcttcgtggagacccctcgcgccgagcccacgccctcggttcctcaggaggagggagcctctggtgttggtagcacggaggatgtgctgttgcttaccttccatggtgacaaccaggagaagcgcggttaccggcaaaggcaatcaccccgaaggcagcaaccacagcaaccatggcaggccaccttcaccttcttccccgccaccaccaccaccacctgacaccaaccccatcctcacccaaatcctcgcccagcaggccaacatgatggctgctttcctccaccacatccaaaatccgccacagcataatgctccacctccaccaccacccccgcaacattctaaactcgccgagttcctccgcatccgcccgcctaccttctctagctccaataaccccgtggatgccttggattggttgcatgccgcggggaaaaagttagacaccgtgcagtgcaacgatgaggagaaagtcatctttgccacccaccagctgcaggggcccgcatctctatggtgggaccacttccaggctacgcagccagaggggtagcctattacctgggcctgcttcaccgccgctttccggaggacccatgtgcccgccggagtcatggcccttaagaagagggaattccgggagttaaagcaaggcaaccactctgtgatggagtatttgcatgagtttaacagcctggcccggtacgccccagaggatgtttgggaagatgaggagaagcaggagaaattcctggcagggatggaccctgagctgtctgtgcgtctggtctccggggattatccggatttccagcgtctggtggacaacagcattcgcctggaagccaagcacaaggaactggagtcgcacaagcgtcgcttggcaaatttccgcaatcaacagggggctaaccaaatgatccgatacaccaatccctatccagggggatcctcctcgcagcagcagcagcaaccacgctccgcgccccgacctcaattcgtggtgcgtgtcccacagtcgcagcaacagcagagtcagcaaggtacccgtgcgccccgtcctcctgcgccagccgtgcagcttggacaaggccgcagggatgctcaaggtcaacaacgtctgtgcttcaactgcttcgagcccgggcactttgcggataaatgcccaaagccgaggcgccagcaaggccaagcgcctccccgacccaacaacggtggtaaggatgtcactcggggtcgtgtgaaccacgtgactgccgaggatgtgctgacaactccagacgtcatcgttggtacgttcctcattcattccatccctgctaccattttgttcgactctggagcttcccactcgtttatatctgtgccattcgtggagagaaattagctgagggtagaaaggcttaggaaccctctgctcatcaccacccttggaggggtaatgacagcaaagtattatagccctgccgttcctatagaaatccagggaattcctttcccctcggatttgattcttctagacaccaagaacttggatgtgatcctcgggatgaattggttggctcaattccaaggagtagtggatcgcgcaagacgcactgtcactctgtatcgggggcctgatcaaccagttgttttctttgcacccccaacttccgccggcagttcagtacttaatcagctaggattgccagaaatacccatcgtcagtgagttcggtgacgtgtttccggaagaactacccagtatgccgccccagcgagagattgagttccagatagatcttgctccagggaccactcctctatacaagcgaccctaccgtatggcagcacatgaactggccgaagtcaagaaacagttggaagagttgaaagaaaaggggtatatacggccgagcacttccccctggggttctcccgtgatttttgtggagaagaaagacaagacaaagaggatatgcgttgactacagagctctcaatgaagttactatcaaaaaacaagtacgctcttccccggattgatgacctgttcgatcagcttaaaggtgccactgtattctccaagatcgatcttcgctccggatatcaccaattgcgtattcgtgaagaagatatcccgaagaccgcgttcaccacgcattatggactgtatgaattcacggtgatgtcgttcggtctaaccaatgcgcctgccttcttcatgaacttaatgaacaaagtgttcatggaatacttggataagtttgttgtggttttcattgacgacatcctggtgtacttacaatcagaggaagaccatcagcagcacctccgtctggcattgggaaagttgcgggaacatccattgtatgccaagcttagcaagtgtgagttctggttgtccgaagtcaagttcttagggcacgtgatatctgctaaaggagttgctgtggatcccgaaacggtgactgccgtcactgattggaagcaacccaagacagtcactcaggttcgcagctttttgggtttggcaggatactaccgaagattcatcgagaatttctccaaaattgctagacccatgacgcagttgctgaagaaggaagaaaaatttgtatggagcccgcaatgcgagaaagcattccaaactctcaaagaaaagctagtttcctcgccagtgttaatcttactggatactcgcaaggacttcctggtgtactgtgacgcttcgcgccaaggattggggtgcgtgttaatgcaggaaggtcatgtggtagcctatgcctcacgccagccacggccccatgaaggcaactaccctacccatgatttggagttggccgctgtggttcatgctctaaaaatctagcggcattatctcattggaaatcgctgcaaaatatataccgatcataagagtttgaaatacatcttcactcagtcggatctgaatcttcggcagagaaggtggttagagctcattaaggattatgatgtgggaatccattatcaccctggtaaggccaacgtggtcgcagacgcgctgagtcgaaaaagcagttgcaacactcttggcgtccgtggcattccaccggagcttaatcaacagttggaagccctgaacctaagcatcgttagccatggattcttggctacattggaagccaagcctaccttgctcgatcaaatccgcgaggcccagaagaatgatctagatatgcatgggatactcaagaatatgaaacagggtaaagccgctggtttcacagaagatgaacacggaaccctatggaacggaaatcgttgtgtcaaggcagagcaccaacgaccggccagacttctccaacctctccaagtaccagaatggaaatgggatgaaattgggatggatttcatcaccggacttccaaaaacccaaggcagatatgattctatatgggtagtcgtggaccgactaaccaaggtagctcggtttattcctgtgaagaccacctatggagggaacaaattagctgaactctacttcgctaggatcgtgagtctccatggcgttcctaagaaaattgtatctgatcagggaagccaattcacttctgacatctggaagaagctccaagaagagttgggtacccgattaaattttagcaccgcgtatcacccgcagacagatgggcagaccgagcgtctaaatcagatcctagaagatatgctccatgcatgtgttctagattttgggaagacctgggataagagtctcccctatgccgagttctcctacaataacagctaccaagccagcatacaaatggcaccttatgaagcgttgtatggccgcaaatgccagacaccactattgtgggaccaagttggggaaagccaagtgttcgggactgatatcctgagagaagctgaagctaaagtcagaaccattcgggataatctaaaggtggcacagtcccggcagaagagttatgcagatacccgacgccgtaacctggaattcgcagtggacgattttgtgtaccttcgggtcacgccattgcgaggagtacacaggtttcagatgaaagggaagctcgcacctcggtttgtgggtcctttccgcatcattgctcgacgcggagaagtagcttatcaattggagctgcccacatccttgggcaacgtgcatgatgtgttccatgtgtcgc

SEQ ID NO: 14165 - DNA, 3213 bp, Oryza sativa
  Clone ID: TFbOSC32968j.C1.o2.fg
atgtcatggcacagggccggtgtcctgctgctgggggctcagtcctgcctgcctgtcccgggggttccggccgtaggtgggattgggtcggtactcttgtctatggctaggatggattggaaactatgtcacgtcttccgtctgtataccgtggtgatggccggcagcgtcacccgtcgtggtttggacatgactggcttcgtcttggagctgcggggcatgtgcgtggtcttggggtatccacatggagtggactaccaggcccggccgcttccggagcaggagggtgacgatgcagagccccacgctggttgggaggtcactgcagtgatcctctctggctctcccgagcggacttcgctggcagtcaccgcgggtggagattctttccccgccgcttgccagaacgccgctctcctcgccatcggcactcttcaccagcgctacccggacgagttgcagcactcgccctaccgctaccaccctcgtcgcggaggagcccgcgactacgccaccttccgggatgctagctcggaggatgacgctaccatcgtgcacctggcgcgcatggtggaggcatacgacgcggctcgtatcgacttccatcagatggtgcgccgtgggatggtcgagaacaacttgaagatcctggagctgcgtcaggagaacctgcagctcaagaaggacctagacgcggtggaggcgcagctgcatcagctcaagatcgcccagggagaggactgccgccccaagcgtcgctgcgtctgccgcagccagaagatcaccgcccgcaagagcacctccaggcccgagcttgttcgtcagtccctggcgtggacctgcttcgtggagacccctcgtgccgagcccgcgcccgtggttccccaggagggggaagcctccggcgttggtagcacggaggatgcgctgttgctcaccttccgccctggcccgtcgcagcggagaaatgctaataccggtgatggcaaccaacctgaaggcagcaaccacaaccaccaaggcaacccacctccacctcctcctccgcctccacctccaccaccagataccaacgccattctcacccaaatcctcgcccagcaagccaacatgatgactgctttcctccaccacctccaaaatccgccacaacataatgctcccccaccacctccccaacactctaaactcgccgagttcctccgcatccgtccacccaccttctctagctccaacaaccctgtggatgcgttggattggttgcatgccgtggggaagaagctagacacggtgcggtgcagtgatgaggagaaagtcgtcttcgccgcccaccagctgcagggacccgcatctctatggtgggaccacttccaggctacgcagcccgaggggcaaccgattacttgggcccgcttcaccgccgctttccggagaacccatgtgcccgctggagtcgtggctcttaagaaaagagaattccgagagttgaagcaaggcaaccgctccgtgatggagtatttgcacgagttcaacaacttggcccgttatgctccggaggatgtgcgggaagatgaggagaagcaagagaagttcttggcaggaatggaccccgaactgtctgttcgtctagtctctggggactatcctgatttccaacgtctggtggacaagagcatccgcttggaggccaagcacaaggagctggagtcgcacaagcgccgcttggcgaacttccgcaatcagcagggtgctaaccagagggtccgctacaccaatccctacccagggggaacctcctcgcagcagcagcagcagcagcaacctcgcccagcgccccgacctcaattcgtggtgcgcgtcccacagccgcagcagcagcagaatcagcaagggactcgtgcgccccgtcctcctacgccaactgtgcagcccgttcaaggccgcagggacgctcaaggtccgcagcggctgtgcttcaactgcttcgagcccggacactttgcggataaatgtccaaagccaaggcgtcagcaaggccaagcgcctccccgctccaacaacggcgggaaggatgtcattcggggtcgtgtgaatcacgtgacggccgaggacgtgctgacaactccagacgtcatcgttggtacgttcctcgttcattccatccccgctacaattttgttcgactctggagcttcccactcgtttatatctgtgccattcgtggggagaaatcagttgggggtagaaaggcttagaaaccctctgctcatcaccacccctggaggggttatgacagcaaagtattatagccctgccgtccctatagaaattcaggggattccttttccctcggatctgattctgctagacaccaagaacttggatgtgattcttgggatgaattggttggctcaattccaaggagtagtggattgcgcgcggcgcactgtcactctgtaccgagggccagaacaaccggttgttttctttgcacctccaacctctgtcagaagttcagaactgcatcagataggtctgtcagaaatccccatagtcagagagttcggagacgtgtttccggaagaactacccggaatgccgcccaagcgagagattgagttccggatagatcttgctccaggaaccactcctctgtacaagcgaccctaccgtatggcagcaaatgaactggccgaagttaagaaacagttggaagagttgaaagaaaaggggtatatacgtccgagtacttccccctggggtgctcctgtgatttttgtggagaagaaagacaagacgaagaggatgtgcgttgactacagagctctcaatgaagtcaccatcaaaaacaagtatcctcttccccggatcgatgacctgttcgatcagcttaaaggtgccactgtattctccaagatcgatcttcgttccggatatcaccaattacgtattcgtgaagaagatattccgaagaccgcattcaccacgcgatacggactgtatgaattcacggtgatgtcgttcggtttaaccaatgcacctgccttcttcatgaacttaatgaacaaagtgttcatggaatacttggacaagtttgttgtggttttcattgatgacattctgatatactcacaatcagaggaagaccatcagcaccatctctgtcacatcctgatttttgtttcaggatttataaattatttaataaattaa

SEQ ID NO: 14166 - DNA, 3861 bp, Oryza sativa
  Clone ID: TFbOSC33328j.C1.o1.fg
atggcccttaagaaaagggaattccgagagttgaagcaaggcaaccgctccgtgatggagtatttgcatgagttcaacaacctggcccggtacgccccggaggatgtacgggaagatgaggaaaagcaggagaagttcttggcaggaatggaccctgagctgtccgtgcgtctagtctccggtgactatctggatttccaacgtctggtggacaagagcatccgcttggaagccaagcacaaggaactggagtcgcacaagcgccgcttggcgaatttccgcaatcaacagggagctaaccaaaggatccgctacaccaatccctatccagggggatcgtcctcgcaacagcaacagcagcagcaacctcgctccgcgccccgacctcaattcgtggtgcgcgtcccacagccgcagcaacagcagagccagcaagggacccgtgcgccccgtcctcctacgccagccgcgcagtctggtcaaggccgcagggacgttcaaggtccgcagcgtctgtgcttcaactgcttcgagcctgggcactttgcggataaatgcccaaagccgaggcgccagcaaggccaagcgcctccccgctcaaacaacggtggtaaggatgtcattcggggtcgtgtgaaccacgtgacggccgaggacgtgctgacgactccagacgtcatcgttggtacgttcctcattcattccatccctgctaccattttgttcgactctggagcttcccactcgtttatatctgtgccattcgtggggagaaatcagttgggggtagaaaggtttaggaaccctctcctcatcaccacccctggaggggttatgacagcaaagtattatagtcctgccgtccctatagaaattcaggggatcccttttccctcggatctgattcttctagacaccaagaacttggatgtgatccttgggatgaattggttggctcaattccaaggagtagtggattgtgcaagacgcactgtcactctgtaccgagggccggaacaaccggttgttttctttgcacctccaacctctgtcagtagttcagaacttcatcagataggactgtcagaaatccccatcgtcagagagttcggagacgtgtttccggaagaactacccgatatgccgcccaagcgagagattgagttccggatagatcttgctccaggaaccactcctctgtacaaacgaccctaccgtatggcagcaaatgaactggccgaagttaagaaacagttggaagagttgaaagaaaaggggtatatacggccgagtactttcccctggggtgctcctatgatttttgtggagaagaaagacaagacgaagaggatgtgcgttgactacagagctctcaataaagtcaccatcaaaaacaagtaccctcttccccggatcgatgatctgttcgatcagcttaaaggtgccacggtattctccaagattgatcttcgttccggatatcaccagttgcgcatccgtgaagaagatattccgaagaccgcattcaccacacgatacggactccatggtcacatcattctggtatactcacaatcagaggaagaccatcagcaccatctccgtctggtgttgggaaagttgcgggaacatcaattgtatgccaaacttagcaagtgtgagttctggttgtccgaagtcaaattcttagggcacgtgatatctgctaaaggagttgctgtggaccccgaaacagtgaccccgtcccgattggaagcaacccaagacagtcactcaaatccgcagtttcttaggtttggcaggatactaccggagttgttgaagaaaaaatataaatttgtgtggagcccgcaatgcgagaaggcgttcaaaactctcaaagaaaagctggtttcctcgccagtgttaatcttgccggatactcgcaaggacttcatggtgtattgtgacgcttcgcgccaaggattggggtgcgtgctcatgcaggaaggtcatgtggtggcctatgcctcacgccagctacggcctcatgaaggcaactaccctacccatgatttggagttagccgcggtggttcatgctctaaaaatctggcggcattatctcattgggaatcgctgtgaaatatatactgatcataagagtttgaaatacatcttcacccagtcggatctgaatcttcggcagagaagatggttagagctcatcaaggattatgatgtgggaatccactatcatcccggtaaggccaacgtggtcgtcgacgctctaagtcaaaaaagccattgcaacactcttaacgtccgtggcattccacccgaacttaatcaacagatggaagccctgaacctaagcatagttggtcgcggattcttggctgcgttggaggccaagcctaccttgctcgatcaaatccgcgaggctcagaagaatgatccggacatgcgtggactcctcaagaatatgaaacagggtaaagccgctggtttcacagaggatgaatacggaaccctatggaacggaaatcgggtatgcgttccagataacagagaacttaaacagctgatacttcaggaagctcacgaaagtccttattccatccaccctggcagtacgaagatgtacttagacttgaaggagaaatactggtgggttagtatgaagcgggaaattgcagagttcgtggccctttgtgatgtgtgccagcgtgtcaaggcagagcaccaacgaccggccggactcctccaacctctccaagtaccagaatggaaatgggatgaaattgggatggatttcatcaccggacttccaaaaacccaaggtggatatgattctatatgggtagttgtggaccgactaaccaaagtagctcggtttattcctgtgaagaccacctatggagggaacaaactagccgagctctacttcgctaggatcgtgagtctccatggcgttcctaagaaaattgtatctgataggggaagccaattcacctctcacttttggaagaagctccaagaagagctgggtacccgattaaatttcagcaccgcgtatcacccgcagacagatggacagaccgagcgtctgaatcagatcctagaagatatgcttcgcgcatgtgtcctagatttcgggaagacctgggataagagtctcccctatgccgagttctcctacaataacagctaccaagccagcatacaaatggcaccctatgaagcgttgtatggacgcaaatgccggacatcgctattgtgggaccaagttggggaaagccaagtgttcgggactgatatcctgagagaagctgaagctaaagtcagaaccattcgggataatctaaaggtggcacagtcctggcagaaaagttatgcagataaccgtcgccgtaacctggaattcgcagtggacgattttgtgtaccttcgggtcacgccattgcgaggtgtacacaggtttcagacgaaagggaagctcgcacctcggtatgtgggtcctttccgtatcgttgcccgacgcggagaagtcgcttaccagttggagctgcccgcctccttgggcaacgtgcatgatgtgttccatgtgtcgcaactcaagaaatgtcttcgagtgccatccgagcaggccgactcagagcaaattgaagttcgcgaagacttgacctacgtggagaggccagtgaaaatcctggacaccatggagcgcaggaccaggaaccgggtaatccgtttttgcaaggtccaatggagcaaccacgccgaggaagaagctacctgggagcgtgaagacgagctgaaggcagcccatcccgatctcttcgccagttcttccgaatctcggggtcgagattccgtttaa

SEQ ID NO: 14167 - DNA, 2007 bp, Oryza sativa
  Clone ID: TFbOSC34304j.C1.o5.fg
atgactggcttcgtcctggagctgcggggcatgtgcgtggtcttggggtatccacatggagtggattaccaggccaggccgctcccggagcaggagggtgaggatgcagagcctcacgctgggtgggaggtcactgcagtgatcctctctggctctcccgagcggacttcgctggcagtcaccgcgggtggggattcttctcccgccgcttgccagaacgccgctctcctcgccatcggcaccctccaccagcgctacccggacgagttgcagcactcgccctatcgctaccaccctcgtcgcggaggagcccgcgacttcgccaccttccgagatgctagcttggaggatgacgctaccgtcgtgcatctggcacgcatggtggaggcatacgacgcggctcgtatcgacttccatcagatggtgcgtcgcgggatggttgagaacaacctgaagatcctggagctgcgtcaggagaacctgcagctcaagaaggacctcgacgcattggaggcgcagctgcaccagctcaagatcgcccagggagaggacagccgccccaagcgtcgccgcgtctgccgcagccagaagatcaccgcccggaagagcacctccaggcccgagcttgttcgtcagtccctggcgtggacttgcttcgtcgagacccctcgtgccgagcctgcgcccgtggttccccaggagggggaagcctccggcgttggtagcacggaggatgcgctgttgctcaccttccgccctggcccgtcgcagcggagaaatgttagcaccggtgaaggcaaccaacccgaaggcagcaaccccaacccccaaggcaatccacctccaccaccaccaccagacaccaacgccattctcacccaaatcctcgcccagcaagccaacatgatgaccgctttcctccaccacctccaaaatccgccacaacagaatgctccaccaccacctccacaacactctaagctcgccgagttcctccgcatccgcccacccaccttctctagctccaacaatcccgtggatgcgttggattggttgcatgccgtggggaagaagctggacactgtgcagtgcagtgatgaagagaaagtcatcttcgccgcccatcagctgcaggggcccgcatctctatggtgggaccatttccaggctacgcagccagaggggcaaccgattacttgggcccgcttcaccgccgctttccggagaacccatgtgcccgccggagtcgtggctcttaagaagagggagttccgggagttgaagcaaggcaaccgctccgtgatggagtatttgcacgagttcaacagtctggcccggtacgctccggaggatgtgcgggaagatgaggagaagcaagagaagttcttggcgggaatggaccctgagctgtccgttcgcctagtctctggggactatccggacttccaacgtctggtggacaagagcatccgcttggaggccaagcacaaggagctggagacgcacaagcgccgcttggcgaacttccgcaatcagcagggcgctaaccagagggtccgctacaccaatccctatccagggggatcctcctcgcagcagcaacaacagcagcagcaacctcgctccgcgcctcgacctcaattcgtggtgcgcgtcccacagccgcagcagcagcagagtcagcaagggactcgtgtagcccgtcctcctacgccagttgtgcagcccgttcaaggccgcagggacgctcaaggtcagcagcgtttgtgcttcaactgcttcgagcccgggcactttgcggataaatgcccaaagccaaggcgtcagcaaggccaagcgcctccccgctccaacaacggtggcaaggacgtcattcggggtcgtgtgaaccacgtgacggccgaggacgtgctgacaactccagacgtcatcgttgagagttcggagatgtgtttccggaagaactacctggtatgccgcctaagcgagagattgagttccggatag

SEQ ID NO: 14168 - DNA, 1414 bp, Oryza sativa
  Clone ID: TFbOSC3431j.C1.o1.fg
atgaagatcctggagctgcggcaggagaacctgcagctcaagaaggacctcgacgcggtggaggcgcagctgcatcagctcaagatcgcccagggagaggtctgccgccccaagcgtcgccgcgtctgccgcagccagaagatcaccgcccgcaagagcacctccaggcctgagcttgttcgtcagtccctggcgtggacctgcttcgtcgagacccctcgtgccgagcccgcgcccgtggttccccaggagggggaagcctccggcgttggcagcaaccacaaccaccagggcaacccacctccacctcctcctccgcctccgccaccaccaccagacaccaacgccattctcacccaaatcctcgcccagcaagccaacatgatgactactttcctccaccacctccaaaatccgccacaacagaatgctccacctccacctccccaacactctaaactcgccgagttcctccgcatccgcccacctaccttctctagctccaacaaccccgtggatgcgttggattggttgcatgccgtggggaagaagctggacactgtgcagtgcagtgatgaagagaaagtcatcttcgccgcccaccagctgcagggacccgcatctctatggtgggaccacttccaagctacgcagccagagggacagcctattacatgggctcgcttcaccgccgctttccggagaacccatgtgctcgccggagtcgtggccctcaagaaaagggaattccgagagttgaagcaaggcaaccgctccgtgatggagtatttgcatgagttcaacaacctggcccgttacgctccggaggatgtgcgggaagatgaggagaagcaagagaagttcctggcaggaatggaccccgagctgtccgtccgtctagtctctggggactatccggatttccaacgtctggtggacaagagcatccgcttggaagccaagcacaaggaactggagtcgcacaagcgccgcttggcgaatttccgcaatcaacagggtgctaaccaaagggtccgctacaccaatccctatccagggggatcctcctcgcagcagcaacaacagcagcagcaacctcgctccgcgcctcgacctcaattcgtggtgcgcgtcccacagccgcagcagcagcagaatcaacaagggactcgtgcgccccgtcctcctacgccagccgtgcagcctggtcaaggccacagggacgctcaaggtcagcagcgtctgtgcttcaactgctttgagcccgggcactttgcggataaatgcccgaagccaaggcgtcagcaaggccaagcgcctccccgctccaacaacggtggcaaggacgtcattcggggtcgtgtgaatcacgtgacggccgaggacgtgctgacaactccagacgtcatcgttg

SEQ ID NO: 14169 - DNA, 3828 bp, Oryza sativa
  Clone ID: TFbOSC34810j.C1.o2.fg
atgtcatggcagagggttggtgccctgctgctagggggctcagtcctgcctgcctgtcccgggtgtcccggccgtagggggattgggtcggtactcttgtttatggctaggatgggttgggaactatgtcacgtcttccgtccgtataccgtggtgatggtgatgaccaggagaagtgctaacaccggtgatggcaaccaacctgaaggcagcaaccacaaccatcagggcaacccacctccacctcctcctccgcctccaccaccaccaccagataccaacgccattctcacccaaatcctcgcccagcaggccaacatgatgactgctttcctccaccacctccaaaatccgccacaacagaatgctccaccaccacctccccaacactctaaactcgccgagtttctccgcatccgcccacctaccttctctagctccaacaaccccgtggatgcgttggattggttgcatgccgtggggaaaaagctagacactgtgcagtgcagcgatgaggagaaagctacgcagccagagggacagcctattacatgggctcgcttcaccgccgctttccgaagaacccatgtgcccgccggagtcgtggcccttaagaaaagggaattccgagagttgaagcaaggcaaccgctccgtgatggagtatttgcatgagttcaacaacctggcccggtacgccccggaggatgttcgggaagatgaggagaagcaagagaagttcctggcaggaatggaccttgagctgtccgtgcgtccagtctccggggactatccggattttcaacgtctggtggacaagagcatccgcttggaagccaagcacaaggaactggagtcgcacaagcgtcgcttggcgaatttccgcaatcaacagggggctaaccaaagggtccgctacaccaatccctatccagggggatcctcctcgcagcagcagcagcaaccacgctttgcgccccgacctcaattcgtggtgcgcgtcccacagccgcagcacagcagagtcagcaagagacccgtgcgccccgtcctcctgcgcccgttgtgcagcctggtcaagagccgtagagacgttcaaggtcagcagcgtctgtgcttcaactgcttcgagccggggcactttgcggataaatgcccaaagccgaggcgccagcaaggccaagcgcctccccgccccaacaacggtggtaaggacgtcattcggggtcgtgtgaaccacgtgacggccgaggacatgctgacaactccagacgtcatcgttggtacgttcctcattcattccatccctgctaccattttgttcgactctggagcttcccactcgtttatatctgtgccattcgtggggagaaatcagttgggggtagaaaggcttaggaaccctctgctcatcaccacccctggaggggttatgacagcgaagtattatagtcctgccgtccctatagaaattcaggggattccttttccctcggatctgattctgctagacaccaagaacttggatgtgatccttgggatgaattggttggctcaattccaaggagtagtggattgcgcgagacgcactgtcactctgtaccgagggccggaacaaccggttgttttctttgcacccccaacctcagtcagaagttcggaacttcatcagataggactgtcagaaatccccatcgtcagagagttcggagacgtgtttccggaagaactacctggtatgccgcctaagcgagagattgagttccggatagatcttgctccaggaaccactcctctgtacaagcgaccctaccgtatggcagcaaatgaactggccgaagtcaagaaacggctggaagagttgaaagaaaaggggtatatacgtccgagcacttccccctggggtgctcccgtgatttttgtggagaagaaagacaagacgaagaggatgtgcgttgactacagagctctcaatgaagtcaccatcaaaaacaagtaccctcttccccggatcgatgatctgttcgatcagcttaaaggtgccactgtattttccaaaatggatcttcgttccggatatcaccaattacgtattcgcgaagaagatattccgaagaccgcattcaccacgcgttatggactgtatgaattcacggtgatgtcgttcggtctaaccaatgctcctgccttcttcatgaacttaatgaacaaagtgttcatggagtacttggataagtttgttgtggttttcattgacgacattctggtgtactcacaatcagatgaagaccatcaacagcatctccgtctggtgttgggaaagttacgggaacatcaattgtatgccaagcttagcaagtgtgagttcttgttgtccgaagtcaaattcttagggcacgtgatatctgctaaaggagttgcggtggaccccgaaacagtgaccgctgtcactgattggaagcaacccaagacagttactcaggttcgcaactttttgggtttggcaggatactaccggaggttcatcgaaaacttctccaaaatcgctcgacccatgacacagttgttgaagaaagaggaaaaatttgtgtggagcccgcaatgcaagaaggcgttccaaactctcaaggaaaagctggtttccttgccagttttaatcttaccggatactcgcaaggacttcatggtgtgctgtgatgcttcgcgccaaagattgggcgtgtcaaggcagagcaccaacgaccggccggacttctccaacctctccaagtacctgaatgaaaatgggatgaaattgggatggatttcatcaccggacttccaaagacccaaggtagctcgattcattcctgtgaagaccacctatggagggaacaaactagccgagctctacttcgctaggatcgtgagtctccatggcgttcccaagaaaatcgtatctgataggggaagccaattcacctttcacttttggaagaagctccaagaagagctgggtacccgattaaacttcagcaccgcgtatcacccgcagacagatgggcagaccgagcgtctaaatcagatcctagaagatatgcttcgcgcatgtgtcctggatttcgggaagacctgggataagagtctcccctatgccgagttctcctacaacaacagctatcaagccagcatacaaatggcaccttatgaagcgttgtatgggcgcaaatgccggacaccgctaatgtgggatcaagttggggaaagccaagtgttcgggactgatatcctgagagaagctgaagctaaagtcagaaccattcgggataatctaaaggtggcacagtcccggcagaaaagttacgcagataaccgtcgccgtgacctggaattcgcagtggatgattttgtatatcttcgggtcacgccattgcgaggtgtacacaggtttcggacaaaagggaagctcgcacctcggtatgtgggtcctttccatatcgttgctcgacgcggagaagtcgcttaccaattggagctgcccgcctccttgggcaacgtgcatgatgtgttccatgtgtcgcaactcaagaaatgtctccgagtgccatctgagcaggctgacccagagcaaattgaagttcgcgaagacttgacctacgtggagaggccagtgaaaattctggacaccatggagcgcaggaccaggaaccgggtaatccgtttttgcaaggtccagtggagcaaccacgccgaggaagaagctacctgggagcgtgaagacgagctgaaggcagcccatcctgatctcttcgcctgttcttccgaatctcggggtcgagattccgtttaa

SEQ ID NO: 14170 - DNA, 938 bp, Oryza sativa
  Clone ID: TFbOSC34815j.C1.o1.np
ccgctccgtgatggagtatttgcacgagttcaacaacctggcccgttacgctctggagaatgtgcgggaagatgagaagaagcaagagaagttcctggcaggaatggaccctgagctgtccgtccgtctagtctccggggactatccggattttcaacgtctggtggacaagagcatccgcttggagccaaacacaaggaactggagtcgcacaagcgtcgcttggcgaatttccgcaatcagcagggtgctaaccaaagggtccgctacaccaatccctatccagggggatcctcctcgcagcagcaacaacagcagcagcaacctcgctccgcgccccgacctcaattcgtggtgcgcgtcccacagccgcagcaacagcagagtcagcaagggactcgtgcgccccgtcctcctacgccaactgtacaacctggtcaaggccgcagggacgcttcaggtccgcagcgtctgtgcttcaattgcttcgagcccgggcactttgcggataaatgcccgaagccgaggcgacagcaaggccaagcgcctccccgctccaacaacggtggtaaggacgtcattcggtgtcgtgtgaaccacgtgacggccgaggacatgctgacaactccagacgtcatcgttggtacgttcctcattcattccatccctgctaccattttgttcgactctggagcttcccactcgtttatatctgtgccattcgtggggagaaatcagttgggggtagaaaggcttaggaaccctctgcttatcaccacccctggaggggttatgacagcaaagtattatagctctgccgttcctatagaaatccaggggattccttttccctcggatctaattcttctagacaccaagaacttggatgtgatccccgggatgaattggttggctcaattccaaggagtagtggattg

SEQ ID NO: 14171 - DNA, 5361 bp, Oryza sativa
  Clone ID: TFbOSC400024j.C1.o11.fg
atgtcatggcacagggccggtgtcctgctgctaggggctcagtcctgcctgcctgtcccgggagttccggccgtaggtgggattgggtcggtactcttgtctatggctaggatgggttggaaactatgtcacgtctttcgtctgtataccgtggtgatggccggcagcgtcacccgtcgtggtttggacatgactggtttcgtcttggagctgcggggcatgtgcgttgtcctggggtatccacatggagtggactaccagggcaggccgcttccggagcaggagggtgacgatgcagagccccacgctgcttgggaggtcactgcagtaatcctcgctggctctcccgagcggacttcgctgacagtcaccgcgggtggagattctttccccgccgcttgccagagcgccgctctcctcgccatcggcactcttcaccagcgctacccggacgagttgcagcactcgccctaccgctaccaccctcgccgcggaggagcccgcgactacgccaccttccgggatgctagctcggaggatgacgctaccatcatgcacctggcgcgcatggtggaggcgtacgacgcggctcgtatcgacttccatcagatggtgcgccgtgggatggtcgagaacaacatgaagatcctggagctgcgtcaagagaacctgcagctcaagaaggacctagacgcggtggaggcgcagctgcatcagctcaagatcgcccagggagaggtctgccgccccaagcgtcgccgtgtctgccgcagccagaagatcaccgcccgcaagagcacctccaggcccgagcttgttcgtcagtccctggcgtggacttgcttcgtcgagacccctcgtgccgagcccgcgcccgtggttccccaggagggagaagcctccggcgttggtagcacagaggatgcgctgttgctcaccttccgtcctggcccgtcgcagcggagaagtgctgccaccggtgatagcaaccaacctgaaggcagcaaccaccaccaccagggcagcccacctccacctcctcctccgcctccaccaccgccagataccaacgccattctcacccaaatcctagcccagcaggccgacatgatggctgctttcctccaccacatccaaaatccgccacaacataatgctccaccaccaccttcccaacactctaaactcgccgagttcctccgcatccgcccacttaccttctctagctccaacaaccccgtggatgcgttggattggctgcatgccgtggggaaaaagctagacactgtgcagtgcagcgatgaggagaaagtcatcttcgccgcccaccagctgcaggggcccgcatctctatggtgggaccatttccaggctacgcagccagaggggcaacctattacttgggcccgtttcaccgccgctttccggagaacccatgtgcccgccggagtcgtggcccttaagaaaagagaattccgagagttgaagcaaggcaaccgctccgtgacggagtatttgcatgagttcaacaacctggcccgttacgccccggaggatgtgcgggaagatgaggagaagcaagagaagttcttggcaggaatggaccctgagctgtccgtccgtctagtctccgggaactatccggatttccaacgtctggtggacaagagcatccgcttggaagccaagcacaaggaactggagtcgcacaagcgccgcttggcgaatttccgcaatcaacagggtgctaaccaaagggtccgctacaccaatccctatccagggggatcctcctcgcagcagcaacaacagcagcagcaacctcgctccgcgcctcgacctcaattcgtggtgcgcgtcccacagccgcagcagcagcagaatcaacaagggactcgtgcgccccgtcctcctacgccaactgtgcagcctggtcaaggccgcagggacgctcaaggtccgcagcgtctgtgcttcaactgcttcgagcccgggcactttgcggataaatgcccaaagccgaggcgtcagcaaggccaagcgcctccccgctccaacaacggtgggaaggatgtcattcggggtcgggtgaaccacgtgacggccgaggacgtgctaacaactccagacgtcatcgttggtacgttcctcattcattccatccctgctactattctgttcgactctggagcttcccactcgtttatatctgtgccattcgtggggagaaatcagttgggggtagaaaggcttaggaaccctctgctcatcaccacccctggaggggttatgacagcaaagtattatagccctgccgtccccatagaaattcaggggattccttttccctcggatctgattctgctagacaccaagaacatggatgtgatccttgggatgaattgtagttccgaacttcatcagataggactatcagaaatccccatcgtcagagagttcggagacgtgtttccggacgaactacccggtatgccgcccaagcgagagattgagttccggatagatcttgctccaggaaccactcctctgtacaagcgaccctatcgtatggcagcaaatgaactggccgaagttaagaaacagttggaagagttgaaagaaaaggggtatatacgtccgagtacttccccctggggtgctcctgtgatttttgtggagaagaaagacaagacgaagaggatgtgcgttgactacagagctctcaatgaagtcaccatcaaaaacaagtaccctcttccccggatcgatgatctgttcgatcagcttaaaggtgccactgtattctccaagatcgatcttcgttccggatatcaccaattacgtattcgtgatgaagatattccgaagaccgcattcaccacgcgatatggactgtatgaattcacggtgatgtcgttcggtttaaccaatgcacctgcctttttcatgaacttaatgaacaaagtgttcatggaatacttggataagtttgttgtggttttcattgatgacattctggtatactcacaatcagaggaagaccatcagcaccatctctgtctggtgttgggaaagttgcgggaacatcaattgtatgccaaacttagcaagtgtgagttctggttgtccgaagtcaaattcttagggcacgtgatatctgctaaaggagttgctgtggaccccgaaacagtgaccgccgtcactgattggaagcaacccaagacagtcactcaagtccgcagtttcttaggtttggcaggatactaccggaggttcatcgagaacttctccaaaatcgctcaacccatgacacagttgttgaagaaagaagagaaatttgtgtggagcccgcaatgcgagaaggcgttcaaaactctcaaagaaaagctggttgcctcgccagtgttaatcttgccggatactcgcaaggatttcatggtgtattgtgacgcttcgcgccaaggattggggtgcgtgctcatgcaggatggtcatgtggtggcctatgcctcacgccagctacggcctcatgaaggcaactaccctacccatgatttggagttagctgcggtggttcatgctctaaaaatctggcggcactatctcattgggaatcgctgtgaaatatatactgatcataagagtttgaaatacatcttcactcagtcggacctgaatcttcggcaaaggagatggttagaactcatcaaggattatgatgtgggaattcactatcatcctggtaaggccaacgtggtcgccgacgccctaagtcgaaaaagccattgcaacacccttaacgtccgtggcattccacccaaacttagtcaacagatggaagccctgaacctaagcatagttggtcgcggattcttggctgcgttggaagccaagcctaccttgctcgatcaaatccgcgaggctcagaagaacgatccggacatgcatggactcctcaagaatatgaaacagggtaaagccgctggtttcacagaggatgaacacggaaccctatggaacggaaatcgagtatgcgttccagataacagagaacttaaacagctgatacttcaggaagcccacgaaagtccttattccatccaccctggcagtacaaagatgtacttagacttgaaggagaaatactggtgggttagtatgaagcgggaaattgcagagttcgtggccctttgtgatgtgtgccagcgtgtcaaggcagagcaccaacgaccggccggacttctccaacctctccaagtacctgaatggaaatgggatgaaattgggatggatttcatcaccggacttccaaagacccaaggtggatatgattctatatgggtagtggtggatcgattaaccaaggtagctcgattcattcctgtgaagaccacctatggagggaacaaactagccgagctctacttcgctaggatcgtgagtctccatggcgttcccaagaaaatcgtatctgataggggaagccaattcacctctcacttttggaagaagctccaagaagagctgggtacccgattaaacttcagcaccgcataccacccgcagacagatgggcagaccgagcgtctaaatcagatcctagaagatatgcttcgcgcatgtgtcctggatttcgggaagacctgggataagagtctcccctatgccgagttctcctacaataacagctatcaagccagcatacaaatggcaccttatgaagcgttgtatgggcgcaaatgccggacaccgctcctgtgggatcaagttggggaaagccaagtgttcgggactgatatcctgagagaagctgaagctaaagtcagaaccattcgggataatctaaaggtggcacagtcccggcagaaaagttatgcagataaccgtcgccgtaacctagaattcgcagtggacgattttgtgtatcttcgggtcacgccattgcggggtgtacacaggtttcagacaaaagggaagcttgcacctcggtatgtgggtcctttccgtatcgttgcccgacacggagaagtcgcttaccaattggagctgcccgcctccttgggcaacgtgcatgatgtgttccatgtgtcgcaactcaagaaatgccttcgagtgccatccgagcaggccgactcagagcaaattgaagttcgcgaagacttgacctacgtggagaggccagtgaaaatcctggacaccatggagcgcaggaccaggaaccgggtaatccgtttttgcaaggtccagtggagcaaccacgccgaagaagaagctacctgggagcatgaagacgagctgaaggcagcccatcctgatctcttcgccagttcttccgaatctcggggtcgagattccgtttaa

SEQ ID NO: 14172 - DNA, 3822 bp, Oryza sativa
  Clone ID: TFbOSC400036j.C1.o74.fg
atggacatctctaggacaaatgaaggctacacgagctgtggcccggtagtcgagatgtcatggcacagtgctggtgtcctgctgctaggggctcagtcctgcctacctatcctggaggttccggccgtaggtggggttgggtcggtactcttgtctatggctaggatgggttggaaattatgtcatgtcttccgtccatatgctgtggtgatggccggcagcgtcaaccgtcatggcctggacctgtgtggctttgtgttggagctgcggggcatgtgcattgtcctgggatacccgcatggagtggactaccagggcaagaagctcccagagcaggatggtgacgatgcagagccccacgctgcttgggaggtcactgcagtgatcctcactggctctcccgagaggacttcgttggcagtcaccgcgggtggagattccttctccgccgcatgccagaacgccgcactccttgccatcggcactcttcaccagcgctacccggacgagttgcagcactcgccctaccgctaccaccctcgtcgcggaggagcccgcgactacgccaccttttgggatgctagctcggaggatgacgctaccatcatgcacctggcgtgcatggtggaggcgtacgacgcggcccgtatcgacttccatcatatggtgcgccgtgggttggtcgagaacaacatgaagatcctggagctgcgtcaagagaatctgcagctgaagaaggaccttgacgcggtggaggcgcagctgtttcagctcaagatcgcccagggagaagtctgccatcccaagcgccgccgcgtctgccgcagcctgaagatcaccgcccgcaagagcaccttcaggcctgagcttgttcgtcagtccttggcgtggacctgcttcgtggagaccccttgcgccgagcccgcgcccgtggttcctcaggaggaggaagcctctggcgttggcagcacggaggatatggtgacaaccaggagaagtgctgttgccggcgatggcaaccaacccgaaggcagcaaccccaacacccaaggcggcccacctccacctcctcccccgccaccaccaccaccacctgacaccaaccccatcctcacccaaattctcgcccagcaggccaacatgatggctgctttcctccaccacatccagaatccgccgcaacataatgctccacctccaccacccccgcagcactctaagctcgccgagttcctccgcatccgcccacctaccttctctagctccaataaccccgtggatgccttggattggttgcatgccgtggggaaaaagttggacaccgtgcagtgcaacaatgaggagaaaatcatctttgccacccaccagctgcaagggcccgcatctctatggtgggaccacttccaggctacgcagcctgagggacatcctattacctgggcccgcttcaccgccgcttttcggaggacccatgtgcccgccggagtcatggcccttaagaagagggaatttcgggagttgaagcaaggcaaccgctctgtgatgaagtatttgcacgagtttaacaacttggcccggtacgccccagaggatgttcgggaagatgaggaaaagcaggagaagttcctggtaggaatggaccctgagctgtctgtgcgtctggtctccggggattatcctgatttccagcgtctgcagcagcagcagccgcaacctcgcttcgcgccccgacctcaattcgtggtgcgcgtcccacagccgcagcaacagcagagccagcaagggacccgtgcgcttcgccctcctgcaccagctgtgcagcttggtcaaggccgcatggacgctcaaggtcagcaacgtctgtgcttcaactgcttcgagcccgggcactttgcggacaaatgcccgaagccgcgacgccagcaaggccaagcgcctccctgccccaacaacggtggtaatgacgtcgctcggggtcgtgtgaaccacgtgaccgccgaggatgtgctgacgactccggacgtcatcgttggtacgttcctcattcattccattcctgctactattttgttcgactctggagcttcctactcgtttatatctgtgcctttcgtgggaagaaatcagctgggggtagaacggcctaggaaccctctgctcatcaccacccctggcggggatatgacagcaaagtattatagcccgacagttcctatagaaatccagggaatcccttttccctttgatttgattcttctggacaccaataacttggatgtgatcctcgggatgaattggttggctcaattccaaggagtagtggattgcgcaaggcgcactgtcattctgtaccaggggccaaaacaaccggttgttttctttgcacccccaacttctgtcggcagttcagaacttcatcagataggactgtcagaaatccccatcgtcagtgaattcggtgacgtgtttccggaagaactacccggtatgccgcccaagcgggagattgagttccggatagatcttgctccagggacaactcctctatacaagcggccctaccgtatggcagcaaataaactggccgaagtcaagaagcagttggaagagttgaagaaaaagggagctctcaatgaagtcactatcaaaaacaagtaccctcttccccggatcaatgatcttttcgaccagcttaaaggtgccattgtcttttctaaaattgatcttcgctccggatatcaccaattgcgtattcgtgaagaagatatcccaaagaccgcgttcaccacacgttatggactgtttgaattcacggtgatgtcattcggtctaaccaatgctcctgccttcttcatgaacttaatgaacaaagtgttcatggaatacttggataagtttgttgtggtcttcattgacgacattctgctcagcaagtgtgagttctggttgtccgaagtcaagttcttagggcatgtgatatctgctaaagaagttgctgtagatcccgaaacggtgaccgccgtcactgattggaagcaacccaagacgttgttgaagaaagaagaaaaatttgtgtggagcccgcaatgcgagaaagcattccaaactctcaaagagaagctggtttcctcgccagtattaattctaccggatactcgcaaggacttcctggtgtactgtgacgcttcgcgccaaggactgggttgcgtactaatgcaggaaggtcacgtggtagcctatgcctcccgacagcttcggcctcatgaaggcaactaccctacccatgatttggagttggccgctgtggttcatgctctaaagatctggcggcactatctcattgggaatcgctgtgaaatatataccgatcataagagtttgaaatacatcttcactcagtcggatttgaatcttcggcagaggaggtggttagaactcatcaaggattatgatgtgggaattcactatcatcctggtaaggccaacgtggtcgccgacgctctaagtcgaaaaagccattgcaacactcttggcgtccgtggcattccaccggaacttaatcaacagttggaggccctgaacctaagcatagttggtcgtggattcttggctacgctggaagccaagcctaccctactcgatcaaatccgcgaggctcagaagaatgatccagacatgcatgggatcctcaagaatatgaaacagggtaaagccgctggtttcacagaggatgaacacggaaccctatggaacggaaatcgtgtatgcgttccagacgaatccccttcctcccgccgctcccgccgcctcgcccgctcctag

SEQ ID NO: 14173 - DNA, 3595 bp, Oryza sativa
  Clone ID: TFbOSC400104j.C1.o3.gm
atggttacgccgatggtgacgaccaggagaaatgttaacaccggtgaaggcaaccaacccgaaggcagcaaccccaaccaccaaggcaatccacctccaccaccaccaccagacaccaacgccattctcacccagatcctcgcccaacaagccaacatgatgactgctttcctccaccacctccaaaatccaccacaacagaatgctccaccaccccctccccaacactccaaactcgccgaattcctccgcatccgcccacccaccttttctagctccaacaaccctgtggatgcgttggattggttgcatgccgtggggaagaagctggacactgtgcagtgcagtgatgaagagaaagtcatcttcgccgcccatcagctgcaggggcccgcatccctatggtgggaccacttccaggctacgcagccagcgggacagccgatcacttgggcccacttcaccgccgctttccggagaacccatgtgcccgccggagtcgtggctcttaagaaaagggaattccgagagttgaagcaaggcaaccgctccgtgatggagtatttgcacgagttcaacaatctggcccggtacgctccggaggatgtgcgggaagatgaggagaagcaagagaagttcttggcaggaatggaccctgagctgtccgttcgtctagtctctggggactatcctgattttcaacgactggtggacaagagcatccgcttggaagccaagcacaaggagctggaatcgcacaagcgccgcttggcgaatttccgcaatcagcagggtgctaaccagagggtccgctacaccaatccctacccagggggatcctcctcgcagcagcaacaacagcagcagcaacctcgcccagcgccccgacctcaattcgtggtgcgcgtcccacagccgcagcaacagcagaatcagcaagggactcgtgcgccccgtcctcctacgccagctgggcagcccgttcaaggccgcagggacgcttcaggtccgcagcggctgtgcttcaactgcttcgagcccggacactttgcggataaatgcccaaagccaaggcgtcagcaaggccaagcgcctccccgctccaacaacggcgggaaggatgtcattcggggtcgtgtgaatcacgtgacggccgaggacgtgctgacaactccagacgtcatcgttgaactgcatcagataggtctgtcagaaatccccatcgtcagagagttcggagacgtgtttcgggaagaactacctggtatgccgcccaagcgagagattgagttccggatagatcttgctccaggaaccactcctctgtacaagcgaccctaccgtatggcagcaaatgaactggccgaagttaagaaacagttggaagaattgaaagaaaaggggtatatacgtccgagtacttccccttggggtgctcctgtgatttttgtagagaagaaagacaagacgaagaggatgtgcgtcgactacagagctctcaatgaagtcaccatcaaaaacaagtaccctcttccccggatcgatgatctgttcgatcagcttaaaggtgccactgtattctccaagattgatcttcgttccggatatcaccaattacgtattcgtgaagaagatattccgaagaccgcattcaccacgcgatacgggctgtatgaattcacggtgatgtcgttcggcttgaccaatgctcctgccttcttcatgaacttaatgaacaaagtgttcatggaatacttggataagttcgttgtggttttcatcgatgacattctgatatactcacaatcagaggaagaccatcagcaccatctccgtctggtgttgggaaagttgcggaaacatcaattgtatgccaagcttagcaagtgtgagttctggttgtccgaagtcaaattcttggggcacgtgatatctgctaaaggagttgctgtggaccccgaaacagtgaccgccgtcaccgattggaagcaacccaagacagtcactcagattcgcagtttcttgggtttggcaggatactaccggaggttcatcgagaacttctccaaaatcgctcgacccatgacacagttgttgaagaaagaagagaagtttgtgtggagcccgcaatgcgagaaggcgttccaaaccctcaaggaaaagctggtttcctcgccagtgttaatcttgccggatactcgcaaggacttcatggtgtattgtgatgcttcgcgccaaggattggggtgcgtgctcatgcaggacggtcatgtggtagcctatgcttcacgtcagctacgacctcatgaaggcaactaccctacgcacgacttgaagttagcagcggtggttcatgctctaaaaatctggcggcactatctcattgggaaccgctgtgaaatatatactgatcataagagtttgaaatacatcttcactcagtcagatctgaaccttcggcaaaggagatggttagaactcatcaaggattatgatgtgggaatacactatcatcctggtaaggccaacgtggttgccgacgctctaagtcgaaagagccactgcaacactctcaacgtccgaggcattccacccgagcttaatcaacagatggaagccctgaacctaagcatagttggtcgcggattcttggctgcgttggaagccaagcccaccttgctcgatcaaatccgcgaggctcagaagaatgatccggacatgcatggactcctcaagaatatgaaacagggtaaagccgctggtttcacagaggatgaacacggaaccttatggaacggaaagcgggtatgcgttccagatagcagagaacttaaacagctgatacttcaggaagctcacgaaagtccttattccattcacccgggcagtaccaagatgtacttagacttgaaggagaattactggtgggttagcatgaagcgggaaattgcagagtttgtggctctatgtgatgtgtgccagcgtgtcaaggcagagcaccagcgaccggccggacttctccaacctctccaagtgccggaatggaaatgggatgaaattgggatggatttcatcaccggccttccaaaaacccaaggtggatatgattctatatgggtaattgtggatcgactaacaaaggtagctcgattcattcctgtgaagaccacctatggagggaataaactagcggagctctacttcgctaggatcacagatggacagaccgagcgtctaaatcagatcttagaagatatgcttcgcgcatgtgtcctggacttcgggaagacttgggataagagtctcccctatgccgagttctcctacaataacagctatcaagccagcatacaaatggcaccatatgaagcgttgtacgggcgcaaatgccggacaccgctattgtgggaccaagttggagaaagccaagtgttcgggactgatatcctgagagaagctgaagctaaagtcagaatcattcgggataatctaaaggtggcacagtcccggcagaaaagttatgcagataaccgacgccgtgatctggaattcgcagtggatgattttgtgtaccttcgggtcacgccattgcgag

SEQ ID NO: 14174 - DNA, 5415 bp, Oryza sativa
  Clone ID: TFbOSC400177j.C1.o48.fg
atggatgaagtcgggggtcgatggacattctccagggcaaatgaaggctacacgagctgcggcccgatggccggcagcgtcacccgtcgtggtttggacatgactggcttcgtcttggagctgcgaggcatgtgcgtggtcttggggtatccacacggagtggattaccaggtcaggccgctcccggagcaggagggtgaggatgcagagcctcacgctgcttgggaggtcactgcagtgatcctctccggctctcccgagcggacttcgctgacagtcaccgcgggtggcgactccttccccgccgcttgccagaacgccgctctcctcgccatcggcactcttcaccagcgctacccggacgagttgcagcactcgccctaccgctaccaccctcgtcgcggaggagcccgcgactacgccaccttccgagacgccagctcggaggatgacgctaccgtcgtgcatctggcacgcatggtggaggcgtacgacgcggctcgtatcgacttccatcagatggtgcgccgtggcatggtcgagaacaacatgaagatcctggagctgcgtcaagagaatctgcagctcaagaaggacctcgacgcgttggaggcgcagctgcatcagctcaagatcgcccagggagagatcagccgccccaagcgtcgccgcgtctgccgcagccagaagatcaccgcccgcaagagcacctccaggcccgagcttgttcgtcagtccctggcgtggacttgcttcgtcgagaccccttgtgccgagcctgcgcccgtggttccccaggagggggaagcctccggcgttggtagctcggagggtgcgctgttgctcaccttccgtcctggcccgtcgcagcgctcttcttctctgtttgctggttccgtgtggggttttcagatggtgacgaccaggagaaatgttaacaccggtggaggcaaccaacccgaaggcagcaaccccaacccccaaggcaacccacctccaccaccaccaccagacaccaacgctattctcacccagatcctcgcccaacaagccaacatgatgaatgctttcctccaccacctccaaaattcaccacaacagaatgctccaccaccccctccccaacactccaaactcgccgaattcctccgcatccgcccacctaccttctccagctccaacaaccctgtggatgctttggattggttgcatgccgtggggaagaagctagacacggtgcagtgcagcgacgaagagaaagtcatcttcgccgcccatcagctgcagggacccgcatctctctggtgggaccatttccaggccacgcagccagaagggcaaccgattacttggactcgcttcaccgccgctttccggagaacccatgtgcccgctggagtcgtggctcttaagaagagggaatttcgggagttgaagcaaggcaatcgctccgtgatggagtatttgcatgagttcaacaatctagcccgttatgccccggaggatgtgcgggaagatgaggagaagcaagagaagttcttggcaggaatggaccctgagctgtccgttcgtctcgtctctggggactatcctgattttcaacgactggtggacaagagcatccgcttggaagccaagcacaaggagctggaatcgcacaagcgccgcttggcgaatttccgcaatcagcagggtgctaaccagagggtccgctacaccaatccctacccagggggatcctcctctcagcagcagcagcagcagcagcaacctcgctccgcgcctcgacctcaattcgtggtgcgcgtcccacagcagcaacagcagcagaatcagcaagggactcgtgcgccacgtcctcctacgccaactgtgcagcctgttcaaggtcgcagggacgcttcaggtccgcagcgtctgtgcttcaactgcttcgagcccgggcactttgcggataaatgcccaaagccaaggcgtcagcaaggccaagcgcctccccgctccaacaacggtggcaaggatgtcattcggggtcgtgtgaatcacgtgacggccgaggacgtgctgacaactccagacgtcatcgttggtacgttcctcgttcattccatccctgctacaattttgttcgactctggagcttcccactcgtttatatctgtgccattcgtggggagaaatcagttgggggtagaaaggcttagaaaccctctgcttatcaccacccctggaggggttatgacagcaaagtattatagccctgccgttcctatagaaattcaggggattccttttccctcggatctgattctgctagacaccaagaacttggatgtgattcttgggatgaattggttggcccaattccaaggggtagtggattgcgcgaggcgcactgtcactctgtaccgagggccagaacaaccggttgttttctttgcacctccaacctctgtcagaagttcagaactgcatcagataggtctgtcagaaatccccatcgtcagagagttcggagacgtgtttccggaagaactacctggtatgccgcccaagcgagagattgagttccggatagatcttgctccaggaaccactcctctgtacaagcgaccctaccgtatggcagcaaatgaactggccgaagtaaagaaacagttggaagagttgaaagaaaaggggtacatacgtccgagtacttccccatggggtgctcctgtgatttttgtagagaagaaagacaagacgaagaggatgtgcgttgactacagagctctcaatgaagtcaccatcaaaaacaagtaccctcttccccggatcgatgatctgttcgatcagcttaaaggtgccaccgtattctccaagattgatcttcgttccggatatcaccaattacgtattcgtgaagaagatattccgaagaccgcattcaccacgcgatatggactgtatgaattcacggtgatgtcgttcggcttgaccaatgctcctgccttcttcatgaacttaatgaacaaagtgttcatggaatacttggacaagtttgttgtggttttcatcgatgacattctgatatactcacaatcagaggaagaccatcagcaccatctccgtttggtattgggaaagttgcgggaacatcaattgtatgccaagcttagcaagtgtgagttctggttgtccgaagtcaaattcttagggcacgtgatatctgctaaaggagttgctgtggatcccgaaacagtgaccgccgtcaccgattggaagcaacctaagacagtcactcaaatccgcagtttcttaggtttggcaggatactaccggagattcatcgagaacttctccaaaatcgctcgacccatgacacagttgctgaagaaagaagagaagtttgtgtggagcccgcaatgcgagaaggcgtttcaaactctcaaggaaaagctggtttcctcgccagtgttaatcttgccggatactcgcaaggacttcatggtgtattgtgacgcttcgcgccaaggattggggtgcgtgctcatgcaggacggtcatgtggtagcctatgcttcacgtcagctacgacctcatgaaggcaactaccctacgcatgacttggagttagcagcggtggttcatgctctaaaaatctggcggcactacctcattgggaatcgctgtgaaatctataccgaccataagagcttgaaatacatcttcacccagtcggatctgaatcttcggcaaaggagatggttagaactcatcaaggattatgatgtgggaatacactatcatcctggtaaggccaacgtggttgccgacgctctaagtcggaagagccactgcaacactctcaacgtccgaggcattccacccgagcttaatcaacagatggaagccctgaacctaagcatagttggtcgcggatgcttggctgcgttggaagccaagcctaccttgctcgatcaaatccgcgaggctcagaagaatgatccggacatgcatggactcctcaagaatatgaaacagggtaaagccgcaggtttcacagaggatgaacacggaaccttatggaacggaaagcgggtatgcgttccagatagcagagaacttaaacagctgatactccaggaagctcacgaaagtccttattccattcacccgggcagtaccaagatgtacttagacttgaaggagaaatactggtgggtcagcatgaagcgggaaattgcagagtttgtggctctatgtgatgtgtgccagcgtgtcaaggcagaacaccaacgaccggccggacttctccagcctctccaagtgccggaatggaaatgggatgaaattgggatggatttcatcaccggccttccaaaaacccaaggtggatatgattctatatgggtaatagtggatcgattaaccaaggtagctcgatttattcctgtgaagaccacctatggagggaacaaactagcggagctctacttcgctaggatcgtgagtctccatggcgttcccaagaaaatcgtatctgataggggaagccaattcacctctcacttttggaagaagctccaagaagagctgggtactcgattgaatttcagcaccgcctatcacccgcagacagatggacagaccgagcgtctaaatcagattctagaagatatgcttcgcgcatgtgtcctagacttcgggaagacttgggataagagtctcccctatgccgagttctcctacaataacagctatcaagccagcatacaaatggcaccctatgaagcgttgtatgggcgcaaatgccggacaccgctattgtgggaccaagttggagaaagccaagtgttcgggactgatatcctgagagaagctgaagctaaagtcagaatcattcgggataatctaaaggtggcacagtctcggcagaaaagttatgcagataaccgtcgccgtgatctggaattcgcagtggatgactttgtgtatcttcgggtcacgccattgcgaggtgtgcacaggtttcagacaaaagggaagctcgcacctcggtatgtgggtcccttccgtatcatcgctcgacgcggagaagtcgcctaccagctggagttgcccgcctccttgggcaacgtgcatgatgtgttccatgtgtcgcaactcaagaaatgtcttcgagtgccatccgagcaggccgactcagagcaaattgaagttcgcgaagacttgacctatgtggagaagccagtgaaaatcctggacaccatggagcgcaggaccaggaaccgagtaatccgtttttgcaaggtccagtggagcaaccacgccaaagaagaagctacttgggagcgcgaagacgagctgaaggcagcccatcccggtctcttcgctagttcttccgaatctcggggtcgagattccgtttaa

SEQ ID NO: 14175 - DNA, 6033 bp, Oryza sativa
  Clone ID: TFbOSC400263j.C1.o2.np
atggcggccggatcttccgcggccgattccccctcatccggccgctctctccccctcccaaccctatataaacactccccgtgcctccctccaccgtttccgccactcgccgctctctctctccgccggaatcgagctcgcgccgtcgctctctctctccgccgtcaccgccgagctccggtccgccgccgtagtcgccccggaccttctcccgcttcggcgtcgccttctccgggttcgccgcaacctcgccgacctcgtccacccctccgtttcgcccgccaaccgccggaacgccgccgtccccgtcgacccgagccgcgccgccgccttcctccgctccggtcgccgttcccgtcgtcgctgtcgacccggggtgagccgtggaccgccgtttcgcttcccccttccctcatctctctcgggcgccgctccgccgcgctggtggtcgccggcggcgaccatcggggcgcgggtgcgccacctcccgtcggctgtgccggcgtggccgccttcgggcgcgccccgcggctgccatgtggggcccggtcgtcagccgcccgcgccctcgggtgcggctgacgcgtgggacccacggcgccggccggtgtgagccgggtgcacccggtccaccgtggacccacctcggccatataaggaccggtcttcgggcctccgttgcatagcactaccgtacttccacatgtctagtggggcaaatgaaggctacacgagctgcggcccagtagtcgagatgtcatggcacagggccggtgtcctgctgctaggggctcagtcctgcctgcctgtcccgggggttccggccgtaggtgggattgggtcgatgtacacctctgatcagagtataatttattcgaatagccgcgccctcggttatgggcaagccgagcaatgtacccaaatggccggcagcgtcagccgtcgtggtctggacatgactggtttcgtcttggagctgcggggcatgtgcgttgtcctggggtatccgcatggagtggactaccagggcaggccgcttccggagcaggagggtgacgatgcagagccccacgctgcttgggaggttactgcagtgatcctcactggctctcccgagcggacttcgctggcagtcaccgcgggtggagattctttctccgccgcttgccagagcgccgctctcctcgccatctgcactcttcaccagcgctacccggacgagttgcagcactcgccctaccgctaccaccctcgccgcggaggagcccgcgactacgccaccttccgggatgctagctcggaggatgacgctaccatcatgcacctggcgcgcatggtggaggcgtacgacgcggctcgtatcgacttccatcagatggtgcgccgtgggatggtcgagaacaatctgaagatcctggagctgcgtcaagagaacctgcagctcaagaaagacctagacgcagtggaggcgcagctgcatcagctcaagatcgcccagggagaggtctgccgccccaagcgtcgccgcgtctgccgcagccagaagatcaccgcccgcaagagcacctccaggcccgagcttgttcgtcagtccctggcatggacttgcttcgtcgagaaccctcgtgccgagcccgcgcccgtggttccccaggagggggaagcctccggcgttggcagcacggaagatgcgctgttgctcaccttccatggtgatgaccaggagaagtgctagtaccggtgatggcaaccaacctgaaggcagcaaccacaaccaccagggcagcccacctccacctcctcctccgcctccaccaccaccaccagataccaacgccattctcacccaaatcctcgcccagcaggccaacatgatgattgctttcctccaccacctccaaaatccgccacaacataatgctccaccaccacccccacaacactctaaactcgccgagttcctccgcatccgtccacccaccttctttagctccaacaaccccgtggatgcgttggattggttgcatgccgtggggaaaaagctagacactgtgcagtgcagcgatgaggagaaagtcatcttcgccgcccaccagctgcaggggcccgcatctctatggtgggaccatttccaggctacgcagccagaggggcagcctattacttgggctcgcttcactgccgctttccggagaacccatgtgcccgccggagtcgtggcccttaagaaaagggaattccgagagttgaagcaaggcaaccgctccgtgatggagtatttgcatgagttcaacaacctggcccgttacgccccggaggatgtgcggagatgaggagaagcaagagaagttcttggcaggaatggaccctgagctgtccgtccgtctagtttccggggactatccggatttccaacgtctggtggacaagagcatccgcttggaagccaagcacaaggaactggagtcgcacaagcgccgcttggcgaatttccgcaatcaacagggtgctaaccaaagggtccgctacaccaatccctatccagggggatcgtcctcgcagcagcaacctcgctccgcgccccgacctcaattcgtggtgcgcgtcccacagccgcagcaacagcagagtcagcaagggactcgtgcgccccgtcctcctacaccaactgtgcagcctggtcaaggccgcagggacgctcaaggtccgcagcgtctgtgcttcaactgcttcgagcctgggcactttgcggataaatgcccgaagccgaggcgccagcaaggccaagcgcctccccgctccaacaacggtggtaaggatgtcattcggggtcgtgtgaaccacgtgacggccgaggacgtgctgacaactccagacgtcatcgttggtacgttcctcattcattccatccctgctaccattttgttcgactctggagcatcccactcgttcatatctgtgccattcgtggggagaaatcagttgggggtagaaaggcttaggaaccctctgctcatcaccacccctggaggggttatgacagcaaagtattatagtcctgccgtccctatagaaattcaggggattccttttccctcggatctgattcttctagacaccaagaacttggatgtgatccttgggatgaattggttggctcaattccaaggagtagtggattgcgcgagacgcactgttactctgtaccgagggccggaacaaccggttgttttctttgcacccccaacctctgtcagaagttcagaacttcatcagatagtactgtcagaaatccccatcgtcagggagttcggagatgtgtttccggaagaactacccggtatgccgcccaagcgagagattgagttccggatagatcttgctccaggaaccactcctctgtacaagcgaccctaccgtatggcagcaaatgaactggccgaatttaagaaacagttggaagagttaaaagaaaaggggtatatacgtccgagtacttccccctggggtgctcctgtgatttttgtggagaagaaagacaagacgaagaggatgtgcgttgactacagagctctcaatgaagtcaccatcaaaaacaagtaccctcttccccggatcgatgatctgttcgattagcttaaaagtgccacggtattctccaagatcgatcttcgttccggaaatcaccagttgcgcattagggaagaagatattccgaagaccgcattcaccacgcgatacggactgtatgaattcacggtgatgtcattcggtctaaccaatgctcctgccttcttcatgaacttaatgaacaaagtgttcatggaatacttggataagtttgttgtggtgttcattgatgacattctgatatactcacaatcagaggaagaccatcagcaccatctccgtctggtgttgggaaagttgcgggaacatcaattgtatgccaaacttagcaagtgtgagttctggttgtccgaagtcaaattcttagggcacgtgatatctgctaaaggagttgctatggaccccgaaacagtgaccgccgtcactgattggaagcaacccaagacagtcactcaagtccgcagtttcttaggtttggcgggatactaccggaggttcatcgagaacttctccaaaatcgctcgacccatgacacagttgttgaagaaagaagagaaatttgtgtggagcccgcaatgcgagaaggcgtttcaaactctcaaagaaaagctggtttcctcgctagtgttagtcttgccagatactcgcaaggatttcatggtgtattgtgacgcttcgcgccaaggattggggtgcgtgctcatgcaggacggtcatgtggtggcctatgcctcacgccagctacggcctcatgaaggcaactaccctacccatgatttggagttagccgcggtggttcatgctctaaaaatctggcggcactatctcattgggaatcgctgtgaaatatatactgatcataagagtttgaaatacatcttcacccagtcggatctgaatcttcggcaaaggagatggttagaactcatcaaggattatgatgtgggaattcactatcatcctggtaaggccaacgtggtcgccgacgctctaagtcgaaagagccattgcaacactcttaacgtccgtggcattccacccgaacttaaccaacagatggaagccctgaatctgagcatagtgggtcgtggattcttggctacgctggaagccaagcccaccttgctcgatcaaatccgcgaggctcagaagaacgacccggacatgcgtggactcctcaaaaatatgaaacagggtaaagccgcgggtttcacagaggatgaacacggagccctatggaacggaaatcggcgtgtcaaggcagagcaccaacgaccggccggacttctccaacctctccaagtaccagaatggaaatgggatgaaattgggatggacttcatcaccggacttccaaaaacccaaggtggatatgattctatatgggtagttgtggaccggttaaccaaggtagctcgatttattcctgtgaagaccacctatggagggaacaaactagccgagctctacttcgctaggatcgtgagtctccatggcgttcccaagaaaatcgtatctgataggggaagccaattcacctctcacttttggaagaagctccaagaagagctgggtacccgattaaatttcagcaccgcgtatcacccgcagacagatggacagaccgagcgtctaaatcagatcctagaagatatgcttcgcgcatgtgtcctagatttcgggaagacctgggataagagtctcccctatgccgagttctcctacaataacagctaccaagccagcatacaaatggcaccttatgaagcgttgtatgggcgcaaatgccggacaccgctcttgtgggaccaagttggggaaagtcaagtgttcgggactgatatcctgagagaagctgaagcgaaggtcagaaccattcgggataatttaaaggtggcacagccacggcagaaaagttatgcagataaccgtcgccgtaacctggaattcgcggtggacgattttgtgtaccttcgaatcacgccattgcggggtgtacacaggtttcggacaaaagggaagctcgcacctcggttcgtgggtcctttccgtatcattgctcggcgcggagaagtcgcttaccagttggagctgcccgcctccttgggcaacgtgcatgatgtgttccatgtgtcgcaactcaagaaatgtctccgagtgccatccgagcaggccgactcagagcaaattgaagttcgcgaagacttgacctacgtggagaggccagtgaaaatcctggacaccatggagcgcaggaccaggaaccgggtaatccgtttttgcaaggtccagtggagcaaccacgccgaagaagaagctacctgggagcgtgaagacgagctgaaggcagcccatcccgatctcttcgccagttcttccgaatctcggggtcgagattccgtt

SEQ ID NO: 14176 - DNA, 5127 bp, Oryza sativa
  Clone ID: TFbOSC400440j.C1.o3.fg
atggatgaagtcaggggtcgatggacattctccagggcaaatgaaggctacacgagctgcggcccgatggccggcagcgttacccgtcgtggtttggacatgactggcttcgtcttggagctgcggggcatgtgcgtggtcttggggtatccgcatggagtggattaccaggccaggccgctcccggagcaggagggtgaggatgcagagcctcacgctggttgggaggtcactgcagtgatcctctccggctctcccgagcggacttcgctggcagtcaccgcgggtggggattccttccccgccgcttgccagaacgccgctctcctcgccatcggcacccttcaccagcgctacccggacgagttgcagcactcgccctaccgctatcaccctcgtcgcggaggagcccgcgactacgccaccttccgagacgccagctcggaggatgacgccaccgtcgtgcatctggcacgcatggtggaggcgtacgacgcggctcgtatcgacttccatcagatggtgcgccgtggcatggtggagaacaacctgaagatcctggagctgcgtcaggagaacctgcagctcaagaaggacctcgacgcagtggaggcgcagctgcatcagctcaagatcgcccagggagaggacagccgcctcaagcgtcgccgcgtctgccgcagccagaagatcaccgcccgcaagagcacctccaggcccgagcttgttcgtcagtccctggcgtggacttgcttcgtcgagacccctcgtgccgagcctgcgcccgtggttccccaggagggggaagcctccggcgttggtagctcggagggtgcgctgttgctcaccttccgccctggcccgtcgcagcgctctccttctctgtttgctggttctgtgtggggttttcagatgaatgctccaccaccacctccccaacactctaaactcgccgagttcctccgcatccgcccacctaccttctccagctccaacaatcccgtagatgcgttggattggttgcatgccgtggggaagaagctagacacggtgcagtgcagtgatgaggagaaagtcgtcttcgccgcccatcagctgcagggacccgcatctctctggtgggaccacttccaggctgcgcagccagaggggcagccgattacttgggcccgcttcaccgccgctttccggagaacccatgtgcccgctggagtcgtggctcttaagaaaagggaattccgggagttgaagcaaggcaaccgctccgtgatggagtatttgcatgagttcaacaatctagcccgttatgccccggaggatgtgcgggaagatgaggagaagcaagagaagttcttggcaggaatggaccctgagctgtccgttcgtctagtctctggggactacccggacttccaacgtctggtggacaagagcatccgcttggaggccaagcacaaggagctggaatcgcacaagcgccgcttggcgaacttccgcaatcagcagggtgctaaccagagggtccgctacaccaatccctacccagggggatcctcctcgcagcagcagcagcagcagcagcaacctcgctccgcgcctcgacctcaattcgtggtgcgcgtcccaccgccgcagcagcagcagaatcagcaagggactcgtgcgccccgtcctcctacgccaactgtgcagcccgttcaaggccgcagggacgctcaaggtcagcagcgtctgtgcttcaactgcttcgagcccggacactttgcggataaatgtccaaagccaaggcgtcagcaaggccaagcgcctccccgctccaacaacggcgggaaggatgtcattcggggtcacgtgaatcacgtgacggccgaggacgtgctgacaactccagacgtcatcgtcggtacgttcctcgtccattccatccctgctacaattttgttcgactctggagcttcccactcgtttatatctgtgccattcgtggggaaaaatcagttgggggtagaaaggcttagaaaccctctgctcatcaccacccctggaggggttatgacagcaaagtattatagccctgccgttcctatagaaattcaggggattccttttccctcggatctgattctgctagacaccaagaatttggatgttatccttgggatgaattggttggctcaattccaaggagtagtggattgcgcgaggcgcactgtcactctgtaccgagggccagaacaaccggttgttttctttgcacccccaacctctgtcagaagttcagaactgcatcagataggtctgtcagaaatccccatagtcagagagttcggagacgtgtttccggaagaactacctggtatgccgcccaagcgagagattgagttccgaatagatcttgctccaggaaccactcctctgcacaagcgaccctaccgtatggcagcaaatgaactggccgaagttaagaaacagttggaagagttgaaagaaaaggggtatatacgtccgagtacttccccttggggtgctcctgtgatttttgtagagaagaaagacaagacgaagaggatgtgcgtcgactacagagctctcaatgaagtcaccatcaaaaacaagtaccctcttccccggatcgatgatctgttcgaccagcttaaaggtgccactgtattctccaagattgatcttcgttccggatatcaccaattacgtattcgggaagaagatattccgaagaccgcattcaccacgcgatacgggctgtatgaattcacggtgatgtcgttcggcttgaccaatgctcctgccttcttcatgaacttaatgaacaaagtgttcatggaatacttggacaagtttgttgtggttttcatcgatgacattctgatatactcacaatcagaggaagaccatcagcaccatctccgtctggtgttgggaaagttgcgggaacatcaattgtatgccaagctcagcaagtgtgagttctggttgtccgaagtcaaattcttggggcacgtaatatctgctaaaggagttgctgtggaccccgaaacagtgaccgccgtcaccgattggaagcaacccaagacagtcactcagattcgcagtttcttgggtttggcaggatattaccggagattcatcgagaacttctccaaaatcgctcgacccatgacacagttgttgaagaaagaagagaaatttgtgtggagcccgcaatgcgagaaggcgttccaaactctcaaagaaaagctggtttcctcaccagtgttaatcttgccggatactcgcaaggatttcatggtgtactgtgatgcttcgcgccaaggattggggtgcgtgctcatgcaggacggtcatgtggtagcctatgcctcacgccagctacgacctcatgaaggcaactaccctacacatgacttggagttagcagcggtggttcatgctctaaaaatctggcggcactatctcattgggaaccgctgtgaaatatatactgatcacaagagcttgaaatacatcttcacccagtcggatctgaatcttcggcaaaggagatggttagaactcatcaaggattatgatgtgggaatacactatcatcctggtaaggccaacgtggttgccgacgctctaagtcgaaagagccactgcaacactctcaacgtccgaggcattccacccgagcttaatcaacagatggaagccctgaacctaagcatagttggtcgcggattcttggctgcgttagaagccaagcccaccttgctcgatcaaatccgcgaggctcagaagaatgatccggacatgcatggactcctcaagaatatgaaacagggtaaagccgctggtttcacagaggatgaacacggaaccttatggaacggaaagcgggtatgcgttcccgataacagagaacttaaacagctgatacttcaggaagctcacgaaagtccttattccattcaccctggcagtacaaagatgtacttagacttgaaggagaaatactgcgtgtcaaggcagaacaccaacgaccggccggacttctccagcctctctaagtgccagaatggaagtgggatgaaattgggatggatttcatcaccggacttccaaaaacccaaggtagctcgattcattcctgtgaagaccacctatggagggaataaactagcggagctctacttcgctaggatcgtgagtctccatggtattcccaagaaaatcgtatctgataggggaagccaattcacctctcacttttggaagaagctccaggaagagctgggtactcgattgaatttcagcaccgcgtatcacccgcagacagatggacagaccgagcgtctaaatcagatcttagaagatatgcttcgcgcatgtgtcctggacttcgggaagacttgggataagagtctcccctatgccgagttctcctacaataacagctaccaagccagcatacaaatggcaccctatgaagcgttgtacgggcgcaaatgccggacaccgctattgtgggaccaagttggagaaagccaagtgttcgggactgatatcctgagagaagctgaagctaaagtcagaatcattcgggataacctaaaggtggcacagtctcggcagaaaagttatgcagataaccgtcgccgtgatctggaattcgcagtggatgactttgtgtatcttcgggtcacgccattgcgaggtgtgcacaggtttcagacaaaagggaagctcgcacctcggtatgtgggtcccttccgtatcatcgctcgacgcggagaagttgcttaccagctggagttgcccgcctccttgggcaacgtgcatgatgtgttccatgtgtcgcaactcaagaaatgtcttcgagtgccatccgagcaggccgactcagagcaaattgaagttcgcgaagacttgacctatgtggagaggccagtgaaaatcctggacaccatggagcgcaggaccaggaaccgagtaatccgtttttgcaaggtccagtggagcaaccacgccgaagaagaagctacttgggagcgcgaagacgaactgaaggcagcccatcccgatctcttcgccagttcttccgaatctcggggtcgagattccgtttaa

SEQ ID NO: 14177 - DNA, 5262 bp, Oryza sativa
  Clone ID: TFbOSC400477j.C1.o45.fg
atgtcatggcacagggccggtgtcctgctgctaggggctcagtcctgcctgcctgtcccgggggttctggccgtaggtgggattgggtcggtactcttgtctatggctaggatgggttggaaactatgtcacgtcttccgtctgtataccgtggtgatggccggcagcgtcacccgtcgtggtttggacatgactggtttcgtcttggagctgcggggcatgtgcgttgtcctggggtatccacatggagtggactaccagggcaggccgcttccggagcaggagggtgacgatgcagagccccacgctgcttgggaggtcactgcagtgatcctcgttggctctcccgagcggacttcgctggcagtcaccgcgggtggagattctttccccgccgcttgccagagcgccgctctcctcgccatcggcactcttcaccagcgctacccggacgagttgcagcactcgccctaccgctaccaccctcgccgcggtggagcccgcgactacgccaccttccgggatgctagctcggaggatgatgctaccatcgtgcacctggcgcgcatggtggaggcatacgacgcggctcgtatcgacttccatcagatggtgcgccgtgggatggtcgagaacaacatgaagatcctggagctgcgtcaagagaacctgcagctcaagaaggacctagacgcggtggaggcgcagctgcatcagctcaagatcgcccagggagagatggtgacgaccaggagaaatgctgccaccggtgatggcaaccaacctgaaggcagcaaccacaacaaccaccaggggaacccacctccacctcctcctccgcctccaccaccaccaccagacaccaacgccattctcacccaaatcctcgcccagcaggccaacatgatgactgctttcctccaccacctccaaaatccgccacaacataatgctccaccaccacccccacaacactctaaactcgccgagttcctccgcatccgcccacctaccttctctagctccaacaaccccgtggatgcgttggattggttgcatgctgtggggaaaaagctagacactgtgcagtgcagcgatgaggagaaagtcatcttcgccgcccaccagctgcaggggcccgcatctctatggtgggaccatttccaggctacgcagccagaggggcaacctattacttgggcccgtttcaccgccgctttccagagaacccatgtgcccgccggagtcgtggcccttaagaaaagagaattccgagagttgaagcaaggcaactgctccgtgatggagtatttgcatgagttcaacaacctggcccgttacgccccggaggatgtgcgggaagatgaggagaagcaagagaagttcttggcaggaatggaccctgagctgtccgtccgtctagtctccggggactatccggatttccaacgtctggtggacaagagcatccgcttggaagccaagcacaaggaactggagtcgcacaagcgccgcttggcgaatttccgcaatcaacagggtgctaaccaaagggtccgctacaccaatccctatccagggggatcctcctcgcagcagcaacaacagcagcagcaacctcgctccgcgcctcgacctcaattcgtggtgcgcgtcccacagccgcagcagcagcagaatcaacaagggactcgtgcgccccgtcctcctacgccagccgtgcagcctggtcaaggccgcagggacgctcaaggtcagcagcgtctgtgcttcaactgcttcgagcccgggcactttgcggataaatgcccaaagccgaggcgtcagcaaggccaagcgcctccccgctccaacaacggtgggaaggatgtcattcggggtcgtgtgaaccatgtgacggccgaggacgtgctgacaactccagacgtcatcgtcggtacgttcctcattcattccatccctgctaccattttgttcaactctggagcttcccactcgtttatatctgtgccattcgtggggagaaatcagttgggggtagaaaggcttaggaaccctctgctcatcaccacccctggaggggttatgacagcaaagtattatagccctgccgtccctatagaaattcaggggattccttttccctcggatctgattctgctagacaccaagaacttgaatgtgatccttgggatgaattggttggctcaattccaaggagtagtggattgcgcgagacgcactgtcactctgtaccgagggccggaacaaccggttgttttctttgcacccccaacctctgtcagtagttcagaactccatcagataggactgtcagaaatccccatcgtcagagagttcggagacgtgtttccggaagaactacccggtatgccgcccaagcgagagattgagttctggatagatcttgctccaggaaccactcctctgtacaagcgaccctaccgtatggcagcaaatgaactggccgaagtcaagaaacagttggaagagttgaaagaaaaggggtatatacgtccgagtacttccccctggggtgctcctgtgatttttgtggagaagaaagacaagacgaagaggatgtgcgttgactacagagctctcaatgaagtcaccatcaagaacaagtaccctcttccccggatcgatgatctgttcgatcagcttaaaggtgccactgtattctccaagattgatcttcgttccggatatcaccagttgcgcattagggaagaagatattccgaagaccgcattcaccacgcgatacggactgtatgaattcacggtgatgtcattcggtttaaccaatgcacctgcctttttcatgaacttaatgaacaaagtgttcatggaatacttggataagtttgttgtggttttcattgatgacattctgatatactcacaatccgaggaagaccatcagcaccatctccgtctggtattgggaaagttgcgggaacatcaattgtatgccaaacttagcaagtgtgagttctggttgtccgaagtcaaattcttagggcacgtgatatctgctaaaggagttgctgtggaccccgaaacagtgaccgccgtcactgattggaagcaacccaagacagtcactcaagtccgcagtttcttaggtttggcaggatactaccggaggttcatcgagaacttctccaaaatcgctcgacccatgacacagttgttgaagaaagaagagaaatttgtgtggagcccgcaatgcgagaaggcgttcaaaactctcaaagaaaagctggttgcctcgccagtgttaatcttgccggatactcgcaaggatttcatggtgtattgtgacgcttcgcgccaaggattggggtgcgtgctcatgcaggatggtcatgtggtggcctatgcctcacgccagctacggcctcatgaaggcaactaccctacccatgatttggagttagctgcggtggttcatgctctaaaaatctggcggcactatctcattgggaatcgctgtgaaatatatactgatcataagagtttgaaatacatcttcacccagtcggatctgaaccttcggcaaaggagatggttagaactcatcaaggatcatgatgtgggaattcactatcatcctggtaaggccaacgtggtcgccgacgctctaagtcgaaagagccattgcaacactcttaacgtccgtggcatcccacccgaacttagtcaacagatggcagccctgaacctaagcatagttagtcgtggattcttggctgcgttggaagccaagcctaccttgctcgatcaaatccgcgaggctcagaagaatgatccggacatgcatggactcctcaagaatatgaaacagggtaaagccgctggtttcacagaggatgaacacggaaccctatggaacggaaatcgagtatgcgtcccagataacagagaacttaaacagctgatacttcaggaagcccacgaaagtccttattccatccaccctggcagtacgaagatgtacttagacttgaaggagaaatactggtgggttagtatgaagcgggaaattgcagagttcgtggcactttgtgatgtgtgccagcgtgtcaaggcagagcaccaacgaccggccggactcctccaacctctccaagtacctgaatggaaatgggatgaaattgggatggatttcatcaccggacttccaaagacccaaggtggatatgattctatatgggtagttgtggatcgattaaccaaggtagctcgatttattcctgtgaagaccacctatggagggaacaaactagccgagctctacttcgctaggatcgtgagtctccatggcgttcccaagaaaatcgtatctgataggggaagccaattcacctctcacttttggaagaagctccaagaagagctgggtacccgattaaacttcagcaccgcatatcacccgcagacagatgggcagaccgagcgtctaaatcagatcctagaagatatgcttcgcgcatgtgtcctagatatcgggaagacctgggataagagtctcccctatgccgagttctcctacaataacagctaccaagccagtatacaaatggcaccttatgaagcgttgtatgggtgcaaatgccggacaccgctcttgtgggaccaagttggggaaagccaagtgttcgggactgatatactgagagaagctgaagcgaaggtcagaaccattcgggataatctaaaggtggcacagtcccggcagaaaagttatgcaaataaccgtcgccgtaacctggaattcgcagtggatgattttgtgtaccttcgggtcacgccattgcgaggtgtacacaggtttcagacgaaagggaagctcgcacctcggtatgtgagtcctttccgtatcgttgcccgacgcggagaagtcgcttaccaattggagctgcccgcctccttgggcaacgtgcatgatgtgttccatgtgtcgcaactcaagaaatgccttcgagtgccatccgagcaggccgactcaaagcaaattgaagttcgcgaagacttgacctacgtggagaggccagtgaaaatcctggacaccatggagcgcaggaccaggaaccgggtaatccgtttttgcaaggtccagtggagcaaccacgccgaagaggaagctacctgggagcgtgaagacgagctgaaggcagcccatcctgatctcttcgccagttcttccgaatctcggggtcgagattccgtttaa

SEQ ID NO: 14178 - DNA, 4410 bp, Oryza sativa
  Clone ID: TFbOSC400477j.C1.o54.gm
atggttatgccgatggtgacgaccaggagaagtgctaacaccggtgatggcaaccaacccgaaggcagcaaccacaacaaccatggcagcccacctccacctcctcctccgcctccaccaccaccaccagacaccaacgccattctcacccaaatcctcgcccagcaggccaacatgatgactgctttcctccaccacctccaaaatccgccacaacagaatgctccaccaccacccccacaacactctaaactcgccgagttcctccgcatccgtccacctaccttctctagctccaacaaccccgtggatgtgttggattggttgcatgccgtggggaaaaagctagacaccgtgcagtgcagcgatgaggagaaagtcatcttcgccgcccaccaactgcaggggcccgcatctctatggtgggaccatttccaggctacgcagccagagggacagcctattacttgggcccgcttcaccgccgccttccggagaacccatgtgcccgccggagtcatggcccttaagaaaagggaattccgggagttgaagcaaggcaaccgctccgtgatggagtatttgcatgagttcaacaacctggcccggtacgccccggaggatgtacgggaagatgaggaaaggcagaagaagttcttggcaggaatggaccctgagctgtccgtgcgtctagtctccggtgactatccggatttccaacgtctggtggacaagagcatccgcttggaagccaagcacaaggaactggagtcgcacaagcgccgcttggcgaatttccgcaatcaacagggagctaaccaaaggatccgctacaccaatccctatccagggggatcgtcctcgcagcagcagcagcaaccacgctccgcgccccgacctcaattcgtggtgcgcgtcccacagccgcagcaacagcagagccagcaagggacctgtgcgccccgtcctcctacgccagccgcgcagtctggtcaaggccgcagggacgttcaaggtccgcagcgtctgtgcttcaactgcttcgagcctgggcactttgcggataaatgcccaaagccgaggcgccagcaaggccaagcgcctccccgctccaacaacggtggtaaggatgtcattcggggtcgtgtgaaccacgtgacggccgaggacgtgctgacaactccagacgtcatcgttgaactccatcagataggactgtcagaaatccccatcgtcagagagttcggagacgtgtttccggaagaactacccggtatgccgcccaagcgagagattgagttccggatagatcttgctccaggaaccactcctcggtacaagcgaccctaccgtatggcagcaaatgaactggccgaagtcaagaaacagttggaagagttgaaagaaaaggggtacatacgtccgagtacttccccctggggtgctcctgtgatttttgtggagaagaaagacaagacgaagaggatgtgcgttgactacagagctctcaatgaagtcaccatcaaaaacaagtaccctcttccccggatcgatgatctgttcgatcagcttaaaggtgccacggtattctccaagattgatcttcattccggatatcaccagttgcgcatccgtgaagaagatattccgaagaccgcattcaccacgcgatacggactgtatgaattcacggtgatgtcattcggtttaaccaatgctcctgccttcttcatgaacttaatgaacaaagtgttcatggaatacttggataagtttgttgtggttttcattgatgacattctggagaaatactggtgggttagtatgaagcgggaaattgcagagttcgtggccctttgtgatgtgtgccagcgtgtcaaggcagagcaccaacgaccggccggacttctccaacctctccaagtaccagaatggaaatgggatgaaattgggatggatttcatcaccggactcccaaaaacccaaggtggatatgattctatatgggtagttgtggaccgattaaccaaggtagctcggtttattcctatgaagaccacctatggagggaacaaactagccgagctctacttcgctaggatcgtgagtctccatggcgttcctaagaaaattgtatctgataggggaagccaattcacctctcacttttggaagaagctccaagaagagctgggtacccgattaaatttcagcaccgcgtatcacccgcagacagatggacagaccgagcgtctaaatcagatcctagaagatatgcttcgcgcatgtgtcctagatatcgggaagacctgggataagagtctcccctatgccgagttctcctacaataacagctaccaagccagtatacaaatggcaccttatgaagcgttgtatgggtgcaaatgccggacaccgctcttgtgggaccaagttggggaaagccaagtgttcgggactgatatactgagagaagctgaagcgaaggccgacttagagcaaattgaagttcgcgaagacttgacctacgtggagaggccagtgaaaatcctggacaccatggagcgcaggaccaggaaccgggggcgcgggcgcaccgcctcctgccgctgcgccggcgtggtcgccttcgggcgcaccgagcggctgccgcgtggggcccggctgtcagccgcccgcgcccttaggaccatgatcatcaccagttcagaatttactcctgaagacgcagcaaggatacccaagcttcaagttcttggccaagcacttttgctgatagctttcggctcgggagaaaacagacgcgaagagcaagtactgttcgatgtcgtcgacatcccgtacaactacaatgccatcctcggccgtgcgaccctgaaccagttcgaagccatttcccaccacaactatctcaagctcaagatacccggcccagcgggagtgatagtggtcaaggggcttcagccttcggccacgtcaaaaggcgatctggccataatcaacagggctgtgcacaatgtcgaagccgaattgcacagccggccgaaacacgcgccaaaacccacccctcacagcaagatagtaaaagtgcagattgacgatgccgaccccgcaaagctcatatcgctgggggacggcatgggcgaacaagaagctgagggcatcctagcggtgctcaagaagaacattgatatcttcgcctggagccccgacgaagtgggggttgtttcaacagacctcatcatgcatcaactggcaatcaagccggatgccaagccaagaaagcagaagttgtgtaagatgtccgccgatcgtcaagaggcggcgaaagccgaagtccaaaaactactcagggctggggtcattcaagagattgaccacccagagtggctggcgaatccagtactggtgcggaagtcaaacggcaaatggcgcatgtgtgtagatttcacggacctgaacaaagcatgtccgaaagacgatttccctttgccgcggattgatcagctcgtggattcaacagctggctacgaactcatgagtttcctggacgcatattccagctatcaccagatccatatgaacccgcccgacatcccgaaaacagcattcatcaccctgttgggcattttctgtcacctcaggatgcctttcggcctgaggaacgccggagcaaccttcgccagactagtgtacaaggagaccttcgacaacttgcgcgcagcgggcataaaactgaatcctgagaagtgtgtcttcggcattcgcgcgggcaagttgctgggtttcctggtttccgaaagaggcatcgaagcgaaccccgagaaaatcgacgccattcagcaaatgaagcccccgtcaagtgtacatgaggtacaaaagcttgcaggccgaattacggcacttagccggttcctcccaaaggtggccgaaagaggtctgccattcttcaagaccctccggggcatgggaaagttcagttggacaccagaatgccaagcagcattcgacgagctaaagcaatacttgcaaagcccaccagccctcataagcccaacactaggaagcgaactgctgctatacttagcagcttcaccagtggcagtcagtgctgccctcgtccaagaaacagagttcggccagaaaccggtttattttgtctccgaagcactgcaaggggcgaaggcaagatacatcgaaatggaaaagctcgcttacgccctggtgatggcttcgcgcaagctcaagcactacttccaggcccacaaagtaatagtgccttcacagtaccccttgggcgaaatactccgaggcaaggaaatctcaggcaggcttagcaaatgggcggcagagctatccccgttcgacttgcattttgttgcacgcactgctgttaagtctcaagcctaa

SEQ ID NO: 14179 - DNA, 5577 bp, Oryza sativa
  Clone ID: TFbOSC400482j.C1.o1.fg
atggccaatctcaaccctaatccgctgcgcttcctaatgcatggtcttgttgttcatgctggaggtgacttccgcatcccgcgggttgacctcactgtcccgcaacgccctgctcggcgccatgaagacttctatgtggccattgtagagccaatccccttggagcaggactgggatcatcatcgggccctcattgcaaacttcgttcaagatgagctacactatgaggtttgtaacagcttctggtacccgtctgtagtaggtttcttccagatgaggtctgccatgaatagggatgctctggtcctctccccgcccgagttctatgatggggttcactctgttatttttgttaatcatgaccaatgtcctaattggagggcggctaactaccatagagaaggctggttcatgttcctagatttcccgcttgatttcattgatcgccatcatgtgcaccaggcagttacctcttttggggctcagtcctgcctgcctgtcccgggggttccggccgtaggcgggattgggtcggtactcttgtctatggctaggatgggttggaaactatgtcacgtcttccgtctgtataccgtggtgatggccggcagcgtcacccgtcgtggtttggacatgactggcttcgtcttggagctgcgcggcatgtgcgttgtcttagggtatccacatggagtgggctaccaggccaggccgctcccggagcaggagggtgaggacgcggagccccacgctggttgggaggtcactgcagtgatcctcgctggctcttctgagcggacttcgctgacagtcaccgcgggtggcgactccttccccgccgcttgccagaacgccgctctcctcgccatcggcactcttcaccagcgctacccggacgagttgcagcactcgccctaccgctaccaccctcgtcgcggaggagcccgcgactacgccaccttccgggatgctagctcggaggatgacgctaccgtcgtgcatctggcacgcatggtggaggcatacgacgcggctcgtatcgacttccatcagatggtgcgtcgtgggatggtcgagaacaacctgaagatcctggagctgcgtcaagagaacctgcagctcaggaaggacctcgacgcagtggaggcgcaactgcatcagctcaagatcgcccagggagagatctgccgccccaagcgtcgccgcgtctgccgcagccagaagatcaccgcccgcaagagcacctccaggcctgagctagtccgtcagtccctggcgtggacctgcttcgtcgagacccctcgtgccgagcctgcgcccgtgatggtgacgaccaggagaaacactgttaccggtgatggcaaccaacctgaaggcagcaaccacaaccaccagggcaacccacctccacctccaccttcttctccaccaccaccaccagacaccaacgccattctcacccaaatcctcgcccagcaagccaacatgatgaatgctttcctccaccacctccaaaatccaccacaacagaatgtttcaccaccaccttcccaacactctaaactcgccgagttccttcgcatccgcccacctaccttctctagctccaacaaccccgtggatgcgttggattggttgcatgccgtggggaaaaagctagacacggatgtgcggggagatgaggagaagcaagagaagttcctggcaggaatggaccttgagctgtccgtccgcctagtctctggggactatccggatttccaccgactggtggacaagagcatccgcttggaagccaagcacaaggaactggagtcgcacaagcgccgcttggcgaatttccgcaatcaacagggtgctaaccagagggtccgctacaccaatccctatccagggggatcctcctcgcagcagcaacaacagcagcagcaacctcgcccagcgcctcgacctcaattcgtggtgcgtgtcccacagccgcagcaacagcagaatcaacaagggactcgtgcgccccgtcctcctacgccaactgtgccgcctggtcaaggccgcagggacgctcaaggtcagcagcgtctgtgcttcaactgcttcgagcccgggcactttgcggataaatgcccaaagccaaggcgtcagcaaggccaagctcctccccgctccaacaacggcgggaaggatgtcattcggggtcgtgtgaatcacgtgacggccgaggacgtgctgacaactccagacgtcatcgttggtacgttcctcgttcattccatccctgctacaattttgttcgactctggagcttcccactcgtttatatctgtgccattcgtggggagaaatcagttgggggtagaaaggcttaggaaccctctgctcatcaccacccctggaggggttatgacagcaaagtattatagccctgccgtccctatagaaattcaggggattccttttccctcggatctgattcttctagacaccaagaacttggatgtgatccttgggatgaattggttggctcaattccaaggagtagtggattgcgcgagacgcactgtcactctgtaccgagggccggaacaaccggttgttttctttgcacccccaacctctgtcagaagttcagaacttcatcagataggactgtcagaaatccccatcgtcagggagttcggagacgtgtttccggaagaactacccggtatgccgcccaagcgagagattgagttccggatagatcttgctccaggaaccactcctctgtacaaacgaccctaccgtatggcagcaaatgaactggccgaagtaaagaaacagctggaagagttgaaagaaaaggggtacatacgtccgagtacttccccatggggtgctcctgtgatttttgtagagaagaaagacaagacgaagaggatgtgcgtcgactacagagctctcaatgaagtcaccataaaaaacaagtaccctcttccccggatcgatgatctgttcgatcagctcaaaggtgccactgtattctccaagattgatctccgttccggatatcaccaattacgtattcgtgaagaagatattgcgaagaccgcattcaccacgcgatacgggctgtatgaattcacggtgatgtcattcggtttgaccaatgcacctgccttcttcatgaacttaatgaacaaagtgttcatggaatacttggataagtttgttgtggttttcattgatgacattctgatatactcacaatcagaggaagaccatcagcaccatctccgtctggtgttgggaaagctgcgggaacatcaattgtatgccaaacttagcaagtgtgagttctggttgtccgaagtcaaattcttagggcacgtgatatctgctaaaggagttgctgtggaccccgaaatagtgaccgctgtcactgattggaagcaacctaagacagtcactcaagtccgcagtttcttaggtttggcaggatactaccggaggttcatcgagaacttctccaaaatcgctcgacccatgacacagttgttgaagaaagaagagaaatttgtgtggagcccgcaatgcgagaaggcgttccaaactctcaaagaaaagctggtttcctcgccggtgttaatcttgccggatactcgcaaggatttcatggtgtattgtgacgcttcgcgccaaggattggggtgcgtgctcatgcaggacggtcatgtggtggcctacgcctcacgtcagctacggactcacgaaggcaactaccctacccatgacttggagttagccgcggtggtgcatgctctaaaaatctggcggcactatctcattgggaatcgctgtgaaatatatactgaccataagagtttgaaatacatcttcacccagtcggatctgaatcttcggcaaaggagatggttagaactcatcaaggattatgatgtgggaattcactatcatcctggtaaggccaacgtggtcgccgacgctctaagtcgaaaaagccattgcaacactcttaacgtccgtggcatcccgcccgaacttaatcaacagatggaagccctgaacctaagcatagttggtcgcggattcttggctacgttggaagccaagcccaccttgctcgatcaaatccgcgaggctcagaagaatgatccggacatgcatggactcctcaagaatatgaaacagggtaaagccgctggtttcacagaggatgaacacggaaccctatggaacggaaatcgggtatgcgttccagataacagagaacttaaacagctggtacttcaggtagctcacgaaagtccttattccatccaccctggcagtacgaagatgtacttagacttgaaggagaaatactggtgggttagtatgaagcgggaaattgcagagttcgtggccctatgtgatgtgtgccagcgtgtcaaggcagagcaccaacgaccggccggacttctccaacctctccaagtaccagaatggaaatgggatgaaattgggatggatttcatcaccggacttccaaaaacccaaggtggatatgattctatatgggtagttgtggatcgattaaccaaggtagcccgatttattcctgtgaagaccacctatggagggaacaaactagccgaactctacttcgctaggatcgtgagtctccatggcgttcccaagaaaatcgtatctgataggggaagccaattcacctctcacttttggaagaagctccaagaagaactgggtactcgattgaatttcagcaccgcctatcacccgcagacagatggacagaccgagcgtctaaatcagatcctagaagacatgcttcgtgcatgtgtactagatttcgggaagacctgggataagagtctcccctatgccgagttctcctacaataacagctatcaatccagcatacaaatggcaccttatgaagcgttgtacgggcgcaaatgccggacaccactcttgtgggaccaagtaggagaaagccaagtgttcgggactgatatcctgagagaagctgaagctaaagtcagaatcattcgggataatctaaaggtggcacagtcccggcagaaaagttatgcagataaccgccgccgtgacctggaattcgcagtggatgactttgtgtatcttcgggtcacgccattgcgaggtgtacacaggtttcagacgaaagggaagctcgcacctcggtatgtgggtcctttccgtatcgttgctcgacgcggagaagtcgcttaccaattggagctgcccgcttccttgggcaacgtgcatgatgtgttccatgtgtcgcaactcaagaagtgtctccgagtgccatccgagcaggccgactcagagcaaattgaagttcgcgaagatttgacctacgtggagaggccagtgaaaatcctggacaccatggagcgcaggaccaggaaccgggtaatccgtttttgcaaggtccagtggagcaaccacgccgaagaagaagctacttgggagcgtgaagacgagctgaaggcagcccatcccgatctcttcgccagttcttccgaatctcggggtcgagattccgtttaa

SEQ ID NO: 14180 - DNA, 5544 bp, Oryza sativa
  Clone ID: TFbOSC400486j.C1.o8.fg
atggagatggatgaagtcgggggtcgatggacattctccagggcagatgaaggctacacgagctgcggcccggtagtcgagatgtcatggcacagggccggtgtcctgctgctaggggctcagtcctgcctgcctgtcccgggggttccggccgtaggtaggattgggtcggtactcttgtctatggctaggatgggttggaaactatgtcacgtcttctgtctgtataccatggtgatggccggcagcgtcacccgtcgtggtttggacatgactggcttcgtcttggagctgcggggcatgtgcgtggtcctggggtatccgcatggagtggactaccaggccaggccgcttccggagcaggagggtgacgatgcagagccccacgctggttgggaggttactgcagtgatcctctctggctctcccgagcggacttcactggcagtcaccgcgggtggagattccttccccgccgcttgccagagcgccgctctcctcgccatcggcactcttcaccagcgctacccggacgagttgcagcactcgccctatcgctaccaccctcgtcgcggaggagcccgcgactacgccaccttccgggatgctagctcggaggatgacgctaccatcgtgcacctggcgcgcatggtggaggcgtacgacgcggctcgtatcgacttccatcagatggtgcgccgtgggatggtcgagaacaacttgaagatcctggagctgcgtcaggagaacctgcagctccagaaggacctggacgcggtggaggcgcagctgcatcagctcaagatcgcccagggagaggtctgtcgccccaagcgccgccgcgtctgccgcagccagaagatcaccgcccgcaagagcacctccaggcccgagcttgttcgtcagtccctggcgtggacctgcttcatcgagacccctcgtgccgagcccgcgcccgtggttccccaggagggggaaacctccggcgttggtagcacggaggatgcgctgttgctcaccttccgtcctggcccatcgcagcggagaagtgctaacaccggtgatggcaaccaactcgaaggcagcaaccacaaccaccagggcaacccacctccacctcctcctccgcctccaccaccaccaccagataccaacgccattctcacccaaatcctcgcccagcaggccaacatgatgactgctttcctccaccacctccaaaatccgccacaacataatgctccaccaccacctccccaacactctaaactcgctgagttcctccgcatccgcccacctaccttctctagttccaacaaccccgtggatgcgttggattggttgcatgccgtggggaaaaagctagacattgtgcagtgcagcgatgaggagaaagtcatcttcgccgcccaccagctgcaggggcccgcatctctatggtgggaccatttccaggctacgcagccagaggggcaacctatcacttgggctcgcttcaccgccgctttccggagaacccatgtgcccgccggagtcgtggcccttaagaaaagggagttccgagagttgaagcagggcaaccgctccgtgatggagtatttgcatgagttcaacaacctggcccgttacgctccggaggatgtgcgggaagatgaggagaagcaagagaatttcttggcaggaatggaccctgagctgtccgtccgtctagtctccggggactatccggatttccaacgtctggtggacaagagcatctgcttggaagccaagcacaaggaactggagtcgcacaagcgccgcttggcgaatttccgcaatcaacagggtgccaaccaaagggtccgctacaccaatccctatccagggggatcctcctcgcagcagcagcagcagcaacctcgccccgcgcctcgacctcaattcgtggtgcgcgtcccacagccgcagcagcagcagaatcaacaagggactcgtgcgccccgtccacctacgccaactgtgcagcctggtcaaggccgcagggacgctcaaggtccgcagcgtctgtgcttcaactgcttcgagcccgggcactttgcggataaatgcccaaagccgaggcgccagcaaggccaagcgcctccccgctccaacaatggtgggaaggatgtcattcggggtcgtgtgaaccacgtgacggccgaggacgtgctgacaactccagacgtcatcgttggtacgttcctcattcattccatccctgctaccattttgttcgactctggagcttcccactcgtttatatctgtgccattcgtggggagaaatcagttgggggtagaaaggcttaggaaccctctgctcatcaccacccctggaggggttatgacagcaaagtattatagccctgccgtccctatagaaattcaggggattccttttccctcggatctgattctgctagacaccaagaacttggatgtgatccttgggatgaattggttggctcaattccaaggagtagtggattgcgcgagacgcaccgtcactctgtaccgagggccggaacaaccggttgttttctttgcatccccaacctctgtcagaagttcagaactgcatcagattggactgtcagaaatccccatcgtcagagagttcagagatgtgtttccggaagaactacccggtatgctgcccaagcgagagattgagttccggatagatcttgctccaggaaccactcctctgtacaagcgaccctaccgtatggcagcaaatgaactggccgaagtcaagaaacagttggaagagttgaaagaaaaggggtatatacgcccgagtacttccccctggggtgctcctgtgatttttgtggagaagaaagacaagacgaagaggatgtgcgttgactacagagctctcaatgaagtcaccatcaaaaacaagtaccctcttccccgaatcgatgatctgttcgatcagcttaaaggtgccactgtattctccaagatcgatcttcgttccggatatcaccaattacgtattcgtgaagaagatattcctaagaccgcattcaccacgcgatacggactgtatgaattcacggtgatgtcgttcggtttaaccaatgcacctgccttcttcatgaacttaatgaacaaagtgttcatggaatacttggataagtttgtcgtggttttcattgatgacattctgatatactcacaatcagaggaagatcatcagcaccatctccgtctggtgttgggaaagttgcgtgaacatcaattgtatgccaaacttagcaagtgtgagttctggttgtccgaagtcaaattcttagggcacgtgatatctgctaaaggagttgctgtggaccccgaaacagtgaccgctgtcaccgattggaagcaacccaagacagtcactcaagtccgcagtttcttaggtttggcaggatactaccggaggttcatcgagaacttctccaaaatcgctcgacccatgacacagttgttgaagaaagaagagaagtttgtgtggagcccgcaatgtgaaaaggcgttccaaactctcaaagaaaagctggtttcctcaccagtgctaatcttgccagatactcgcaaggatttcgtggtgtattatgatgcttcgcgccaaggattggggtgcgtgctcatgcaggacggtcatgtggtggcctatgcctcacgccagctacggcctcatgaaggcaattaccctacccatgatttggagttagccgctgtggttcatgctctaaaaatctggcggcactatctcattgggaatcgctatgaaatatatactgatcataagagtttgaaatacatcttcacccagtcggatctgaatcttcggcaaaggagatggttagaactcatcaaggattatgatgtgggaagtcactatcatcctggtaaggccaacgtggtcgccgacgccctaagtcgaaaaagccattgcaacactcttaacatccgtggcgttccacccgaacttaatcaacagatggaagccctgaacctaagcatagttggtcgcggatttttggctgcgttggaagccaagcccaccttgctcgatcaaatccgcgaggctcagaagaatgacctggacatgcatggactcctcaggaatatgaaacagggtaaagccgctggtttcacagaggatgaacacggaaccctatggaacggaaatcgggtatgcgttccagataacagagaacttaaacagctgatacttcaggaagctcacgaaagtccttattccatccaccctggcagtacgaagatgtatctagacttgaaggagaaatactggtgggttagtatgaagcgagaaattgcagagttcgtggccctttgtgatgtgtgccagcgtgtcaaggaagagcaccaacgaccggccgggcttctccaacctctccaagtaccggaatggaaatgggatgaaattgggatggatttcatcaccggacttccaaaaacccaaggtggatatgattctatatgggtagttgtggatcgattaaccaaggtagcccgatttattcctgtgaagaccacctatggagggaacaaactagccgagctctacttcgctaggatcgtgagtctccatggcgttcccaagaaaatcgtatctgatcggggaagccaattcacctctcacttttggaagaagctccaagaagagctgggtacccgattaaatttcagcaccgcgtatcacccgcagacagatggacagaccgagcgtctaaatcagattctagaagatatgcttcgcgcatgtgtcctagatttcgggaagacctgggataagagtctcccctatgccgagttctcctacaataacagctatcaagccagcatacaaatggcaccctatgaagcgttgtatgggcgcaagtgccggacaccgctattgtgggaccaagctggcgaaagccaagtgttcgggaccgatatcctgagagaagctgaagcgaaggtcagaaccattcgggataatctaaaggtggcacagtcccggcagaaaagttatgcagataaccgtcgccgtgatctggaattcgcagtggatgactttgtgtatcttcgggtcacgccattgcgaggtgtacacaggtttcagacaaagaggaagctcgcacctcggtatgtgggtcctttccgtatcattgctcggcgcggagaagtcgcatatcggctggagctgcccgcctctttgggcaacgtgcatgatgtgttccatgtgtcgcaactcaagaaatgtcttcgagtgccatccgagcaggccgactcagagcaaattgaagttcgcgaagacttgacctatgtggagaggccagtgaaaatcctggacaccatggaacgcgggaccaggaaccgggtaatccgtttttgcaaggtccagtggagcaaccacgccgaagaagaagctacctgggagcgtgaagacgagctgaaggcagcccatcccgatctcttcgccagttcttccgaatctcggggtcgagattccgtttaa

SEQ ID NO: 14181 - DNA, 6049 bp, Oryza sativa
  Clone ID: TFbOSC400492j.C1.o14.np
atggcggccggatcttccgcggccgattccccctcatccggccgctctctccccctcccaacactatataaacgctccccgtgcctccctccaccgtttccgccactcgccgccctctctccccgtcggaatcgagctcgcgccgtcgttctctctctccgtcgtcgccgccgagctccggtccgccgccgtcgtcgccccggaccttctcccgcctcggcgtcgcctccttcgtctccgccgcgtcctcgccgacctcgtccacccctccgtttcgcccgccgaccgccggaacgccgccgtccccgtcgacccgtgccgcgccgccgccttcctccgctccggtcgccgttcccgtcgtcgccgtcgacccggggtgagccgtggaccgccgttttgtttcccccttccctcccctctctcgggcgccgctccgccgcgctggtggtcgccggcggagaccatcggggcgcgggcgcgtcgcctcccatcggctgtgccggcgaggccgcttcgggcgcgccccgcggctgccatgtggggcccggccgtcagccgcccgcgccctcgggtgcggctgacgcgtgggacccacggcgccggccggcgtaagccgcgtgcacccggtccaccgtggacccaccccggccatataaggaccggtcttcgggcctctgttgcaaagcactaccgtacttccacatgtctagtgggacaaatgaaggctacacgagctgcggcccggtagtcgagatgtcatggcacagggccggtgtcctgctgctaggggctcagtcctgcttgcctgtcccgggggttccggccgtaggtgggattaggtcgatgtacacctctgatcagagtaaaacctattcgaatagccgcgccctcggttatgggcaagccgagcaatgtacccaaatggccggcagcgtcacccgtcgtggtttggacatgactggcttcgtcttggagctgcgcggcatgtgcgttgtcttagggtatccacatggagtggactaccaggccaggccgcttccggagcaggagggtgatgatgcggagccccgcgctggttgggaggtcactgcagtgatcctcgctggctcttctgagcggacttcgctgacagtcaccgcgggtggcgactccttccccgccgcttgccagaacgccgctctcctcgccatcggcactcttcaccagcgctacccggacgagttgcagcactcgtcctaccgctaccaccctcgtcgcggaggagcccgcgactacgccaccttccgggatgctagctcggaggatgacgctaccgtcgtgcatctggcacgcatggtggaggcatacgacgcggctcgtatcgacttccatcagatggtgcgtcgtgggatggtcgagaacaacctgaagatcctggagctgcgtcaagagaatctgcagctcaagaaggacctcgacgcagtggaggcgcagctgcatcagctcaagatcgcccagggagaggtctgccgccccaagcgtcgccgcgtctgccgcagccagaagatcaccgcccgcaagagcacctccaggcccgagcttgtccgtcagtccctggcatggacctgcttcgtcgagaccccttgtgccgagcctgcgcccgtggttccccaggagggggaagcctccggcgttggtagcacggaggatgtgctgttgctcaccttccatggtgacgaccaggagaaacgctgttaccggtgatggcaaccaacctgaaggcagcaaccacaaccaccagggcaacccacctccacctccacctcctcctccaccaccaccaccagacaccaacgccattctcacccaaatcctcgcccagcaagccaacatgatgaatgctttcctccaccacctccaaaatccaccacaacagaatgctccaccaccacctccccaacactctaaactcgccgagttcctccgcatccgcccacctaccttctctagctccaacaaccccgtggatgcgttggattggttgcatgccgtggggaaaaagctagacacggtgcagtgtaccgatgaggagaaagtcatcttcgccgcccaccaactgcaggggcccgcatctctctggtgggaccacttccaggctacgcagccagagggacagccgattacttgggcccgcttcaccgccgctttccggagaacccatgtgcccgctggagtcgtggcccttaagaaaagggaattccgagagttgaagcaaggcaaccgctccgtgctggagtatttgcatgaattcaacaatctggcccgttacgctccggaggatgtgcggggagatgaggagaagcaagagaagttcctggcaggaatggaccctgagctgtccgtccgcctagtctctggggactatccggatttccaacgactggtggacaagagcatccgcttggaagccaagcacaaggaactggagtcgcacaagcgccgcttggcgaatttccgcaatcaacagggtgctaaccagagggtccgctacaccaatccctatccagggggatcctcctcgcagcagcaacaacagcagcagcaacctcgcccagcgcctcgacctcaattcgtggtgcgtgtcccacagccgcagcaacagcagaatcaacaagggactcgtgcgccccgtcctcctacgccaactgtgccgcctggtcaaggccgcagggacgctcaaggtcagcagcgtctgtgcttcaactgcttcgagcccgggcactttgcggataaatgcccaaagccaaggcgtcagcaaggccaagcgcctccccgctccaacaacggcgggaaggatgtcattcggggtcgtgtgaatcacgtgacggccgaggacgtgctgacaactccagacgtcatcgttggtacgttcctcgttcattccatccctgctacaattttgttcgactctggagcttcccactcgtttatatctgtgccattcgtggggagaaatcagttgggggtagaaaggcttaggaaccctctgctcatcaccacccctggaggggttatgacagcaaagtattatagccctgccgtccctatagaaattcaggggattccttttccctcggatctgattctgctagacacaaagaacttggatgtgattcttggaatgaattggttggctcaattccaaggagtagtggattgcgcgagacgcactgtcactctgtaccgagggccagaacaaccggttgttttctttgcacccccaacctctgtcagaagttcagaacttcatcagataggactgtcagaaatccccatcgtcagggagttcggagatgtgtttccggaagaactacctggtatgccgcccaagcgagagattgagttccgaatagatcttgctccaggaaccactcctctgtacaagcgaccctaccgtatggcagcaaatgaactggccgaagtaaagaaacagttggaagagttgaaagaaaaggggtatatacgtccgagtacttccccatggggtgctcctgtgatttttgtagagaagaaagacaagacgaagaggatgtgcgttgactacagagctctcaatgaagtcaccatcaaaaacaagtaccctcttccccggatcgatgatctgttcgatcagcttaaaggtgccactgtattctccaagattgatctccgttccggatatcaccaattacgtattcgtgaagaagatattccgaagaccgcattcaccacgcgatacgggctgtatgaattcacggtgatgtcgttcggtttgaccaatgcacctgccttcttcatgaacttaatgaacaaagtgttcatggaatacttggataagtttgttgtggttttcattgatgacattctgatatactcacaatcagaggaagaccatcagcaccatctccgtctggtgttgggaaagttacgggaacatcaattgtatgccaagcttagcaagtgtgagttctggttgtccgaagtcaaattcttagggcacgtgatatctgctaaaggagttgctgtggaccccgaaacagtgaccgccgtcaccgattggaagcaacccaagacagttacccaagtccgtagtttcttaggtttggcaggatactaccggagattcatcgagaacttctccagaatcgctcgacccatgacacggttgttgaagaaagaagagaaatttgtgtggagcccgcaatgcgagaaggcgttccaaactctcaaggaaaagctagtttcctcgccggtgttaatcttgccggatactcgcaaggacttcatggtgtattgtgatgcttcgcgccaaggattggggtgcgtgctcatgcaggatggtcatgtggtagcctatgcctcccgtcagcttcgaccgtatgaaggcaactaccctacccatgacttggaattagccgcagtggttcatgctctaaaaatctggcggcactatctcattgggaatcgctgtgaaatatataccgaccataagagtctgaaatacatcttcacccagtcggatctgaatcttcggcaaaggagatggttagaactcatcaaagattatgatgtgggaattcactatcatcctggtaaggccaacgtggttgccgacgctctaagtcgaaagagccattgcaacactcttaacgtccgtggcattccacccgcacttaatcaacagatggaagccctgaacctaagcatagttggtcgtggattcttggctgcgttggaagccaagcctaacttgctcgatcaaatccgcgaggcttagaagaatgatccggacatgcatggactcctcaagaagatgaaacagggtaaagccgctggtttcacagaggatgaacacggaaccctatggaacggaaagcggcgtgtcaaggcagagcaccaacgaccggccggacttctccaaccactccaagtacccgaatggaaatgggatgaaattgggatggatttcatcaccggacttccaaaaacccaaggcggatatgattctatatgggtagttgtggatcgattaaccaaggtagcccgatttattcctgtgaagaccacctatggaggaaacaagctagccgagctctacttcgctaggatcgtgagtctccatggcgttcccaagaaaatcgtatctgataggggaagccaattcacctctcacttttggaagaagctccaagaagaactgggtactcgattgaatttcagcaccgcctatcacccgcagacagatggacagaccgagcgtctaaatcagatcctagaagacatgcttcgcgcatgtgtactagatttcgggaagacctgggataagagtctcccctatgccgagttctcctacaataacagctatcaatccagcatacaaatggcaccttatgaagcgttgtacgggcgcaaatgccggacaccactcttgtgggaccaagtaggagaaagccaagtgttcgggactgatatcctgagagaagctgaagctaaagttagaatcattcgggataatctaaaggtggcacagtcccggcagaaaagttatgcagataaccgccgccgtgacctggaattcgcagtggacgactttgtgtatcttcgggtcacgccattgcgaggtgtacacaggtttcagacgaaagggaagctcgcacctcggtatgtgggtcctttccgtatcgttgctcgacgtggagaagtcgcttaccaattggagctgcccgcctccttgggcaacgtgcatgatgtgtttcatgtgtcgcaactcaagaagtgtctccgagtgccatccgagcaggccgactcagagcaaattgaagttcgcgaagatttgacctatgtggaaaggccagtgaaaatcctggacaccatggagcgcaggaccaggaaccgggtaatccgtttttgcaaggtccagtggagcaaccacgccgaagaagaagctacctgggagcgtgaagacgagctgaaggcagcccatcccgatctcttcgccagttcttccgaatctcggggtcgagattccgtt

SEQ ID NO: 14182 - DNA, 2142 bp, Oryza sativa
  Clone ID: TFbOSC400534j.C1.o1.fg
atgtcatggcagagggttggtgccctgctgctaggggctcagtcttgcctgcctgtcccgggggttccggccatggccggcagcgtcacccgtcgtggtttggacatgactggcttcgtcttggagctgcgaggcatgtgcgtggtcttggggtatccacatggagtggactaccaggccaggccgcttccggatcaggagggtgacgacgcggagccccacgctggttgggaggtcactgcagtgatcctctctggctcccccgagcggacttcgctggcagtcaccgcgggtggagattccttccccgccgcttgccagaacgccgctctcctcgccatcggcactcttcaccagcgctacccggacgagttgcagcactcgccctaccgctaccaccctcgtcgcggaggagcccgcgactacgccaccttccgggatgctagctcggaggatgatgctaccgtcgtgcacctggcgcgcatggtggaggcgtacgacgcggctcgtatcgacttccatcagatggtacgccgcgggatggttgagaacaacatgaagatcctggagctgcgtcaggagaacctgcagctcaagaaggacctcgacgcggtggaggcgcagctgcatcagctcaagatcgcccagggagaggactgccgccccaagcgtcgccgcgtttgccgcagccagaagatcaccgcccgcaagagcacctccaggcccgagctggttcgtcagtccctggcgtggacctgctttgtcgagacccctcgtgccgagcccgcgcccgtggttccccaggagggggaagcctccggcgttggtagcacggagggcagcaaccacaaccaccagggcaacccacctccacctcctcctccgcctccgccaccaccaccagacaccaacgccattctcacccaaatcctcgctcagcaagccaacatgatgactgctttcctccaccacctccaaaatccgccacaacagaatgctccaccaccacctccccaacactctaaactcgccgagttcctccgcatccgcccacccaccttctctagctccaacaaccccgtggatgcgttggattggttgcatgccgtggggaaaaagctagacacggtgcagtgtagcgatgaggagaaagtcatcttcgccgcccaccaactgcaggggcccgcatctctatggtgggaccacttccaggctacgcagccagagggacagcctattacttgggcccgcttcaccgccgctttccggagaacccatgtgcccgctggagtcgtggctcttaagaaaagggaattccgagagttgaagcaaggcaaccgctccgtgatggagtatttgcatgagttcaacagtctggcccgttatgccccggaggatgtgcgggaagatgaggagaagcaagagaagttcttggcaggaatggaccctgagctgtccgttcgtctagtctctggggactatccggattttcaacgactggtggacaagagcatccgcttggaagccaagcacaaggagctggagtcgcacaagcgccgcttggcgaatttccgcaatcaacagggtgctaaccaaagggtccgctacaccaatccctatccagggggatcctcctcgcagcagcagcagcagcaacaacctcgctccgcgcctcgacctcaattcgtggtgcgcgtcccacagccgcagcagcagcagaatcagcaagggactcgtgcgccccgtcctcctacgccaactgtgcagcctggtcaaggccgcagggacgctcaaggtcagcagcgtctgtgcttcaactgcttcgagcccgggcactttgcggataaatgcccaaagccaaggcgtcagcaaggccaagcgcctccccgctccaacaacggtggaaaggatgtcattcggggtcgtgtgaatcacgtgacggccgaggacgtgctgacaaccccagacgtcatcgttggtacgttcctcattcattccatccctgctaccattttgttcgactctggagcttcccactcgtttatatctgtgacattcgtggggagaaatcagttgggggtagaaaggcttaggaaccctctgctcatcaccacccctggaggggttatgacagcaaagtaa

SEQ ID NO: 14183 - DNA, 6056 bp, Oryza sativa
  Clone ID: TFbOSC400675j.C1.o46.np
atggcggccggacctcccgcgccggtttccttcccctccggccgctctctgccccttccaaccctatttaaaccctccccgcgcctccctcgcccgtttccgccccttgccgcaccgtctccccgccggaatcgagctcgcgccgtcgccccctctctcctccgtcgccgacgacctccggccggccttctccgctcgccgggaccgtctcccgccctggcgtcgcctcctccggcttcgccgcaccgccgtcgaccacgtccaccccctcgccgagtccgccgaccgccggaacgccgtcgaccccgtcgacctgagccgcgccgccgccttcctccgctccggccgcctttttcgtcgtcgccgtcgacctagggtgagccgtggaccgccgcctcttttgccccttcccttcccctctctcggccgccgctccgccgtgcctgtggccgccgccggcgaccataggggcgcgggggccgcctcccgccggccgcgccgagtggccgccttcgggcgcgccgagtggccgccgcgtggggcccggccgtcagccgcccgcgccctcgggtgcggctaacgcgtggggcccacggcgccggccggtgcgagcccgggtgcgcccggtcaaccgtggaccggtctaatatttgttttcaccggggtcatagctagtaaaataaagaggatatgagaggttaaaataaaatcatcggggtctactgaccccggtaattgactgtaccttcgcccctgcttcaaatggccataacttggccatttgaactcggaattggaccgttcaagtctcttttttttccttaagaagtcaagaacccatttttgtgctttgttcctgcttgttatatggagtttattagagtaaaagcccttttattttccgttggtcgtgtagacttttgtttgtagatggccggcagcatcaaccgtcgtggtctggacctgactggtttcgttttggagctgcggggcatgtgcgttgccttggggtatccgcatggagtggactaccagggcaagcaactcccggagcaagagggtgacgatgcagagccccacgctgcttgggaggtcactgcagtgatcctcactggctcacccgagaggacttcgttggcagtcaccgcgggtggagattccttctccgctgcatgccagaacgccgcactcctcgccatcggcactcttcaccagcgctacccggacgagttgcagcactcgccctaccgctaccaccctcgtcacggaggagcccgcgactacgccaccttccgggatgctagctcggaggatgacgctaccatcatgcacctggcacgcatggtggaggcgtacgacgcggcccgtatcgacttccaccagatggtgcgccgcgggttggtcgagaacaacatgaagatcctggagctgcgtcaggagaatctacagctgaagaaggacctagacgcagtggaggcgcagctgtgtcagctcaagatcacccagggagaggtctgtcgccccaagggccgccgcgtttgccgcagcttgaagatcaccgcccgcaagagtacctccaggcccgagcttgttcgtcagtccttggcatggacctgtttcgtcaagacccctcgtgccgagcccgcgcccgtggttccgcaggaggagggagcctctggcgttggcagcacggaggcttgcgcgtgtgttcttctcatggtgacaaccaggagaagtgctgctaccggtgatggcaaccaacccgaaggtagcaaccccaacatccaaggcggcccacctccacctcctcccccgcctctaccaccaccaccagacatcaactccatcctcacccaaatcctcgcccagcaggccaacatgatggctgctttcctccatcacatccaaaatccgccacagcataatgctccacctccaccaccacccccacaacactctaaactcgccaagttcctccgcatccgtccgcctaccttctctagctccaataaccccgtggatgctttggattggttgcatgccgtggggaaaaagttagacaccgcgcagtgcaacgatgaggagaaagtcatctttgccgctcaccaactgtaggggcccgcatctctatggtgggaccacttccaggctacgcagccagaggggcggcctattacttgggcccacttcaccgccgctttccagaggacccatgtgcccgccggagtcatggcccttaagaaaagggaattccgagagttgaagcaaaggcaaccgctctgtgatggagtatttgcacgagtttaacaacttggcccggtacgccccggaggatgttctgaagatgaggagaagcaagagaagttcttggcaggaatggaccctgagctgtccgtgcgtctggtctccggggactatccggatttccaacgtctggtggacaagagcatccgcttggaagccaagcacaaggaactggagtcgcacaagcgtcgcttggcgaatttccgcaatcaacagggggttaaccaaagggtccgctacaccaatccctatccagggggatcctcctcgcagcagcagcagcagcaacaccacgctccatgccccgacctcaattcgtggtgcgcgtcccacagccgcagcaacagcagagtcagcaagggacccgtgcgccccgtcctccctgcgcccgttgtgcagcctggtcaaggccgcagagacgttcaaggtcagcagcgtctgtgcttcaactgcttcgagcccgggcactttgcggataaatgcccaaagccgaggcgccagcaaggccaagcgcctccccgccccaataacggtggtaaggatgtcattcggggtcgtgtgaaccacgtgactgctgaggatgtgctgacaactccagacgtcatcgttggtacgttcttcattcattccatccctgctaccattttgttcgactctggagcttcccactcatttatatctgtgccattcgtggggagaaatcagttgggggtagaaaggcttaggaaccctctgctcatcaccacccctggaggggttatgacagcaaagtattatagccctgtcgttcctatagaaatccagggaattccttttccctcggatctgattcttctagacaccaagaacttggatgtgatccttgggatgaattggttggctcaattccgagtagtggattgcgcaagacgcactgtcactctgtaccgagggccagaacaaccggttgttttctttgcacccccaaccactgtcggcagttcagaacttcatcagataggactgtcagaaatccccatcgtcagtgagttcggagatgtgtttccggaagaactacccggtatgccgcccaagcgagagattgagttccggatagatcttgctctaggaaccactcctctgtacaagcgaccctaccgtatggcagcaaatgaactggccgaagtcaagaaacagttggaagagttaaaagaaaaggggtacatacggccgagcacttcccccgaggtgctcctgtgatttttgtggagaagaaagacaagataaagaggatgtgcgttgactacagagctctcaatgaagttactatcaaaaacaagtaccctcttccccggatcgatgatctgttcgatcagcttaaaggtgccacggtattctccaagattgatcttcgctccggatatcaccaattgcgtatccatgaagaagatatcccgaagaccgcattcaccacgcgttatggactgtatgaattcacggtgatgtcgttcgggctgaccaatgctcctaccttcttcatgaacttaatgaacaaagtgttcatggaatacttggataagtttgttgtggtcttcatcgacgacatcctggtatactcacaatcagaggaagaccatcaacagcatctccgtctggtgttgggaaagttgtgggaacatcaattgtatgccaagcttagcaagtgtgagttctggttgtccgaagtcaaattcttagggcatgtgatatctgctaaaggagttgctgtggaccccgaaacagtgatcgccgtcactgattggaagcaacccaagacagttactcaggttcgcagctttttgggtttggcaggatactaccggaggttcatcgagaacttctccaaaatcgctcgacccatgacacagttgttgaagaaagaagaaaagtttgtgtggagcccgcaatgcgagaaggcgttccaaactctcaaggaaaagctggtttcctcgccagttttaatcttaccggatactcgcaaggacttcatggtgtactgtgacgcttcgcgccaaggattggggtgcgtgctcatgcaggaaggtcatgtggtagcctatgcctcacgccagctactgcctcatgaaggcaactaccctacccatgatttggagttggccgctgtggttcatgctctaaaaatctggcagcattatctcattgggaatcgctgcgaaatatataccgatcataagagtttgaaatacatcttcacccagtcggatctgaatcttcggcagagaagatggttagagctcatcaaggattatgatgtgggaatccactatcacccaggtaaggccaacgtggtcgcagacgcgctgagtcgaaaaagtcgttgcaactctcttggcgtctgtggcattccaccggaacttcatcaacagatggaagccctgaacctaagcatagttggtcgtggattcttggctacgctggaagcaaagcctaccttgctcgatcaaatccgcgaggctcagaagaatgatccagatatgcatgggatcctcaagaatatgaaacaaggtaaagccgctggtttcacagaagatgaacatggaaccctatggaacggaaatcgtcgtgtcaaggcagagcatcaacggccggccggacttttccaacctctacaagtaccagaatggaaatgggatgaaattgggatggatttcatcaccggacttccaaaaacccaaggcggttatgactctatatgggtagttgtggacggactaaccaaggtagctcggttcattcccgtgaagaccacctatggagggaacaaactagctgaactctacttcgctaggattgtgagtctccatggcgttcctaagaaaattgtatctgatcggggaagccagttcacctctcatttctagaagaagctccaagaagagttgggtacccgcttaaatttcagcaccgcgtatcacccgcagacagatggacagaccgagcgtctaaatcagatcctagaagatatgcttcgcgcatgtgtcctagattttgggaagacaggggataagagtctcccctacgccgagttctcctacaataacagctaccaagccagcatacagatggcaccgtacgaagcgttgtatggccgcaaatgccggacaccgctattgtgggaccaagttggggaaagccaagtgttcgggaccgatatctttagagaagctgaagcgaaggtcaggaccattcgggagaatctaaaggtggcccagtctcggcagaagagttctgcagacaaccgacgccgtgacctggaattcgcagtggatgactttgtgtatctctgggtcacgccgttgcgaggtgtacaccggtttcagacgaaagggaagctcgcacctcggtttgtgggtcatttccgtatcattgctcgacgcggagaagtcgcttaccagttagagctgcccgcctccttgggcaacgtgcatgatgtgttccatgtgtcgcaactcaagaaatgccttcgagtgccgtccgagcaggccgactcagagcagattgaagttcgcgaagacttgacctacgtggagagaccggtgaaaatcctacacgccatggagcgcaggaccaggaaccgggtaatccgtttttgcaaggtccaatggagcaaccacgccgaggaagaagctacttgggagcgtgaagacgagctgaaggcagcccatctcgatctcttcgccagttcttccgaatctcggggtcgagattccgtt

SEQ ID NO: 14184 - DNA, 5376 bp, Oryza sativa
  Clone ID: TFbOSC400677j.C1.o1.fg
atgggttggaaactatgtcacgtcttccgtctgtataccgtggtgatggccggcagcgttacccgtcgtggtttgcacatgactggcttcgtcttggagctgcggggcatgtgcgtggtcttggggtatccacatggagtggattaccaggccaggccgctcccggagcaagagggtgaggatgcagagcctcacgctggttgggaggtcactgcagtgattctctccggctctcccgagcggacttcgctggcagtcaccgcgggtggggattccttccccgccgcttgccagaacgccgctctcctcgccatcggcacccttcaccagcgctacccggacgagttgcagcactcgccctaccgctaccaccctcgtcgcggaggagcccgcgactacgccaccttccgagacgccagctcggaggatgacgctaccgtcgtgcatctggcacgcatggtggaggcgtacgacgcggctcgtatcgacttccatcagatggtgcgccgtggcatggtggagaacaacatgaagatcctggagctgcgccaagagaatctgcagctcaagaaggacctcgacgcgttggaggcgcagctgcatcagctcaagatcgcccagggagaggacagccgtcccaagcgtcgccgcgtctgccgcagccagaagatcaccgcccgcaagagcacctccaggcccgagcttgttcgtcagtccctggcgtggacctgcttcgtcgagacccctcgtgccgagcctgcgcccgtggttccccaggagggggaagcctccggcgttggtagctcggaggttttaatcgtcagctctccttctctgtttgctggttctgtgaggggttttcagatggtgacgaccaggagaaatgttaacaccggtgaaggcaaccaacccgagggcagcaaccccaaccaccaaggcaatccacctccacctccgcctccaccaccaccaccagacaccaacgccattctcacccaaatcctcgcccagcaagctaacctgatgaatgctttcctccaccacctccaaaacccgccacaacacaatgctccaccaccccctccccaacactccaaactcgccgaattcctccgtatccgcccacccaccttctctagctccaacaaccccgtggatgcgttggattggttgcatgccgtggggaagaagttagacactgtgcagtgcagtgacgaagagaaagtcatcttcgccgcccatcagctgcaggggcccgcatctctatggtgggaccatttccaggccacgcagccagaagggcaacctattacttggactcgcttcaccgccgctttccggagaacccatgtgcccgccggagtcgtggctcttaagaaaagggaatttcgggagttgaagcaaggcaaccgctccgtgatggagtatttgcatgagttccacaatctagcccgttatgccccggaggatgtgcgggaagatgaggagaagcaagagaagttcttggcaggaatggaccctgagctgtccgttcgtctagtctcttgggactatcctgattttcaacgactggtggacaagagcatccgcttggaagccaagcacaaggagctggaatcgcacaagcgccgcttggcgaatttccgcaatcagcagggtgctaaccagagggtccgctacaccaatccctacccagggggatcctcctcacagcagcagcagcagcagcaacctcgctccgcgcctcgacctcaattcgtggtgcgcgtcccacagcagcaacagcagcagaatcagcaggggactcgtgcgccccgtcctcctacgccaactgtgcagcccgttcaaggccgcagggacgctcaaggtcagcagcgtctgtgcttcaactgcttcgagcccgggcactttgcggataaatgcccgaagccaaggcgtcagcaaggccaagcgcctccccgctccaacaacggcgggaaggatgtccttcggggccgtgtgaatcacgtgacggccgaggacgtgctgacaactccagacgtcatcgttggtacgttcctcgttcattccatccctgctaccattttgttcgactctggagcttcccactcgtttatatctgtgccattcgtggggaaaagtcagttgggggtagaaaggcttagaaaccctctgctcatcaccacccctggaggggttatgacagcaaagtactatagccctgccgtccctatagaaattcaggggattccttttccctcggatctgattctgctagacaccaagaatttggatgtgattcttgggatgaattggttggcccaattccaaggggtagtggattgcgcgagacgcactgtcactctgtaccgaggaccagagcaaccggttgttttctttgcacctccaacctctgtcagaagttcagaactgcatcagataggtctgtcagaaatccccatagtcagagagttcggagacgtgtttccggaagaactacctggtatgccgcccaagcgagagattgagttccggatagatcttgctccaggaaccactcctctgcacaagcgaccctaccgtatggcagcaaatgaactagccgaagtaaagacacagttggaagaattgaaagaagaggggtacatacgtccgagtacttccccatggggtgctcctgtgatctttgtagagaagaaagacaagacgaagaggatgtgcgttgactacagagctctcaatgaagtcaccatcaaaaacaagtaccctcttccccggatcgatgatctgttcgatcagcttaaaggtgccactgtattctccaagattgatcttcgttccggatatcaccaattacgtattcgtgaagaagatattccgaagaccgcattcactacgcgatacgggctgtatgaattcacggtgatgtcgttcggcttgaccaatgctcctgccttcttcatgaacttaatgaacaaagtgttcatggaatacttggacaagtttgttgtggttttcatcgatgacattctgatatactcacaatcagaggaagaccatcagcaccatctccgtctggtgttgggaaagttgcgggaacatcaattgtatgccaagcttagcaagtgtgagttctggttgtccgaagtcaaattcttaggacacgtgatatctgctaaaggagttgctgtggaccccgaaacagtgaccgccgtcaccgattggaagcaacccaagacagtcactcagattcgcagtttcttgggtttggcaggatactaccggaggttcatcgagaacttctccaaaatcgctcgacccatgacacagttgttgaagaaagaagagaagtttgtgtggagcccgcaatgcgagaaggcgttccaaactctcaaagaaaagctggtttcctcgccagtgttaatcttgccggatactcgcaaggatttcatggtgtactgtgatgcttcgcgccaaggattggggtgcgtgctcatgcaggacggtcatgtggtagcctatgcctcacgccagctacgacctcatgaaggcaactaccctacacatgacttggagttagcagcggtggttcatgctttaaaaatctggcggcactatctcattgggaaccgctgtgaaatatatactgatcataagagtttgaaatacatcttcacccagtcggatctgaatcttcggcaaaggagatggttagaactcatcaaggattatgatgtgggaattcactatcaccctggtaaggctaacgtggttgccgacgctctaagtcggaagagccattgcaatactctcaacgtccgaggcattccacccgagcttaatcaacagatggaagccctgaacctaaacatagttggtcgtggatttttggccgcgctagaagcccagcccaccttgctcgatcaaatccgcgaggctcagaagaatgatccggacatgcatggactcctcaagaatatgaaacagggtaaagccgctggtttcacagaggatgaacacggaaccttatggaacggaaagcgggtatgcgttccagatagcagagaacttaaacagctgatacttcaggaagctcacgaaagtccttattccattcacccgggcagtaccaagatgtacttagatttgaaggagaaatactggtgggtcagcatgaagcgggaaattgcagagtttgtggctctatgtgatgtgtgccagcgtgtcaaggcagaacaccaacgaccggccggacttctccaacctctccaagtgccagaatggaaatgggatgaaattgggatggatttcatcaccggccttccaaaaacccaaggtgggtatgattctatatgggtaatagtggatcgattaaccaaggtagctcgatttattcctgtgaagaccacctatggagggaataaactagcggagctctacttcgctaggatcgtgagtctccatggcgttcccaagaaaatcgtatctgataggggaagccaattcacctctcacttttggaagaagctccaagaagagctgggtactcgattgaatttcagcaccgcatatcacccgcagacagatggacagaccgagcgtctaaatcagatcctagaagatatgctccgcgcatgtgtcctggacttcgggaagacttgggataagagtctcccctatgccgagttctcctacaataacagctaccaagccagcatacaaagggcaccctatgaagcgttgtacgggcgcaaatgccggacaccgctattgtgggaccaagtcggagaaagccaagtgttcgggactgatatcctgagagaagctgaagctaaagtcagaatcattcgggataatctaaaggtggcacagtctcggcagaaaagttatgcagataaccgtcgccgtgatctggaattcgcagtgtatgactttgtgtatcttcgggtcacgccattgcgaggtgtgcacaggtttcagacaaaagggaagctcgcacctcggtatgtgggtcccatccgtatcactgctcgacgcggagaagtcgcctaccagctggagttgcccgcctccttgggcaacgtgcatgatgtgttccatgtgtcgcaactcaagaaatgtcttcgagtgccatccgagcaggccgactcagagcaaattgaagttcgcgaagacttgacctatgtggagaagccagtgaaaatcctggacgccatggagcgcaggaccaggaaccgagtaatccgtttttgcaaggtccagtggagcaaccacgccgaagaagaagctacttgggagcgcgaagacgagctgaaggcagcccatcccgatctcttcgccagttcttccgaatctcggggtcgagattccgtttaa

SEQ ID NO: 14185 - DNA, 5001 bp, Oryza sativa
  Clone ID: TFbOSC400702j.C1.o30.fg
atggacatctctagggcaaatgaaggctacacgagctgcggcccgatggccggcagcatcaaccgtcgtggtctggacctgactggtttcgttttggagctgcggggcatgtgcgttgtcttggggtatccgcatggagtggactaccagggcaagcagctcctggagcaggaagtgatcctcactggctcacccgagaggacttcgttggcagtcaccgcgggtggagattccttctccgccgcttgccagaacgccgcactcctcgccatcggcactcttcaccagcgctacccggacgagttgcagcactcgccctaccgctaccaccctcgtcgcggaggagcccgcgactacgccaccttccaagatgctagctcggaggatgacgctaccatcatgcacctggcgcgcatggtggaggcgtacgacgcggcccgtatcgacttccaccagatggtgcgccgtgggttggtcaagaacaacatgaagatcctggagctgcgtcaggagaatctgcagctgaagaaggacctagacgcggtggaggcgcagctgtgtcagctcaagatcgcccagggagagatggtgacaaccaggagaagtgctgctaccggtgatggcaaccaacccgaaggtagcaaccccaacatccaaggcggcccacctccacctcctcccccgcctccaccaccaccaccagacaccaactccatcctcacccaaatcctcgcccagcaggccaacatgatggctgctttcctccatcacatccaaaatccgccacagcataatgctccacctccaccaccacccccacaacactctaaactcgccgagctcctccgcatccgtccgcctaccttctctagctccaataaccccgtggatgctttggattggttgcatgccgtggggaaaaagttagacaccgtgcagtgcaacgatgaggagaaagtcatctttgccgctcaccaactgcaagggcccgcatctctatggtgggaccacttccaggctacgcagccagaggggcagcctattacttgggcccgcttcaccgccgctttccggaggacccatgtgcccgccggagtcatggcccttaagaaaagggaattccgagagttgaagcaaggcaaccgctctgtgatggagtatttgcatgggtttaacaacctggcccggtacgccccggaggatgttcgtgaagatgaggagaagcaagagaagttcttggcaagaatggaccctgagctgtccgtgcgtctggtctccggggactatccggatttccaacgtctggtggacaagagcatccgcttggaagccaagcacaaggaactggagtcgcagaagcgtcgcttggcgaatctccgcaatcaacagggggctaaccaaagggtccgctacaccaatccatatccagggggatcctcctcacagccgcagcaacagcagagtcagcaagggacccgtgtgccccgtcctcctgcgcccgttgtgcagcctggtcaaggccgcagagaagttcaaggtcagcagcgtctgtgcttcaactgcttcgagcccgggcactttgcggataaatgcccaaagccgaggcgccagcaaggccaagcgcctccccgccccaacaatggtggtaaggatgtcattcggggtcgtgtgaaccacgtgactgccgaggatgtgctgacaactccagacgtcatcgttggtacattcctcattcattccatccctgctaccattttgttcgactctggagcttcccactcgtttatatctgtgccattcgtggggagaaatcagttgggggtcgaaaggcttaggaaccctctgctcatcaccacccctagaggggttatgacagcaaagtattatagccctgccgtcccaatagaaatccagggaattccttttccctcggatctgattcttctagacactaagaacttggatgtgatccttgggatgaattggttggctgaattccaaggagtagtggattgcgcaagacgcactgtcactctgtaccgagggccggaacaaccggttgttttctttgcacccccaacttctatcggcagttcagaacttcatcagataggactgtcagaaatccccatcgtcagtgagttcggagatgtgtttccggaagaactacccggtatgccgcccaagcgagagattgagttccggatagatcttgctccaggaaccactcctctgtacaagcgactctaccgtatggcagcaaatgaactggccgaagtcaagaaacagttggaagagttgaaagaaaaggggtatatacggccgagcacttccccctggggtgctcccgtgatttttgtggaaaagaaggacaagacaaagaggatgtgtgttgactacagagctctcaatgaagttactatcaaaaacaagtaccctcttccccggattgatgatctgttcgatcagcttaaaggtgccactgtcttttctaaaatcgatcttcgttccggatatcaccaattgcgtattcgtgaagaggatatcccgaagaccgcattcaccacgcgatacggactgtatgaattcacggtaatgtcgttcggtctgaccaatgctcctgccttcttcatgaacttaatgaacaaagtgttcatggaatacttggataagtttgttgtggttttcattgatgacattttggtgtactcacaatcagaggaagaccatcagcagcatctccgtctggtgttgggaaagttgcgggaacatcaattgtatgccaagcttagcaagtgtgagttctggttgtccgaagtcaaattcttagggcacgtgatatctgctaaaggagttgctgtggaccccgaaacagtgaccgccgtcactgattggaagcaacccaagacagtcactcaggttcgcagctttttgggtttggcaggatactaccggaggttcatcgagaacttctccaaaatcgctcgacccatgacacagttgttgaagaaagaaaaaaaatttgtgtggagcccgcaatgcgagaaggcgttccaaactctcaaggaaaagctggtttcctcgccagttttaatcttaccggatactcgcaaggacttcatggtgtgctgtgatgcttcgcgccaaggattggggtgcgtgctcatgcaggaaggtcatgtggtagcctatgcctcacgccagctacgacatcatgaaggcaactaccctacccatgatttggagttggccgctgtggttcatgctctaaaaatctggcggcattatctcattgggaatcgctgcgaaatatataccgatcataagagtttgaaatacatcttcacccagtcggatctgaatcttcggcagagaagatggttagaactcatcaaggattatgatgtgggaatcctttatcaccctggtaaggccaacgtggtcgccgacgctctaagtcgaaaaagccgttgcaacactcttggcgtccgtggcattccaccggaacttcatcaacagatggaagccctgaacctaagcatagttggtcgtggattcttggctacactggaagccaagcctaccttgctcgatcaaatccgcgaggctcagaagaatgatccagatatgcatgggatcctcaagaatatgaaacaaggtaaagccgctggtttcacagaagatgaacatggaaccctatggaacggaagtcgtgtatgcgttccggacgacaaggaacttaaacagctgatagttcaggaagctcacgaaagtccttattccatccaccctggcagtacgaagatgtacttagacttgaaagggacatactggtgggttagtatgaagtgggaaattgcagagttcgtggccctttgtgatgtgtgccagcgtgtcaaggcagaaaacggccggccggacttctccaacctctacaagtaccagaatggaaatgggatgaaattgggatggatttcatcaccggacttccaaaaacccaaggcggtagctcggtttattcctgtgaagaccacctatggagggaacaaactagctgaactctacttcgctaggatcgtgagtctccatggcgttcctaagaaaattgtatctgatcggggaagccagttcacctctcatttctggaagaagctccaagaagagttgggtacccgcttaaatttcagcaccgcgtatcacccgcagacagatggacagaccgagcgtctaaatcagatcctagaagatatgctccgcgcatgtgtccaagattttaggaagacatgggataagagtctcccctacgccgagttctcctacaataacagctaccaagccagcatacagatggcactgtacgaagcgttgtatggccgcaaatgccggacaccactattgtgggaccaagttggggaaagccaagtgttcgggaccgatatcttgagagaagctgaagcgaaggtcaggaccattagggagaatttaaaggtggcccagtctcggcagaagagttatgcagacaaccgacgccgtgacctggaattcgcagtggatgactttgtgtatctccgggtcacgccgttgcgaggcgtacaccggtttcagacgaaagggaagctcgcacctcggtttgtgggtcctttccgtatcattgctcgacacggagaagtcgctaaccagctggagctgcctgcctccttgggcaacgtgcatgatgtgttccatgtgtcgcaactcaagaaatgccttcgagtgctgtccgagcaggccgactcagagcagattgaagttcgcgaatacttgacctacgtggagaggccagtgaaaatcctggacgccatggagcgcaggaccaggaaacgggtaatccgtttttgcaaggtccaatggagcaaccacgccgaggaagaagctacttgggagcgtgaagacgagctgaaggcagcccatcccgatctcttcgccagttcttccgaatctcggggtcgagattccgtttaa

SEQ ID NO: 14186 - DNA, 5436 bp, Oryza sativa
  Clone ID: TFbOSC400724j.C1.o17.gm
atgactggctttgtcttggagctgcggggcatgtgcgttgtcctggggtatccacatggagtggactaccaggccaggccgcttccggagcaggagggtgacgatgcagagccccacgctggttgggaggtcaccgcagtgatcctctctggctctcccgagcggacttcgctggcagtcaccgcgggtggagattctttccccgccgcttgccagaacgccgctctcctcgccatcggcactcttcaccagcgctacccggacgagttgcagcactcgccctaccgctaccaccctcgtcgcagaggagcccgcgaccacgccaccttccgggatgctagctcggaggatgacgctaccatcgtgcacctggcgcgcatggtggaggcgtacgacgcggctcgtatcgacttccatcagatggtgcgccgcgggatggtcgagaacaacttgaagatcctggagctgcgtcaggagaacctgcagctcaagaaggacctagacgcggtggaggcgcagctgcatcagctcaagatcgcccagggagaggtctgccgccccaagcgtcgccgcgtctgccgcagccagaagatcaccgcccgcaagagcacctccaggcccgagcttgttcgtcagtccctggagtggacttgcttcgtcgagacccctcgtaccgagcccgcgcccgtggttcctcaggagggggaagcctccggcgttggtagcacggaggatgcgctgttgctcaccttccgtcctggcccgtcgcagcggagaagtgctaacaccggtgatggcaaccaacccgaaggcagcaaccacaaccaccagggcaacccacccccacctcctcctccgcctccaccaccaccaccagataccaacgccattctcacccaaatcctcgcccagcaggccaacatgatgacggctttcctccaccacctccaaaatccgccacaacataatgctccaccaccacctccccaacactctaaactcgccgagttcctccgcatccgtccacccaccttctctagttccaacaaccccgtggatgcgttggattggttgcatgccgtggggaaaaagctagacactgtgcagtgcagcgatgaggagaaagtcatcttcgccgcccaccagctgcaggggcccgcatctctatggtgggaccatttccaggctacgcagccagaggggcagcctattacttgggctcgcttcaccgccgctttccggagaatccatgtacccgccggagtcgtggcccttaagaaaagggaattccgagagttgaagcaaggcaaccgctctgtgatggagtatttgcatgagttcaacaacctggcccgttatgccccggaggatgtgcgggaagatgaggagaagcaagagaagttcttggcaggaatggaccctgaactgtccgtccgtctagtctccggggactatccggatttccaacgtctggtggacaagagcatccgcttggaagccaagcacaaggaactggagtcgcacaagcgccgcttggcgaatttccgcaatcaacagggtgctaaccaaagggtccgctacaccaatccctatccagggggatcctcctcgcagcagcaacaacagcagcagcaacctcgctccgcgcctcgacctcaattcgtggtgcgcgtcccacagccgcagcagcagcagaatcaacaagggactcgtgcgccccgtcctcctacgccaactgtgcagcctggtcaaggccgcagggacactcaaggtcagcagcgtctgtgcttcaactgcttcgagcccgggcactttgcggataaatgcccgaagccgaggcgtcagcaaggccaagcgcctcctcgctccaacaacggtgggaaggatgtcattcggggtcgtgtgaaccatgtgacggccgaggacgtgctgacaactccagacgtcatcgttgggctgtcagaaatccccatagtcagagagttcggagacgtatttccggaagaactacctggtatgccgcccaagcgagagattgagttccggatagatcttgctccaggaaccactcctctgtacaagcgaccctaccgtatggcagcaaatgaactggccgaagtaaagaaacaattggaagagttgaaagaaaaggggtacatacgtccgagtacttccccctggggtgctcctgtgatttttgtggagaagaaagacaagacgaagaggatgtgcgttgactacagagctctcaatgaagtcaccatcaaaaacaagtaccctcttccccggatcgatgatctgttcgatcagcttaaaggtgccactgtattctccaagatcgatcttcgttccggatatcaccaattacgtattcgtgaagaagatattccgaagaccgcattcaccacgcgatacggactgtatgaattcacggtgaagtcgttcggtttaaccaatgcacctgccttcttcatgaacttaatgaacaaagtgttcatggaatacttggataagtttgttgtggttttcattgatgacattttgatatactcacaatccgaggaagaccatcggcaccatctccgtctggtgttgggaaagttgcgggaccatcaattgtatgccaaacttagcaagtgtgagttctggttgtccgaagtcaaattcttagggcacgtgatatctgctaaaggagttgctgtggaccccgaaacagtgaccgccgtcaccgattggaagcaacccaagacagtcactcaagtccgcagtttcttaggtttggcaggatactaccggaggtttatcgagaacttatccaaaatcgctctccccatgacacagttgttgaagaaagaagagaaatttgtgtggaacccgcaatgcgagaaggcgttcaaaactctcaaagaaaagctgggttcctcgccagtgttaatcttgccagatactcgcaaggattttatggtgtattgtgacgcttcgcgccaaggattggggtgcgtgctcatgcaggacggtcatgtggtggcctatgcctcacgccagctacggcctcatgaaggcaactaccctacccatgacttggaattagccgcggtggtgcatgctctaaaaatctggcggcactatctcattgggaatcgctgtgaaatatatactgatcataagagtttgaaatacatcttcacccagtcggatctgaatcttcggcaaaggagatggctagaactcatcaaggattatgatgtgggaattcactatcatcctggtaaggccaacgtggtcgccgacgctctaagtcgaaaaagccattgcaacactcttaacgtccgtggcatcccacccgaacttaatcaacagatggaagccctgaacctaagcatagttggtcgcagattcttggctacgctggaagccaagcccaccttgctcgatcaaatccgcgaggctcagaagaacgacccggacatgcatggactcctcaagaatatgaaacagggtaaagccgctggtttcacagaggatgaacacggaaccctatggaacggaaatcgggtatgcgttccagataacagagaacttaaacagctgatacttcaggaagctcacgagagcccttattccattcacccgggcagtacaaagatcgtgtcaaggcagagcaccaacgaccggccggacttctccaacctctccaagtaccagaatggaaatgggatgaaattgggatggatttcatcaccggacttccaaaaacccaaggcggatatgattctatatggcaccgcgtatcacccgcagacagatggacagaccgagcgtctaaatcagatcctaaaagatatgcttcgcgcatgtgtcttagatttcgggaagacctgggataagagtctcccctatgccgagttctcctacaataacagttatcaagccagcatacaaatggcaccttatgaagcgttgtacgggcgcaaatgccggacaccactattgtgggaccaagttggagaaagccaagtgttcgggactgatatcctgagagaagctgaagctaaagtcagaaccattcgggataatctaaaggtggcccagtctcggcagaaaagttatgcggataaccgacgccgtgatctggaattcgcagtggatgactttgtgtatcttcgggtcacgccattgcgaggtgtacacaggtttcagacaaaggggaagctcgcacctcggtatgtgggtcctttccgtatcattgctcggcgcggaggagtcgcttaccagctggagctgcccgcctccttgggcaacgtgcatgatgtgttccatgtgtcgcaactcaagaaatgtcttcgagtgccatccgagcaggccgactcagagcaaattgaagttcgcgaagatttgacctatgtggagaggccagtgaaaatcctggacaccatggagcgcaggaccaggaaccgggtaatccgtttttgcaaggtccagtggaacaaccacgccgaagaagaagctacctggaagcgtgaagacgagctgaaggcagcccaccccgatctcttcgccacacctcggccatataaggaccggtcttcgggcctctgttgcaaagcactaccgtacttccacatgtctagtggggcaaatgaaggctacacgagctgcggcccggtagtcgagatgtcatggcacagggccggtgtcctgctgctaggggctcagtcctgcctgcctgtcccgggggttccggccgtaggtgggattgggtcgcgtgactccggcccctgcaccttgaaggttgagggagccatcgaagtgcataacccagtgcccggcgcgaatgtcggcgtttgggtttcctccgtctccggggaggaagggaacattggacggaacatggtcgaactcagcgagctcgatggcccactttacgacccgaccggtaccctcttgattgtgcaagatttggccgagaggggttcacggtggacctggtgcacggcggcagctcacggaaacgaacggccgagatcgatcctatccacaacgaacggccaagatctaacggtctacgaccggtctacgacggacgacaacgatgacgtcggcgatgacgtcatcaccggcggcggctcgggcggcaagctcgccggcgaacgacggtgcgacgacgcgaacggaggacaccaactcgtagatggcaatgcggcgaacttaccggtgaccaaaacaacggcggaagatcaacggcgtcgaggaagaagcggcggcaaccttcggcttaacgacgacggcggtgctccggcgacctacggcgacggcggaggggtggacgagatcggtgacggcttggtgaccacgaaggcgacctccccgagcagcgacgacgactggagcgacggcggcgcacggatggagctgcggcggcgacggcggcgctag

SEQ ID NO: 14187 - DNA, 6053 bp, Oryza sativa
  Clone ID: TFbOSC400738j.C1.o8.np
atggcggccggacctcccgcgccggtttccttcccctccggccgctctctcccccttccaaccctatttaaaccctccccgcacctcctccgtccgtttccgcctctcgccgcccttcctcctcgccggattcgagctcgcgacgtcgctctctctctctctccaccgtcgccgccaagctccggtccgccgccgtcgtcgccccggaccgcctcccacctcggcgccgcctccttcaggttcgccgcatcctcgccaacctcgtccacctctccgtttcggtcgccgaccgccggaacgccgttgaccccgtcgacccgagccgcgccgccacctccctctgctccggccgcctcctccgtcgccaccgtcgccccggggtgagccgtggaccatcgcctcctttcccccttccctcccctctctcggctgccgctccgccgcgccggtggtcgccggcggcgaccatcggggcgtgggcgcgccgcctcccgccgaccgcgccggcgtggccgccctcgggcgcgccgagtggctgccgcgtggggcccggccgtcagccgcccgcgccctcgggtgcggctgacgtgtggggcctacggcgccggccggtgcgagcccgggtgcatccggtccaccgtggacccacctcggccatataaggaccggtcttcgggcctctgttgcaaagcactaccgtacttccacatgtctagtgggacaaatgaaggctacacgagctgcggcccggtagtcgagatgtcatggcacagggccggtgtcctgctactaggggctcagtcctgcctacctgtcccgggggttccggccgtaggtggggttgggtcgatgtacacctctgatcagagtataatctattcgaatagccgcgccctcggttatgggcaagccaagcaatgtacccaaatggccggcagcatcaaccgtcgtggtctggacctgactggcttcgttttggagctgcggggcatgtgcgttgtcctggggtatccgcatggagtagactaccagggcaagcagctcccggagcaggagggtgacgatgcagagccccacgctgcttgggaggttactgcagtgatcctcactggctcacccgagaggacttcgttggcagtcaccgcgggtggagattccttctccgccgcttgccagaacgccgcactcctcgccatcggcactcttcaccagcgctacccggacgagttgcagcactcgccctaccgctaccaccctcgccgcggaggagcccgcgactacgccaccttccgggatgctagctcggaggatgacgctaccatcatgcacctggcgcgcatggtggaggcgtacgacgcggcccgtatcgacttccatcagatggtgcgtcgcgggttggtcgagaacaacatgaagatcctggagctgcgtcaggagaatctgcagctggagaaggacctatacgcagtggaggcgcagctgcgtcagctcaagatcgcccagggagaggtctgtcgcctcaagcgccttcgggtctaccgcagcttgaagctccccgcccagcaagagtacctccaggcccgagcttgttcgtcagtccctggcgtggacctgcttcgtcgagacccctcgtgccgagctcgcgcccgtggttcctcaggaggatggagcctccggcgttggcagcacggaggatgcgctgttgctcaccttccatggtgacgaccaggagacgtgctaataccggtgatggcaatcaacccgaaggtagcaaccacaacaaccatggcagcccacctccacctcctcctccgcctccaccaccaccaccagacaccaacgccatcctcacccaaatcctcgcccagcaggccaacatgatgcctgctttcctccaccacatccaaaatccgccacaacataatgctccaccaccgcccccacaacactctaaactcgtcgagttcctccgcatccgtccgcctaccttctctagctccaataaccccgtggatgcattggattggttgcatgccgtggggaaaaagttagacaccgtgcagtgcagcgatgaggagaaagtcatcttcgccgcccaccaattgcaggggcccgcatctctatggtgggaccatttccaggctacgcagccagaagggcagccttttacttgggcccgcttcaccgccgctttccggagaacccatgtgcccgctgaagtcatggcccttaagaaaagggaattccgagagttgaaacaaggcaaccgctctgtgatggagtatttgcatgagtttaacaacctggcccgatacgccccggaggatgttcgtgaagataaggagaagcaagagaagttcttggcaggaatggaccctgagctgtccatgcgtctggtctccggggactatccggatttccagcgtttggttgacaagagcatccgcttggaagccaagcacaagaaactggagtcgcacaagcgttgcttggcgaatttccgcaatcaacagggggctaaccaaagggtccgctacaccaatccctatctagggggatcgtcctcgcagcagcaacagcagcagcaacctcgctccgcgccccgacctcatttcgtggtgcgcgtcccacagccgcagcaacagcagagtcagcaagggactcgtgcgccccgtcctcctacgccagccgtgcagcctggtcaaggccgcagggacgttcaaggtcagcagcgtctgtgcttcaactgcttcgagcctgggcactttgcggataaatgcccaaagccgaggcgccagcaaggccaaccgcctccccgccccaacaacgatggtaaggatgtcatttggggtcgggtgaaccacgtgacggccgaggatgtgctgacaactccaaacgtcatcgttggtacgttcctcattcattccatccctactaccattttgttcgactctggagcttcccactcgtttatatctgtgccattcgtggggagaaatcagttgggggtagaaaggcttaggaactctctgctcatcaccacccctagaggggttatgacagcaaagtattatagccctgccgttcctatagaaattcagggaattccttttccctcggatctgattcttctagacaccaagaacttggatgtgatccttgggatgaattggttggctcaattccaaggagtagtggattgtgcaagacgcactgtcactctgtaccgagggccggaacaaccggttgttttctttgctcccccaacctctgtcggtagttccgaacttcatcagataggactgtcagaaatccccatcgtcagagagttcggagacgtgtttccggaagaactacccggtatgccgccgaagcgagagattgagttccggatagatcttgctccaggaaccactcccctgtacaagcgaccctaccgtatggcatcaaatgaactggccgaagtcaagaaacagttggaagagttgaaagaaaaggggtatatacggccgagtacttccccctagggtgctcctgtgatttttgtttagaaggaagacaagacaaagaggatgtgcattgactacagagctctcaatgaagttaccatcaaaaacaagtaccctcttccccggatcgatgatctgttcgattagcttaaaggtgccactgtattctccaagattgatcttcgttccggatatcaccaattgcgtattcgtgaagaagatatccctaagaccgcattcaccacgcgatacggactgtatgaattcacggtgatgtcgttcggtttaaccaatgctcctaccttcttcatgaacttaatgaacaaagtgttcatggaatatttggataagtttgttgtggttttcattgacgacattctggtgtactcacaatcagaggaagaccatcagcaccatctccgtctggtgttgggaaagttgcgggaacatcaattgtatgccaagcttagcaagtgtgagttctggttgtccgaagtcaaattcttagggcacgtgatatctgctaaaggagttgctgtggaccccgaaacagtgaccgccgtcactggttggaagcaatccaagacagtcactcaaattcgcagcttcttgggtttggcaggatactatcggaggttcatcgagaacttctccaaaatcgctcgacccatgacacagttgttgaagaaagaagagaaatttgtgtggagcccgcaatgcgagaaggcgttccaaactctcaaggaaaagctggtttcctcgccagttttaatcttaccggatactcgcaaggacttcatggtgtattgtgacgctttgcgccaaggattggggtgcgtgctcatgcaggaaggtcatgtggtagcctatgcctcacgccagctacggccccatgaaggcaactaccctacccatgatttggagttagccgctgtggttcatgctctaaagatctggcggcactatctcattgggaatcgctgtgaaatatatactgatcataagagtttgaaatacatcttcactcagtcggatctgaatcttcggcagaggagatggttagaactcatcaaggattatgatgtgggaattcactatcatcctggtaaggccaacgtggtcgctaacgctctaagtcgaaaaagccattgcaacactcttgacgtccgtggcattccacccgaacttaatcaacagatggaagccctgaacctaagcatagttggtcgtggattcttggctacgctggaagccaagcctaccttgctcgatcaaatccgcgaggctcagaagaatgatccggatatgcgtggactcctcaagaatatgaaacagggtaaagccgctggtttcacagaggatgaacacggaaccctatggaacggaaatcggcgtgtcaaggcagagcaccaacgaccggccggacttctccaacctctccaagtaccagaatggaaatgggatgaaattgggatggatttcatcaccggacttccaaaaacccaaggcggatataattctatatgggtagttgtggaccgactaaccaaggtagctcggtttattcctgtgaagaccacctatggagggaacaaactagccgagctctacttcgctaggatcgtgagtctccatggcgttcctaagaaaattgtatctgataggggaagccaattcacctctcacttttggaagaagctccaagaagagctgcgtacccgattaaatttcagcaccgcgtatcacccgcagacagatggacagaccgagcgtctaaatcagatcctagaagatatgcttcgcgcatgtgtcctagattttgggaagacctgggataagagtctcccctatgccgagttctcctacaataacagctatcaagccagcatacaaatggcaccctatgaagcgttgtatggacgcaaatgccggacaccactattgtgggaccaagttggggaaagccaagtgttcgggactgatatcctgagagaagctgaagctaaagtcagaaccattcgggataatctaaaggtggcacagtcccggcagaagagttatgcagataaccgacgctgtaatctggaattcgcagtggacgattttgtgtaccttcgggtcacgccattgcgaggtgtacacaggtttcagacgaaagggaagctcgcacctcggtttgtgggtcctttccgtatcattgctcgacgcggggaagtcgcttaccagttggagctgcccgcctccttgggcaacgtgcatgatgtgttccatgtgtcgcaactcaagaaatgtcttcgagtgccatccgagcaggccgattcagagcaaattgaagttcgcgaagacttgacctacgtggagaggccagtgaaaatcctggacaccatggagcgcaggaccaggaaccgggtaatccgtttttgcaaggtccaatggagcaaccacgctgaggaagaagctacttggtagcgtgaagacgagatgaaagcagcccatcccgatctcttcgccagttcttccgaatctcggggtcgagattccgtt

SEQ ID NO: 14188 - DNA, 5388 bp, Oryza sativa
  Clone ID: TFbOSC400773j.C1.o37.fg
atggatgaagtcgggggtcgatggacattctccagggcaaatgaaggctacacgagctgcggcccgatggccggcagcgttacccgtcgtggtttggacatgactggcttcgtcttggagctgcgaggcatgtgcgtggtcttggggtatccacatggagtggattaccaggccaggccgctcccggagcaggagggtgaggatgcagagcctcacgctggttgggaggtcactgcagtgatcctctccggctctcccgagcggacttcgctggcagtcaccgcgggtggggattccttccccgccgcttgccagaacgccgctctcctcgccatcggcacccttcaccagcgctacccggacgagttgcagcactcgccctaccgctaccaccctcgtcgcggaggagcccgcgactacgccaccttccgagacgccagctcggaggatgacgctaccgtcgtgcatctggcacgcatggtggaggcgtacgacgcggctcgtatcgacttccaccagatggtgcgtcgtggcatggtggagaacaacatgaagatcctggagctgcgtcaggagaacctgcagctcaagaaggacctcgacgcgttggaggcgcagctgcatcagctcaagatcgcccagggagaggacagccgtcccaagcgtcgccgcgtctgccgcagccagaagatcaccgcccgcaagagcacctccaggcccgagcttgttcgtcagtccctggcgtggacctgcttcgtcgagacccctcgtgccgagcctgcgcccgtgattccccaggagggggaagcctccggcgttggtagcacggaggttttaatcgtcagctctccttctctgtttgctggttctgtgtggggttttcagatggtgacgaccaggagaaatgttaacaccggtgaaggcaaccaacccgagggcagcaaccccaaccaccaaggcaatccacctccaccaccaccaccagacaccaacgccattctcacccaaatcctcgcccagcaagccaacatgatgaatgctttcctccaccaccttcaaaacccgccacaacagaatgctcccccaccacccccacaacactctaaactcgccgagttcctccgcatccgcccacccaccttctctagctccaacaaccctgtggatgcgttggattggttgcatgccgtggggaagaagctggacacggtgcagtgcagtgacgaagagaaagtcgtcttcgccgcccatcagctgcagggacccgcatctctctggtgggaccacttccaggctacgcagccagagggacagccgatcacttggactcgcttcaccgccgctttccggagaacccatgtgcccgctggagtcgtggctcttaagaaaagggaatttcgggagttgaagcaaggcaaccgctccgtgatggagtatttgcatgagttcaacaatctagcccgttatgccccggaggatgtgcgggaagatgaggagaagcaagagaagttcttggcaggaatggaccctgagctgtctgttcgtctagtctctggagactacccggacttccaacgtctggtggacaagagcatccgcttggaagccaagcacaaggagctggaatcgcacaagcgccgcttggcgaatttccgcaatcagcagggtgctaaccagagggtccgctacaccaatccctacccagggggatcctcctcgcagcagcagcagcagcaacagcaacctcgctccgcgcctcgacctcaattcgtggtgcgcgtcccacagcagcaacagcagcagaatcagcaagggactcgtgcgccacgtcctcctacgccaactgtgcagcctgttcaaggtcgcagggacgcttcaggtccgcagcgtctgtgcttcaactgcttcgagcccgggcactttgcggataaatgcccaaagccaaggcgtcagcaaggccaagcgcctccccgctccaaaaacggcgggaaggatgtcattcggggtcgtgtgaatcacgtgacggccgaggacgtgctgacaactccagacgtcatcgttggtacgttcctcgttcattccatccctgctactattttgttcgactctggagcttcccactcgtttatatctgtgccattcgtggggagaaatcagttgggggtagaaaggcttagaaaccctctgctcatcaccacccctggaggggttatgacagcaaagtactatagccctgccgtccctatagaaattcaggggattccttttccctcggatctgattctgctagacaccaagaatttggatgtgatccttgggatgaattggttggcccaattccaaggggtagtggattgcgcgagacgcactgtcactctgtaccgaggaccagagcaaccggttgttttctttgcacccccaacctctgtcagaagttcagaacttcatcagataggtctgtcagaaatccccatagtcagagagttcggagacgtgtttccggaagaactacctggtatgccgcccaagcgagagattgagttccggatagatcttgctccaggaaccgctcctctgtacaagcgaccctaccgtatggcagcaaatgaactggccgaagtaaagaaacagttggaagagttgaaagaaaaggggtacatacgtccgagtacttccccatggggtgctcttgtgatttttgtagagaagaaagacaagacgaagaggatgtgcgttgactacagagctctcaatgaagttaccatcaagaacaagtaccctcttcctcggatcgatgatctgttcgatcagcttaaaggtgccactgtattctccaagattgatcttcgttccggatatcaccaattacgtattcgggaagaagatattccgaagaccgcattcactacgcgatatggactgtatgaattcacggtgatgtcgttcggcttaaccaatgctcctgccttcttcatgaacttgatgaacaaagtgttcatggaatacttggataagttcgttgtggttttcatcgatgacattctgatatactcacaatcagaggaagaccatcagcaccatctccgtctggtgttgggaaagttgcgggaacatcaattgtatgccaagcttagcaagtgtgagttctggttgtccgaagtcaaattcttaggacacgtgatatctgctaaaggagttgctgtggaccccgaaacagtgaccgccgtcaccgattggaagcaacccaagacagtcactcagattcgcagtttcttgggtttggcaggatactaccggagattcatcgagaacttctccaaaatcgctcgacccatgacacagttgttgaagaaagaagagaaatttgtgtggagcccgcaatgcgagaaggcgttccaaactctcaaagaaaagctggtttcctcgccagtgttaatcttgccggatactcgcaaggatttcatggtgtactgtgatgcttcgcgccaaggattggggtgcgtgctcatgcaagacggtcacgtggtagcctatgcctcacgccagctacgacctcatgaaggcaactaccctacacatgacttggagttagcagcggtggttcatgctctaaaaatctggcggcactatctcattgggaaccgctgtgaaatatatactgatcacaagagcttgaaatacatcttcacccagtcggatctgaatcttcggcaaaggagatggttagaactcatcaaggattatgatgtgggaattcactatcaccctggtaaggctaacgtggttgccgacgctctaagtcggaagagccattgcaatactctcaacgtccgtagcattccgcccgagcttaatcaacagatggaagccctgaacctaagcatagttggtcgcggattcttggctgcgttggaagccaagcctaccttgttcgatcaaatccgcgaggctcagaagaatgatccggacatgcatggactcctcaagaatatgaaacagggtaaagccgcaggtttcacagaggatgaacacggaaccttatggaacggaaagcgggtatgcgttcccgataacagagaacttaaacagctgatacttcaggaagctcacgaaagtccttattccattcacccgggcagtaccaagatgtacttagacttgaaggagaaatactggtgggtcagcatgaagcgggaaattgcagagtttgtggctctatgtgatgtgtgccagcgtgtcaaggcagaacaccaacgaccggccggacttctccaacctctccaagtgccagaatggaagtgggatgaaattgggatggatttcatcaccggacttccaaaaacccaaggtggatatgattctatatgggtaattgtggatcgactaacaaaggtagctcgattcattcctgtgaagaccacttatggagggaacaaactagcggagctctacttcgctaggatcgtgagtctccatggcgttcccaagaaaatcgtatctgataggggaagccaattcacctctcacttttggaagaagctccaagaagagcttggtacccgactaaatttcagcaccgcatatcacccgcagacagatggacagaccgagcgtctaaatcagatcctagaagatatgctccgcgcatgtgtcctagatttcgggaagacctgggataagagtctcccctatgccgagttctcctacaataacagctatcaagccagcatacaaatggcaccatatgaagcgttgtacgggcgcaaatgccggacaccgctcctgtgggaccaagttggggaaagccaagtgttcgggactgatatcctgagagaagctgaagctaaagtcagaatcattcgggataacttaaaggtggcacagtctcggcagaaaagttatgccgataaccgtcgccgtgatctggaatttgcagtggatgactttgtgtatcttcgggtcacgccattgcgaggtgtgcacaggtttcagacaaaagggaagcttgcacctcggtatgtgggtcccttccgtatcatcgctcgacgcggagaagtcgcttaccagctggagttgcccgcctccttgggcaacgtgcatgatgtgttccatgtgtcgcaactcaagaaatgtctccgagtgccatccgagcaggccaactcagagcaaattgaagttcgcgaagacctgacgtatgtggagaagccagtgaaaatcctggacaccatggagcgcaggaccaggaaccgggtaatccgtttttgcaaggtccagtggagcaactacgccgaagaagaagctacttgggagcgcgaagacgagctgaaggcagcccatcccgatctcttcgccagttcttccgaatctcggggtcgagattccgtttaa

SEQ ID NO: 14189 - DNA, 6050 bp, Oryza sativa
  Clone ID: TFbOSC400834j.C1.o6.np
aatggagccgagatctccgcggccgtttcctccctctccggccgcgctctccccctctcggcgctatatatttgctccccgtgcctctctcctccgtttccgccgctcgccgctcgctctcgccgtcggattcgtgctagcgccgtcctcctctctctccgccgtcgccgccaaccttcggttcgccgccgtcgtcgctccggacttcctcccgactcggcgccacctccatcggcttcgccgcgtcgtcgtcgaccccgtccgctcctccgtttcgcccgccgaccgccggagcaccgtcgccctcgtcatcccgaaccgcgccgccgcctctcgccgcttcggtcgtcgtttccgccgccctcgtcgtcccggggtgagccgaggaccgccgttcgctttccctcttctctccgctctctcgggcgccgctccgccgcgccggtggtcgccggcggtgaccatcggggagcgggtgcgccgcctcccgtcggccgtgccggcgaggccgccttcggccgcctcccgcggctgccaggtggggcccggccgtcagccgcccgcgcccgcgggtgcggctgacgcgtgggacccacggcgccgaccgccgccagccgcgtgctcccggtccaccgtggacccacctcggccatataaggaccggtcttcgggcctctgttgcaaagcactaccgtacttccacatgtctagtggggcaaatgaaggctacacgagctgcggcccggtagtcgagatgtcatggcagagggttggtgccctgctgctaggggctcagtcctgcctgcctgtcccggaggttccggccgtaggcgggattgggtcgatgtacacctctgatcagagtttaatctattcgaatagccgcgccctcggttatgggcaagccgagcaatgtacccaaatggccggcagcgtcacccgtcgtggtttgcacatgactggcttcgtcttggagctgcggggcatgtgcgtggtcttggggtatccacatggagtggattaccaggccaggccgctcccggagcaggagggtgaggatgcagagccccacgctggttgggaggtcactgcagtgatcctctctggctctcccgagcggacttcgctggcagtcaccgcgggtggagattccttccccgccgcttgccagaacgccgccctcctcgccatcggcacccttcaccagcgctacccggacgagttgcagcactcgccctaccgctaccaccctcgtcgcggaggagcccgcgacttcgccaccttccgggatgctagctcggaggatgacgctaccatcgtgcacctggcacgcatggtggaggcgtacgacgcggctcgtatcgacttccatcagatggtgcgccgcggtatggtcgagaacaacatgaagatcctggagctgcggcaggagaacctgcagctcaagaaggacctcgacgcggtggaggcgcagctgcatcagctcaagatcgcccagggagaggtctgccgccccaagcgtcgccgcgtctgccgcagccagaagatcaccgcccgcaagagcacctccaggcctgagcttgttcgtcagtccctggcgtggacctgcttcgtcgagacccctcgtgccgagcccgcgcccgtggttccccaggagggggaagcctccggcgttggtagcacggaggatgcgctgttgctcaccttccatggtgacgaccaggagaaatgctgttaccggtgatggcaatcaacctgaaggcagcaaccacaaccaccagggcaacccacctccacctcctcctccgcctccgccaccaccaccagacaccaacgccattctcacccaaatcctcgcccagcaagccaacatgatgactactttcctccaccacctccaaaatccgccacaacagaatgctccacctccacctccccaacactctaaactcgccgagttcctccgcatccgcccacctaccttctctagctccaacaaccccgtggatgcgttggattggttgcatgccgtggggaagaagctggacactgtgcagtgcagtgatgaagagaaagtcatcttcgccgcccaccagctgcagggacccgcatctctatggtgggaccacttccaagctacgcagccagagggacagcctattacatgggctcgcttcaccgccgctttccggagaacccatgtgctcgccggagtcgtggccctcaagaaaagggaattccgagagttgaagcaaggcaaccgctccgtgatggagtatttgcatgagttcaacaacctggcccgttacgctccggaggatgtgcgggaagatgaggagaagcaagagaagttcctggcaggaatggaccccgagctgtccgtccgtctagtctctggggactatccggatttccaacgtctggtggacaagagcatccgcttggaagccaagcacaaggaactggagtcgcacaagcgccgcttggcgaatttccgcaatcaacagggtgctaaccaaagggtccgctacaccaatccctatccagggggatcctcctcgcagcagcaacaacagcagcagcaacctcgctccgcgcctcgacctcaattcgtggtgcgcgtcccacagccgcagcagcagcagaatcaacaagggactcgtgcgccccgtcctcctacgccagccgtgcagcctggtcaaggccacagggacgctcaaggtcagcagcgtctgtgcttcaactgctttgagcccgggcactttgcggataaatgcccgaagccaaggcgtcagcaaggccaagcgcctccccgctccaacaacggtggcaaggacgtcattcggggtcgtgtgaatcacgtgacggccgaggacgtgctgacaactccagacgtcatcgttggtacgttcctcgttcattccatccctgctaccattttgttcgactctggagcttcccactcgtttatatctgtgccattcgtggggagaaatcagttgggggtagaaaggcttaggaaccctctgctcatcaccacccctggaggggttatgacagcaaagtattatagccctgccgtccctatagaaattcaggggattccttttccctcggatctgattctgctagacaccaagaagttggatgtgatccttgggatgaattggttggctcaattccaaggagtagtggtttgcgcgagacgcactgtcactctgtaccgagggccggaacaaccggttgttttctttgcacccccagcctctgtcagaagttcagaacttcatcagataggactgtcagaaatccccatagtcagggagttcggagacgtgtttccggaagaactacctggtatgccgcccaagcgagagattgagttccggatagatcttgctccaggaaccactcctctgtacaagcgaccctatcgtatggcagcgaatgaactggccgaagtcaagaaacagttggaagagttgaaagaaaaggggtatatacgtccgagtacttccccatggggtgctcctgtgatttttgtagagaagaaagacaagacgaagaggatgtgcgtcgactacagagctctcaatgaagtcaccatcaaaaacaagtaccctcttccccggatcgatgacctgttcgatcaacttaaaggtgccactgtattctccaagattgatcttcgttccggatatcaccaattacgtatccgtgaggaagatattccgaagactgcattcaccacgcgatacgggctgtatgaattcacggtgatgtcgttcggcttgaccaatgctcctgccttcttcatgaacttaatgaacaaagtgttcatggaatacttggataagtttgttgtggttttcattgatgacattctgatatactcacaatcagaagaagaccatcagcaccatctccgtctggtgttgggaaagttgcgggaacatcaattgtatgccaagcttagcaagtgtgagttctggttgtccgaagtcaaattcttagggcacgtgatatctgctaaaggagttgctgtggatcccgaaacagtgaccgccgtcaccgattggaagcaacccaagacagtcactcaaattcgcagtttcttaggtttggcaggatactaccggaggttcatcgagaacttctccaaaatcgctcgacccatgacacagttgttgaagaaagaagagaaatttgtgtggagcccgcaatgcgagaaggcgtttcaaactctcaaggaaaagctggtttcctcgccggtgttaatcttgccggatactcgcaaggacttcatggtgtattgtgacgcttcgcgccaaggattggggtgcgtgctcatgcaggacggtcatgtggtagcctatgcctctcgccagcttcggcctcatgaaggcaattaccctacccatgatttggagttagccgctgtggttcatgctctaaaaatctggcggcactatctcattgggaatcgctgtgaaatatataccgatcataagagcttgaaatacatcttcacccagtcggatctgaatcttcggcaaaggagatggttagaactcatcaaggattatgatgtgggaattcactatcatcctggtaaggccaacgtggttgccgacgctctaagtcgaaagagtcattgcaacactcttaacgtccgtggcattccacccgaacttagtcaacaaatggaagccctgaacctaagcatagttggtcgtggattcttggctgcgttggaagccaagcctaccttgctcgatcaaatccgtgaggctcagaagaatgatccggacatgcatggactcctcaagaatatgaaacagggtaaagccgctggtttcacagaggatgaacacggaaccctatggaacggaaatcggcgtgtcaaggcagagcaccagcgaccggccggactcctccaacctctccaagtgccagaatggaaatgggatgaaattgggatggatttcatcaccggacttccaaaaacccaaggcggatatgattctatatgggtagttgtggatcggttaaccaaggtggctcgattcattcctgtgaagaccacctatggagggaacaaactagcggagctctacttcgctaggatcgtgagtctccatggtattcccaagaaaatcgtatctgataggggaagccaattcacctctcacttttggaagaagctccaagaagagcttggtacccgattaaatttcagcaccgcgtaccacccgcagacagatggatagaccgagcgtctaaatcagatcctagaagatatgcttcgcgcatgtgtcctagatttcgggaagacctgggataagagtctcccctatgccgagttctcctacaataacagttatcaagccagcatacaaatggcaccttatgaagcgttgtacgggcgcaaatgccggacaccgctattgtgggaccaagttggagaaagccaagtgttcgggactgatatcctgagagaagctgaagctaaagttagaaccattcgggataatctaaaggtggcccagtcccggcagaaaagttatgcagataaccgtcgccgtgacctggaattcgcagtggatgattttgtgtaccttcgggtcacgccattgcgaggagtacataggttccagacaaaagggaagctcgcacctcggtatgtgggtcctttccgtatcattgctcggcgcggagaagtcgcttaccagttggagctgcccgcctccttgggcaacgtgcatgatgtgttccatgtgtcacaactcaagaaatgtcttcgagtgccatccgagcaggccgactcagagcaaattgaagttcgcgaagatttgacctacgtggagaggccagtgaaaatcctggacaccatggagcgcaggaccaggaaccgggtaatccgtttttgcaaggtccagtggagcaaccacgccgaagaagaagctacttgggagcgtgaagacgagctgaaggcagcccatcccgatctcttcgccagttcttccgaatctcggggtcgagattccgtt

SEQ ID NO: 14190 - DNA, 5418 bp, Oryza sativa
  Clone ID: TFbOSC400948j.C1.o3.fg
atggatgaagtcgggcgtcgatggacattctccagggcaaatgaaggctacacgagctgcggcccgatggccggcagcgttacccgtcgtggtttggacatgactggcttcgtcttggagctgcggggcatgtgcgtggtcttggggtatccacatggagtggattaccaggccaggccgctcccggagcaggagggtgaggatgcagagcctcacgctggttgggaggtcactgcagtgatcctctccggctctcccgagcggacttcgctggcagtcaccgcgggtggggattccttccccgccgcttgccagaacgccgctctcctcgccatcggcacccttcaccagcgctacccggacgagttgcagcactcgccctaccgctaccaccctcgtcgcggaggagcccgcgactacgccaccttccgagacgccagctcggagcatgacgctaccgtcgtgcatctggcacgcatggtggaggcatacgacgcagctcgtattgacttccatcagatggtgcgccgtggcatggtggagaacaacatgaagatcctggagctgcgccaagagaatttgcagctcaagaaggacctcgacgcgttggaggcgcagctgcatcagctcaagatcgcccagggagaggacagccgtcccaagcgtcgccgcgtctgccgcagccagaagatcaccgcccgcaagagcacctccaggcccgagcttgttcgtcagtccctggcgtggacctgcttcgtcgagacccctcgtgccgagcctgcgcccgtggttcctcaggagggggaagcctccggcgttggtagctcggagggtgcgctgttgctcaccttccgtcctggcccgtcgcagcgctctccttctctgtttgctggttctgtgtggggttttcagatggtgacgaccaggagaaatgttaacaccggtgaaggcaaccaacccgagggcagcaaccccaacccccaaggcaacccacctccaccaccaccaccagacaccaacgccattctcacccaaatcctcgcccagcaagccaacatgatgaatgctttcctccaccacctccaaaatccgccacaacagaatgctccaccaccccctccccaacactccaaactcgccgaattcctccgcatccgcccacccaccttctctagctccaacaatcccgtagatgcgttggattggttgcatgccgtggggaaaaagctagacacggtgcagtgcagcgatgaggagaaagtcgtcttcgccgcccatcagctgcaggggcccgcatctctctggtgggaccacttccaggctacgcagccagaagggcaacctattacttggactcgcttcaccgccgctttccggaaaacccatgtgcccgccggagtcgtggctcttaagaaaagggaattccgagagttgaagcaaggcagccgctccgtgatggagtatttgcatgagttcaacaatctagcccgttatgccccggaggatgtgcgggaagatgaggagaagcaagagaagttcttggcaggaatggaccctgagctgtccgttcgtctagtctctggggactatcctgattttcaacgactggtggacaagagcatccgcttggaagccaagcacaaggagctggaatcgcacaagcgccgcttggcgaatttccgcaatcagcagggtgctaaccagagggtccgctacaccaatccctacccagggggatcctcctcgcagcagcagcagcagcagcagcagcaacctcgctccgcgcctcgacctcaattcgtggtgcgcattccacagccgcagcagcagcagaatcagcaagggactcgtgcaccccgtcctcctacgccaactgtgcagcctgttcaaggtcgcagggacgctcaaggtccgcagcggctgtgcttcaactgcttcgagcccgggcactttgcggataaatgcccgaagccaaggcgtcagcaaggccaagtgcctccccgctccaacaacggcgggaaggatgtcattcggggccgtgtgaatcatgtgacggccgaggacgtgctgacaactccagacgtcatcgttggtacgttcctcgttcattccatccctgctaccattttgttcgactctggagcttcccactcgtttatatctgtgccattcgtggggaaaaatcagttgggggtagaaaggcttagaaaccctctgctcatcaccacccctggaggggttatgacagcaaagtattatagccctgccgtccctatagaaattcaggggattccttttccctcggatctgattctgttagacacaaagaacttggatgtgattcttgggatgaattggttggctcaattccaaggagtagtggattgcgcgaggcgcactgtcactctgtaccgaggaccggaacagccggttgttttctttgcacctccaacctctgtcagaagttcagaacttcatcagataggtctgtcagaaatccccatagtcagagagttcggagacgtgtttccggaagaactacctggtatgccgcccaagcgagagattgagttccggatatatcttgctccaggaaccactcctctgtacaagcgaccctaccgtatggcagcaaatgaactggccgaagttaagaaacagttggaagagttgaaagaaaaggggtatatacgtccgagtacttccccttggggtgctcctgtgatttttgtggagaagaaagacaaaacgaagaggatgtgcgttgactacagagctctcaatgaagtcaccatcaaaaacaagtaccctcttccccggatcgatgatctgttcgatcagcttaaaggtgccactgtattctccaagattgatcttcgttccggatatcaccaattacgtattcgggaagaagatattccgaagaccgcattcaccacgcgatatggactgtatgaattcacggtgatgtcgttcggcttaaccaatgctcctgccttcttcatgaacttaatgaataaagtgttcatggaatacttggacaagtttgttgtggttttcattgatgacattctgatatactcacaatcagaggaagaccatcagcaccatctccgtctggtactgggaaagttgcgggaacatcaattgtatgccaagctcagcaagtgtgagttctggttgtccgaagtcaaattcttagggcacgtgatatctgctaaaggagttgctgtggaccccgaaacagtgaccgccgtcaccgattggaagcaacccaagacagtcactcagattcgcagtttcttaggtttggcaggatactaccggagattcatcgagaacttctccaaaatcgctcgacccatgacacagttgttgaagaaagaagagaaatttgtgtggagcccgcaatgcgagaaggcgttccaaactctcaaagaaaagctggtttcctcgccagtgttaatcttgccggatactcgcaaggacttcatggtgtattgtgatgcttcgcgccaaggattggggtgcgtgctcatgcaggacggtcatgtggtagcctatgcttcacgtcagctacgacctcatgaaggcaactaccctacacatgacttggagttagcagcggtggttcatgctctaaaaatctggcggcactatctcattgggaaccgctgtgaaatatatactgatcataagagtttgaaatacatcttcacccagtcggatctgaatcttcggcaaaggagatggttagaactcatcaaggattatgatgtgggaatacactatcatcctggtaaggccaacgtggttgccgacgctctaagccgaaagagccactgcaacactctcaacgtccgaggcattccacccgaacttaaccaacagatggaagccctgaacctaagcctagttggtcgcggattcttggctgcgttggaagccaagcctaccttgctcgatcaaatccgcgaggctcagaagaatgatccggacatgcatggactcctcaagaatatgaaacagggtaaagccgcaggtttcacagaggatgaacacggaaccctatggaacggaaagcgggtatgcgttccagataaccgagaacttaaacagctgatacttcaggaagctcacgagagtccttattccattcacccaggcagtaccaagatgtacttagacttgaaggagaaatactggtgggtcagcatgaagcgggaaattgcagagtttgtggctctatgtgatgtgtgccagcgtgtcaaggcagaacaccaacgaccggccggacttctccaacctctccaagtgccggaatggaaatgggatgaaattgggatggatttcatcaccggccttccaaaaacccaaggtggatatgattctatatgggtaatagtggatcgattaaccaaggtagctcgattcattcctgtgaagaccacctatggagggaataaactagcggagctctacttcgctaggatcgtgagtctccatggcgttcccaagaaaatcgtatctgataggggaagccaattcacctctcacttttggaagaagctccaagaagagctgggtactcgattgaatttcagcaccgcctatcacccgcagaccgatggacagaccgagcgtctaaatcagatcctagaagatatgctccgcgcatgtgtcctagatttcgggaagacttgggataagagtctcccctatgccgagttctcctacaataacagctatcaagccagcatacaaatggcaccctatgaagcgttgtacgggcgcaaatgccggacaccgctattgtgggaccaagttggagaaagccaagtgttcgggactgatatcctgagagaagctgaagctaaagtcagaatcattcgggataatctaaaggtggcacagtctcggcagaaaagttatgcagataaccgtcgccgtgatctggaattcgcagtggatgactttgtgtatcttcgggtcacgccattgcgaggtgtgcacaggtttcaaacgaaagggaagcttgcacctcggtatgtgggtcccttccgtatcgttgctcgacgcggagaagtcgcctaccagctggagttgcccgcctccttgggcaacgtgcatgatgtgttccatgtgtcgcaactcaagaaatgtcttcgagtgccatccgagcaggccgactcagagcaaatcgaagttcgcgaagacttgacgtatgtggagaagccagtgaaaatcctggacaccatggagcgcaggaccaggaaccgggtaatccgtttttgcaaggtccagtggagcaaccacgccgaagaagaagctacttgggagcgcgaagacgaactgaaggcagcccatcccgatctcttcgccagttcttccgaatctcggggtcgagattccgtttaa

SEQ ID NO: 14191 - DNA, 5325 bp, Oryza sativa
  Clone ID: TFbOSC400979j.C1.o1.fg
atggccggcagcgtcacccgtcgtggtttggacatgactggtttcgtcttggagctgcgaggcatgtgcgtggccttggggtatccacatggagtggactaccaggccaggccgcttccggagcaggagggtgacgatgcagagccccacgctggttgggaggtcactgcagtgatcctcgctggctctcccgagcggacttcgctgacagtcaccgcgggtggagattccttccccgccgcttgccagagcgccgctctcctcgccatcggcactcttcaccagcgctacccagacgagttgcagcactcgccctaccgctaccaccctcgccacggaggagcccgcgactacgccaccttccgggatgctagctcggaggatgacgctaccatcgtgcacctggcgcgcatggtggaggcgtacgacgcggctcgtatcgacttccatcagatggtgcgtcgcgggatggttgagaacaacatgaagatcctggagctgcgtcaggagaacctgcagctcaagaaggacctagatgcggtggaggcgcagctgcatcagcttaagatcgcccagggagaggtctgccgccccaagcgtcgccgcgtctgccgcagccagaagatcaccgcccgcaagagcacctccaggcccgagcttgttcgtcagtccctggcgtggacctgcttcgtggagacccctcgtgccgagcccgcgcccgtggttccccaggagggggaagcctccggcgttggtagcacggaggctctttctctgtttgctggttctgtgtggggttttcagatggtgacgaccaggagaaatgctaacaccggtgatggcaaccaacccgaaagcagcaaccacaaccaccagggcaacccacctccacctcctcctccgcctccgccaccaccaccagacaccaacgccattctcacccaaatcctcgcccagcaagccaacatgatgactgctttcctccaccacctccaaaatccgccacaacataatgctccaccaccacccccacaacactctaaactcgccgagttcctccgcatccgcccacctaccttctcaagctccaacaaccccgtggatgcgttggattggttgcatgccgtggggaaaaagctagacacggtgcagtgcagcgatgaggagaaagtcatcttcgccgcccaccaactgcaggggcccgcatctctctggtgggaccacttccaggctacgcagccagagggacagccgattacttgggcccgcttcaccgccgctttccgaagaacccatgtgcccgccggagtcgtggcccttaagaaaagggaattccgagagttgaagcaaggcaaccgctccgtgatggagtatttgcatgagttcaacaacctggcccgttacgctccggaggatgtgcgggaagatgaggagaagcaagagaagttcttggcaggaatggaccctgagctgtccgtccgtctagtctctggggactatccggattttcaacgattggtggacaagagcatccgcttggaagccaagcacaaggagctggagtcgcacaagcgccgcttggcgaatttccgcaatcaacagggtgctaaccaaagggtccgctacaccaatccctatccagggggatcctcctcgcagcagcaacaacagcagcagcaacctcgctccgcgcctcgacctcaattcgtggtgcgcgtcccacagccgcagcaacagcagaatcagcaggggactcgtgcaccccatcctcctacgccaactgtgcagtctggtcaaggccgcagggacgctcaaggtcagcagcgtctgtgcttcaactgcttcgagcccgggcactttgcggataaatgcccgaaaccaaggcgtcagcaaggccaagcgcctccccgctccaagaacggcgggaaggatgtcattcggggtcgtgtgaatcacgtgacggccgaggacgtgctgacaactccagacgtcatcgttggtacgttcctcgttcattccatccctgctacaattttgttcgactctggagcttcccactcgtttatatttgtgccattcgtggggagaaatcagttgggggtagaaaggcttaggaaccctctgctcatcaccacccctggaggggttatgacagcaaagtattatagccctgccgtccctatagaaattcaggggattccttttccctcggatctgattttgctagacaccaagaatttggatgtgatccttgggatgaattggttggctcaattccaaggagtagtggattgcgcgagacgcactgttactctgtaccgagggccggcacaaccagttgttttctttgcaccctcaacctctatcagaagttcagaacttcatcagataggactgtcagaaatccccatcgtcagggagttcggagatgtgtttccggaagaactacccggtatgccgcccaaacgagagattgagttccggatagatcttgctccaggaaccactcctctgcacaagcgaccctaccgtatggcagcaaatgaactggccgaagtaaagaaacagttggaagagttgaaagaaaagggatacatacgtccgagtacttccccatggggtgctcctgtgatttttgtagagaagaaagacaagacgaagaggatgtgcgtcgactacagagctctcaatgaagtcaccatcaaaaacaagtaccctcttccccggatcgatgatctgttcgatcagcttaaaggtgccactgtattctccaagattgatcttcgttccggatatcaccaattacgtattcgtgaagaagatattccgaagaccgcattcaccacgcgatacgggctgtatgaattcacggtgatgtcattcggtctaaccaatgcacctgccttcttcatgaacttaatgaacaaagtgttcatggaatacttggataagtttgttgtggttttcattgatgacattctgatatactcacactcagaggaagaccatcagcaccatctccgtctggtgttgggaaagttgcgggaacatcaattgtatgccaagcttagcaagtgtgagttctggttgtccgaagtcaaattcttggggcacgtgatatctgctaaaggagttgctgtggaccccgaaacagtgaccgccgtcaccgattggaagcaacccaagacagttactcaagtccgcagtttcttaggtttggcaggatactaccggagattcatcgagaacttctccaaaatcgctcgacccatgacacagttgttgaagaaagaagagaaatttgtgtggagcccgcaatgcgagaaggcgtttcaaactctcaaggaaaagctggtttcctcgccggtgttaatcttgccggatactcgcaaggacttcatggtgtattgtgacgcttcgcgccaaggattggggtgcgtgctcatgcaggacggtcatgtagtagcctatgcctcacgtcagctacgacctcatgaaggcaactaccctacacatgacttggagttagccgcggtggttcatgctctaaaaatctggcggcactatctcattggaaatcgctgtgaaatatataccgaccataagagtttgaaatacatcttcacccagtcggatctgaatcttcggcaaaggagatggttagaacttatcaaagactatgatgtgggaattcactatcatcctggtaaggccaacgtggttgccgacgctctaagtcgaaagagccattgcaacactcttaacgtccgtggcattccacccgaacttagtcaacagatggaagccctgaatctaagcatagttagtcgtggattcttggctgcgttggaagccaagcctaccttgctcgatcaaatccgcgaggctcagaagaatgatccggacatgcatggactcctcaagaatatgaaacagggtaaagccgctggtttcacagaggatgaacacggaaccctatggaacggaaagcgggtatgcgttccagataacagagaacttaaacagttgatacttcaggaagctcacgagagcccttattccattcacccgggcagtacaaagatgtacttagacttgaaggagaaatactggtgggttagcatgaagcgggaaattgcagagtttgtggccctatgtgatgtgtgccaacgtgtcaaggcagagcaccaacgaccggccggacttctccaacctctccaagtaccagaatggaaatgggatgaaattgggatggatttcatcaccggacttccaaaaacccaaggtggatatgattctatatgggtagttgtggatcgattaaccaaggtagctcgatttattcctgtgaagaccacctatggagggaacaagctagccgagctctacttcgctaggatcgtgagtctccatggcgttcccaagaaattcgtatctgataggggaagccaattcacctctcacttttggaagaagctccaagaagacctgggtactcgattgaatttcagcaccgcctatcacccgcagacagatggacagaccgagtgtctaaatcagatcctagaagatatgctccgcgcatgtgtactagatttcgggaagacctgggataagagtctcccctatgccgagttctcctacaataacagctatcaagccagcatacaaatggcaccttatgaagcgttgtacgggcgcaaatgccggacaccgctattgtgggaccaagttggagaaagccaagtgttcgggactgatatcctgagagaagctgaagctaaagtcagaaccattcgggataacctaaaggtggcacagtcccggcagaaaagttatgcagataaccgtcgctgtgacctggaattcgcagtggatgattttgtgtaccttcgggtcacgccattgcgaggtgtacacaggtttcagacaaaagggaagctcgcacctcggtatgtgggtcctttccgtatcgttgctcgacgcggagaagtcgcttaccagttggagctgcccgcctccttgggcaacgtgcatgatgtgttccatgtgtcgcaactcaagaaatgccttcgagtgccatccgagcaggccgactcagagcagattgaagttcgcgaagatttgacctacgtggagaggccagtgaaaatcctggacaccatggagcgcaggaccaggaaccgggtaatccgtttttgcaaggtccagtggagcaaccatgccgaagaagaagctacctgggagcgtgaagacgagctgaaggcagcccatcccgatctcttcgccagttcttccgaatctcggggtcgagattccgtttaa

SEQ ID NO: 14192 - DNA, 8562 bp, Oryza sativa
  Clone ID: TFbOSC400979j.C1.o10.gm
gcgtttcaaactctcaaggaaaagctggtttcctcgccggtgttaatcttgccggatactcgcaaggacttcatggtgtattgtgacgcttcgcgccaaggattggggtgcgtgctcatgcaggacggtcatgtagtagcctatgcctcacgtcagctacgacctcatgagggcaactaccctacacatgacttggagttagcagcggtggttcatgctctaaaaatctggcggcactatctcattggaaatcgctgtgaaatatataccgaccataagagtttgaaatacatcttcacccagtcggatctgaatcttcggcaaaggagatggttagaacttatcaaagactatgatgtgggaattcactatcatcctggtaaggccaacgtggttgccgacgctctaagtcgaaagagccattgcaacactcttaacgtccgtggcattccacccgaacttagtcaacagatggaagccctgaatctaagcatagttagtcgtggattcttggctgcgttggaagccaagcctaccttgctcgatcaaatccgcgaggctcagaagaatgatccggacatgcatggactcctcaagaatatgaaacagggtaaagccgctggtttcacagaggatgaacacggaaccctatggaacggaaatcgggagaaatactggtgggttagcatgaagcgggaaattgcagagtttgtggccctatgtgatgtgtgccaacgtgtcaaggcagagcaccaacgaccggccggacttctccaacctctccaagtaccagaatggaaatgggatgaaattgggatggatttcatcaccggacttccaaaaacccaaggtggatatgattctatatgggtagttgtggatcgattaaccaaggtagctcgatttattcctgtgaagaccacctatggagggaacaagctagccgagctctacttcgctaggatcgtgagtctccatggcgttcccaagaaattcgtatctgataggggaagccaattcacctctcacttttggaagaagctccaagaagagctgggtacccgattaaatttcagcaccgcgtatcacccgcagacagatggacagaccgagtgtctaaatcagatcctagaagatatgctccgcgcatgtgtactagatttcgggaagacctgggataagagtctcccctatgccgagttctcctacaataacagctatcaagccagcatacaaatggcaccttatgaagcgttgtatgggcgcaaatgccggacaccactattgtgggaccaagttggagaaagccaagtgttcgggactgatatcctgagagaagctgaagctaaagtcagaatcattcgggataatctaaaggtggcacagtcccggcagaaaagttatgcagataaccgtcgctgtgacctggaattcgcagtgggtgactttgtgtatcttcgagtcacgccattgcgaggtgtacacaggtttcagacaaagggaaagctcgcacctcggtatgtgggtcctttccgtatcattgcccggcgcggagaagtcgcttaccagctggagctgcccgcctccttgggcaacgtgcacgatgtgtttcatgcgtcgcaactcaagaaatgtcttcgagtgccatccgagcaggccgactcagagcaaattgaagttcgcgaagacttgacctacgtggagaggccagtgaaaatcctggacaccatggagcgcaggaccaggaaccggcccatcccgatctcttcgccagtccctccgaatctcggggtcgagattccgtttaaggggggtaggcgggcccgcccgccaccctcgctgacgggtggggcccacccgtcatcccctttctcgcgccgcgcccgccgccgcgcccgtgccctagcgccgccgccgccgccgaatccgccgcatcccgccgtccccgcgcgcattaaagagggggaaatcactccccgtgattccctcccttttttccccctctttcccctctctctctccctcggattcgtccgaaatcgcgcccgcgatcttcgccggcgtcatcaatggcggccgagatttccgcggccgattccttcccctccgggcgctctctccctctcccggcgctatttaatcgcttcccgagctccgctcctccgtttccgccgctcgccgctcactcttcccgtcggaatcgagcccgcgccgtcgttctctctctccgccatcgccgccgagctccggtcagtcgccgtcgtcgctccggacctcctcccgtttcggcgtcacccccttcggcttcgccgcgtcctcgccgaccccgtccgcccctccgcttcgctcgccgaccgccggaacgccgccgtcctcgtcgacccgagcccgcgccgccgtcgtcctccgctccggtcgccatttccgccgccctcgtcgtcccggggtgagccgtggaccgccgttcgctttccctcttccctcctctctctcgggtgccgctccgccgcgccgttggtcgccggcggcgaccatcggggcgcgggtgcgccgcctcccgtcggccgtgccggcgaggccgccttcgggcgcgcccgcggctgccaggtgggcccggccgtcagccgcccgcgcccgtgggtgcggctaacgcgtgggacccacggcgccggccgacgccagccgcgtgcgcccggtccaccgtgggccgtgaggctgccgcgtgggccccactcccgtggacccgcacctctgccatataaggaccggtcttcgggcctctgttgcaaagcactaccgtacttccacatgtctagtggggcaaatgaaggctacacgggctgcggttcggtagtcgagatgtcatggcacagggccggtgtcctgctgctaggggctcagtcctgcctgcctgtcccgggggttccggccgtaggtgggattgggtcgatggccggcagcgtcacccgtcgtggtttggacatgactggcttcgtcttggagctgcggggtatgtgcgtggtcttggggtatccacatggagtggactaccaggccaggccgcttccagagcaggagggtgaggatgcagagccccacgctggttgggaggttactgcagtgatcctctctggctctcccgagcggacttcgctggcagtcaccgcgggcggagattccttccccgccgcttgccaaaacgccgctcttctcgccatcggcactcttcaccagcgctacccggacgagttgcagcactcgccctaccgctaccaccctcgtagcggaggagcccgcgactacgccaccttccgagatgctggctcggaggatgacgctcccatcgtgcacctggcgcgcatggtgaaggcgtacgacgcggctcgtatcgatttccatcagatggtgcgtcgtgggatggtcgagaacaacatgaagatcctggagctgcgtcaggagaacctgcagctcaagaaggacctagacgcagtggaggcgcagctgcatcagctcaagatcgcccagggagaggactgccgccccaagcgtcgccgcgtctgccgcagccagaagatcaccgcccgcaagagcacctccaggcccgagcttgttcgtcagtccctggcgtggacctgcttcgtggagacccctcgtgccgagcccgcgcccgtggttccccaggagggggaagcctccggcgttggtagcacggaggctctttctctgtttgctggttctgtgtggggttttcagatggtgacgaccaggagaaatgctaacaccggtgatggcaaccaacccgaaagcagcaaccacaaccaccagggcaacccacctccacctcctcctccgccttcgccaccaccaccagacaccaacgccattctcacccaaatcctcgcccagcaagccaacatgatgactgctttcctccaccacctccaaaatccgccacaacataatgctccaccaccacccccacaacactctaaactcgccgagttcctccgcatccgcccacctaccttctcaagctccaacaaccccgtggatgcgttggattggttgcatgccgtggggaaaaagctagacacggtgcagtgcagcgatgaggagaaagtcatcttcgccgcccaccaactgcaggggcccgcatctctctggtgggaccacttccaggctacgcagccagagggacaacctatcacttgggctcgcttcaccgccgctttccgaagaacccatgtgcccgctggagtcgtggctcttaagaaaagggagttccgagagttgaagcaaggcaaccgctccgtgatggagtatttgcatgagttcaacaatctggcccgttatgccccagaggatgtgcgggaagatgaggagaagcaagagaagttcttggcaggaatggaccctgagctgtccgtccgtctagtctccggggactatccggatttccaacgtctggtggacaagagcatccgcttggaagccaagcacaaggaactggagtcgcacaagcgccgcttggcgaacttccgcaatcaacagggtgctaaccaaagggtccgctacaccaatccctacccagggggatcctcctcgcagccgcagcaacagcatcaacaacctcgctccgcgcctcgacctcaattcgtgcctggacaaggccgcagggacgcttcaggtccgcagcgtctgtgcttcaactgcttcgagcccgggcactttgcggataaatgcccaaagccgaggcgtcagcaaggccaagcgcctccccgctccaacaatggtgggaaggatgtcattcggggtcgtgtgaaccacgtgacggccgaggacgtgctgacaactccagacgtcatcgttggtacgttcctcattcactccatccctgctaccattttgttcgactctggagcttcccactcttttatatctgtgccattcgtggggagaaatcagttgggggtagaaaggcttaggaaccctctgctcatcaccacccctggaggggttatgacagcaaaagagttcggagacgtgtttccggaagaactacctggtatgccgcccaagcgagagattgagttccggatagatcttgctccaggaaccactcctctgtacaagcgaccctaccgtatggcagcaaatgaactggccgaagttaagaaacagttggaagagttgaaagaaaaggggtatatacgtccgagtacttctccatggggtgctcctgtgatttttgtagagaagaaagacaagacgaagaggatgtgcgttgactacagagctctcaatgaagtcaccatcaaaaacaagtaccctcttccccggatcgatgatctgttcgatcagcttaaaggtgccactgtattctccaagattgatcttcgttccggatatcaccaattacgtattcgtgaagaagatattccgaagaccgcattcaccacgcgatacggactgtatgaattcacggtgatgtcattcggtctaaccaatgcacctgccttcttcatgaacttaatgaacaaagtgttcatggaatacttggataagtttgttgtggttttcattgatgacattctgatatactcacactcagaggaagaccatcagcaccatctccgcctggtgttgggaaagttgcgggaacatcaattgtatgccaagcttagcaagtgtgagttctggttgaccgaagtcaaattcttagggcatgtgatatctgctaaaggagttgctgtggaccccgaagcagtgaccgccgtcaccgattggaagcaacccaagacagtcacccaaattcgcagtttcttaggtttggcaggatactaccagaggttcatcgagaacttctccaaaatcgctcgacccatgacacaattgttgaagaaagaagagaaatttgtgtggagcccgcaatgcgagaaggcattccaaactctcaaggaaaagctggtttcctcgccggtgttaatcttgccggatacccgcaaggatttcatggtgtactgtgatgcttcgcgccaaggattggggtgcgtgctcatgcaggatggtcatgtagtggcctatgccttccgccagctacggcctcatgagggcaactaccctacccatgatttggagttagcagcggtggttcatgctctaaaaatctggcggcactatctcattgggaatcgctgtgaaatatatactgatcataagagtttgaaatacattttcacccagtcagatctgaatcttctgcaaaggagatggttagaactcatcaaggattatgatgtgggaattcactatcatcctggtaaggccaacgtggttgccgacgctctaagtcgaaaaagccattgccacgctcttaacgtccgtggcattccacccgaacttaatcaacagatggaagccctgaacctaagcatagttagtcgcggatttttggctgcgttggaagccaagcccaccttgctcgatcaaatccgcgaggctcagaagaatgatccggacatgcatggactcctcaagaatatgaaacagggtaaagccgctggtttcacagaggatgaacacggaaccttatggaacggaaatcgggagaaatactggtgggttagcatgaagcgggaaattgcagagttcgtggccctatgtgatgtgtgccagcgtgtcaaggcagagcaccaacgaccggccggacttctccaacctctccaagtaccagaatggaaatgggatgaaattgggatggatttcatcaccggacttccaaaaacccaaggtggatatgattctatatgggtagttgtggatcgattaaccaaggtagctcgatttattcctgtgaagaccacctatggagggaacaaactagccgagctctacttcgctaggatcgtgagtctccatggcgttcccaagaaaatcgtatctgataggggaagccaattcacctctcacttttggaagaagctccaagaagagctgggtacccgattaaatttcagcaccgcgtatcacccgcagacagatggacagaccgagcgtctaaatcagatcctagaagatatgcttcgcgcatgtgttctagatttcgggaagacctgggataagagtctcccctatgccgagttctcctacaacaacagctaccaagccagcatacaaatggcaccttatgaagcgttgtatgggcgcaagtgccggacaccactattgtgggaccaagttggagaaagccaagtgttcgggactgatatcctgagagaagctgaagctaaagtcagaatcattcgggataatctaaaggtggcacagtcccggcagaaaagttatgcagataaccgtcgctgtgacctggaattcgcagtgggtgactttgtgtatcttcgagtcacgccattgcgaggtgtacacaggtttcagacaaagggaaagctcgcacctcggtatgtgggtcctttccgtatcattgcccggcgcggagaagtcgcttaccagctggagctgcccgcctccttgggcaacgtgcacgatgtgtttcatgcgtcgcaactcaagaaatgtctccgagtgccatccgagcaggccgactcagagcaaattgaagttcgcgaagacttgacctacgtggagaggccagtgaaaatcctggacaccatggagcgcaggaccaggaaccggcccatcccgatctcttcgccagtccctccgaatctcggggtcgagattccgtttaaggggggtaggcgggcccgcccgccaccctcgctgacgggtggggcccacccgtcatccccttcctcgcgccgcgcccgccgccgcgcccgtgccctagcgccgccgccgccgccgaatccgccgcatcccgccgtccccgcgcgcattaaagagggggaaatcactccccgtgattccctcccttttttccccctctttcccctctctctctccctcggattcgtccgaaatcgcgcccgcgatcttcgccggcgtcatcaatggcggccgagatttccgcggccgattccttcccctccggccgctctctccctctcccggcgctatttaatcgcttcccgagctccgctcctccgtttccgccgctcgccgctcactctccccgtcggaatcgagcccgcgccgtcgtcctctcactccaccgtcgccgccgagctccggtcagtcgccgtcgtcgctccggacctcctcccgtttcggcgtcgcccccttcggcttcgccgcgtcctcgccgaccccgtccgcccctccgcttcgctcgccgaccgccggaacgccgccgtcctcctccgctccggtcgccgtttccgccaccctcgtcgtcccggggtgagccgtggaccgccgttcgctttccctcttccctcctctctctcgggtgccgctccgccgcgccgttggtcgccggcggcgaccatcggggcgcgggtgcgccgcctcccgttggccgtgccggcgaggccgccttcgggcgcgcccgcggctgccaggtgggcccggccgtcagccgcccgcgcccgtgggtgcggctaa

SEQ ID NO: 14193 - DNA, 5400 bp, Oryza sativa
  Clone ID: TFbOSC401000j.C1.o56.fg
atgtcatggcacagggccggtgtcctgctgctaggggctcagtcctgcctgcctgtcctgggggttccggccgtaggtgggattgggtcggtactcttgtctatggctaggatgggttggaaactatgtcacgtcttccgtctgtataccgtggtgatggccggcagcgtcacccgtcgtggtttggacatgactggtttcgtcttggagctgcggggcatgtgcgtggccctggggtatccacacggagtggactaccaggccaggccgcttccggagcaggagggtgacgatgcagagccccacgctgcttgggaggtcactgcagtgatcctcgctggctctcccgagcggacttcgctgacagtcaccgcgggtggagactctttccccgccgcttgccagagcgccgctctcctcgccatcggcactcttcaccagcgctacccggacgagttgcagcactcgccctaccgctaccaccctcgtcgcggaggagcccgcgaccacaccaccttccgggatgctagctcggaggatgacgctaccatcgtgcacctggcgcgcatggtggaggcgtacgacgcggctcgtatcgacttccatcagatggtgcgccgtgggatggtcgaggacaacctgaagatcctggagctgcgtcaagagaacctgcagctcaagaaggacctggacgcagtggaggcgcagctgcatcagctcaagatcgcccagggagagatctgccgccccaagcgtcgccgcgtctgccgcagcctgaagatcaccgcccgcaagagcacctccaggcccgagcttgttcgtcagtccctggcgtggacttgcttcgtcgagacccctcgtgccgagcccgcgcccgtgatggtgatgaccaggagaagtgctaacaccggtgatggcaaccaacctgaaggcagcaaccacaaccatcagggcaacccacctccacctcctcctctgcctccaccaccaccaccagacaccaacgccattctcacccaaatcctcgcccagcaggccaacatgatgactgctttcctccaccacctccaaaatccgccacaacttaatgctccaccaccacccccacaacactctaaactcgccgagtttctccgcatccgcccacctaccttctctagctccaacaaccccgtggatgcgttggattggttgcatgccgtggggaaaaagctagacactgtgcagtgcagcgatgaggagaaagtcatcttcgccgcccaccagctgcagggacccgcatctctatggtgggaccatttccaggctacgcagccagagggacagcctattacatgggctcgcttcaccgccgctttccgaagaacccatgtgcccgccggagtcgtggcccttaagaaaagggaattccgagagtggaagcaaggcaaccgctccgtgatggagtatttgcacgagttcaacaacctggcccgttacgctccggaggatgtgcgggaagatgaggagaagcaagagaagttcctggcaggaatggaccctgagctgtccgtccgtctagtctccggggattatccggatttccaacgtctggtggacaagagcatccgcttggaagccaagcacaaggaactggagtcgcacaagcgccgcttggcgaatttccgcaaccaacagggtgctaaccaaagggtccgctacaccaatccctatccagggggatcctcctcgcagcagcaacaacagcagcagcaacctcgctccgcgcctcgacctcaattcgtggtgcgcgtcccacagccgcagcagcagcagaatcaacaagggactcgtgcgccccgtcctcctccaccgactgtgcagcctggtcaaggccgcagggacgctcaaggtccgcagcgtctgtgcttcaactgcttcgagcccgggcactttgcggataaatgcccgaagccaaggcgtcagcaaggccaagcgcctccccgccccaacaacggtgttaaggacgtcattcggggtcgtgtgaaccatgtgacggccgaggacgtgctgacaactccagacgtcatcgttggtacgttcctcattcattccatccctgctaccattttgttcgactctggagcttcccactcgtttatatctgtgccattcgtggggagaaatcagttgggggtagaaaggcttagaaaccctctgctcatcaccacccctggaggggttatgacagcaaagtattatatccctgccgtccctatagaaattcaggggattccttttccctcggatctgattctgctagacaccaagaacttggatgtgatccttgggatgaattggttggctcaattccaaggagtagtggattgcgcgagacgcactgtcactctgtaccgagggccggaacaaccggttgttttctttgcacccccaacctcagtcagaagttcagaacttcatcagatagaactgtcagaaattcccatcgtcagagagttcggagacgtgtttccggaagaactacctggtatgccgcctaagcgagagattgagttccggatagatcttgctccaggaaccgctcctctgtacgagcgaccctaccgtatggcagcaaatgaactggccgaagttaagaaacagttggaagagctgaaagaaaaggggtatatacgtccgagtacttccccctggggtgctcctgtgatttttgtggagaagaaagacaagacgaagaggatgtgcgttgactacagagctctcaatgaagtcaccatcaaaaacaagtaccctcttccccggatcgatgatctgttcgatcagcttaaaggtgccactgtattctccaagattgatcttcgttccggatatcaccaattacgtattcgcgaagaagatattccgaagaccgcattcaccacgcgatacggactgtatgaattcacggtgatgtcgttcggtttaaccaatgctcctgccttcttcatgaacttaatgaacaaagtgttcatggaatacttggataagtttgtggtggttttcattgatgacattctgatatactcacaatcagaggaagaccatcagcaccatctccgtctggtattgggaaagttgcgggaacatcaattgtatgccaaacttagcaagtgtgagttctggttgtccgaagtcaaattcttagggcacgtgatatctgctaaaggagttgctgtggaccccgaaacagtgaccgccgtcaccgattggaagcaacccaagacagtcactcaagttcgcagtttcttaggtttggcaggatactaccggagattcatcgagaacttctccaaaatcgctcgacccatgacacagttgttgaagaaagaagagaaatttgtgtggagcccgcaatgcgagaaggcgttccaaactctcaaagaaaagctggtttcctcgccggtgttaatcttgccggatactcacaaggacttcatggtgtattgtgatgcttcgcgccaaggattggggtgcgtgctcatgcaggatggtcatgtggtggcctatgcctcacgccagctacggcctcatgaaggcaactaccctacccatgatttggagttagccgcggtggttcatgctctaaaaatctggcggcactatctcattgggaatcgctgtgaaatatatactgatcataagagtttgaaatacatcttcactcagtcggacctgaatcttcggcaaaggagatggttagaactcatcaaggattatgatgtgggaattcactatcatcctggtaaggccaacgtggttgccgacgctctaagtcgaaaaagccattgcaacactcttaacgtccgtggcattccacccgaacttaatcaacagatggaagccctgaacctaagcatagttagtcgcggattcttggctgcgctggaagccaagcccaccttgctcgatcaaatccgcgaggctcagaagaatgatccagacatgcatggactcctcaagaatatgaaacagggtaaagccgctggtttcacagaggatgaacacggaaccctatggaacggaaatcgagtatgcgttccagataacagagaacttaaacagttgatacttcaggaagctcacgaaagtccttattccatccaccctggcagcacgaagatctacttagacttgaaggagaaatactggtgggttagtatgaagcgggaaattgcagagttcgtggccctttgtgatgtgtgccagcgcgtcaaggcagagcaccaacgaccggccggacttctccaacctctccaagtacttgaatggaaatgggatgaaattgggatggatttcatcaccggacttccaaaaacccaaggtggatatgattctatatgggtagttgtggatcgattaaccaaggtagctcgattcattcctgtgaagaccacctatggagggaacaaactagccgaactctacttcgctaggatcgtaagtctccatggcgttcctaagaaaatcgtatctgataggggaagccaattcacctctcacttttggaagaagctccaagaagagctgggtacccgattaaacttcagcaccgcgtatcacccgcagacagatgggcagaccgagcgtctaaatcagatcctagaagatatgcttcgcgcatgtgtcctggatttcgggaagacctgggataagagtctcccctatgccgagttctcctacaacaacagctatcaagccagcatacaaatggcaccttatgaagcgttgtatgggcgcaaatgccggacaccgctaatgtgggatcaagttggggaaagccaagtgttcgggactgatatcctgagagaagctgaagctaaagtcagaaccattcgggataatccaaaggtggcacagtcccggcagaaaagttatgcagataaccgtcgccgtgacctggaattcgcagtggacgattttgtatatcttcgggtcacgccattgcgaggtgtacacaggtttcggacaaaagggaagctcgcacctcggtatgtgggtcctttccgtatcgttgctcgacgcggagaagtcgcttaccaattggagctgcccgcctccttgggcaacgtgcatgatgtgttccatgggtcgcaactcaagaaatgccttcgagtgccatccgagcaggccgactcagagcaaattgaagttcgcgaagacttgacctacgtggagaggccagtgaagatcctggacaccatggagcgcaggaccaggaaccgggtaatccgtttttgcaaggtccagtggagcaaccacgccgaagaagaagctacctgggagcgcgaagacgagctgaaggcagcccatccagatctcttcgccagttcttccgaatctcggggtcgagattccgtttaa

SEQ ID NO: 14194 - DNA, 6051 bp, Oryza sativa
  Clone ID: TFbOSC401018j.C1.o26.np
atggcggccggatcttccgcggccgattccccctcatccggccgctctctcctcctcccaacactacataaacactccccgtgcctccctccttcgtttccgccactcgccgctctctctccccgtcggaatcgagctcgcgccgtcgtcctctctctccgccgtcgccgccgagctccggtccgccgccgtcgtcgccccgggcctcctcccgtttcggcgtcgccttcttcgggttcgccgcgtcctcgccgatctcgtccaccccttcgtttcgcccgccgaccgccggaacgccgccgtcctcgtcgacccgagccgcgccgccgccttcctccgcttcggtcgccgttcccgtcgtcgccgtcgacccggggtgagccatggaccgcccatttcgtttcccccttccctctcctctctcgggcgccgctccgtcgcgccggaggtcgccgccggcgaccatcggggcgcgggtgcgccgcctcccgtcggctgtgccggcgaggccgccttcgggcgcgccccgcggctgccatgtggggcccggccgtcagccgcccgtgtcctcgggtgcggctgacgcgtgggacccacggcgccggccggcgtaagccgcgtgcacccggtccaccgtggacccacctcggccatataaggaccggtcttcgggcctctgttgcaaagcactaccgtacttccacatgtctagtggggcaaatgaaggctacacgagctgcggcccggtagtcgagatgtcatggcacagggccggtgtcctggtgctaggggctcagtcctgcctgcctgtcccgggtgttccggccgtaggtgggattgggtcgatgtacacctctgatcagagtaaaatctattcgaatagccgcgccctcggttatgggcaagccgagcaatgtacccaaatggccggcagcgtcagccgtcgtggtttggacatgactggcttcgtcttggagctgcggggcatgtgcgtggtcctggggtatccacatggagtggactaccaggccaggccgcttccggagcaggagggtgacgatgcggagccccacgctgcttgggaggtcactgcagtgatcctcgctggctctcccgagcggatttcgctgacagtcaccgcgggtggggattccttccccgccgcttgccagagcgccgctctcctcgccatcggcactcttcaccagcgctacccggacgagttgcagcactcgccctaccgctaccaccctcgtcgcggaggagcccgcgactacgccaccttccgggacgctagctcggaggatgacgctaccatcgtgcacctggcgcgcatggtgaaggcgtacgacgcggctcgtatcgacttccatcagatggtgcgtcgtgggatggtcgagaacaacatgaagatcctggagctgcgtcaggagaacctgcagctcaaaaaggacctagacgcggtggaggcgcagctgcatcaactcaagatcgcccagggagaggtctgccgccccaagcgtcgccgcgtctgccgcagccagaagatcaccgcccgcaagagcacctccaggcccgagcttgttcgtcagtccctggcgtggacttgcttcgtggagacccctcgtgccgagcccacgcccgtggttccccagaagggggaagcctccggcgttggtagcacggaggatgcgctgttgctcaccttccatggtgatgaccaggagaaatgctgccaccagtgatggcaaccaacccgaaggcagcaaccacaacaaccatggcagcccacctccacctcctcctccacctccaccaccaccaccagataccaacgccattcttacccaaatcctcgcccagcaggccaacatgatgactgcttttctccaccacctccaaaatccgccacaacataatgctccaccaccacctccccaacactctaaactcgccgagttcctccgcatccgtccacctaccttctctagctccaacaaccccgtggatgcgttggattggttgcatgccgtggggaaaaagatagacactgtgcagtgcagcgatgaggagaaagtcatcttcgccgcccatcagctgcaggggcccgcatctctatggtgggaccatttccaggctacgcagccagagggacagcctattacttgggcccgtttcaccgccgctttccggagaacccatgtgcccgctggagtcgtggcccttaagaaaagggaattccgagagttgaagcaaggcaaccgctccgtgatggagtatttgcatgagttcaacaacctggcccgttacgccccggaggatgtgcgggaagatgaggagaagcaaaagaagttcttggcaggaatggaccctgagctgtccgtccgtctagtctccggcgactatccggatttccaacgtctggtggacaagagcatccgcttggaagtcaagcacaaggaactggagtcgcacaagcgccgcttggcgaatttccgcaatcaacagggagctaaccaaagggtccgctacaccaatccctatccagggggatcctcctcgcagcagcgacaacagcagcaacaacctcgctccgcgccccgccctcaattcgtggtgcgcgtcccacagccgcagcaacagcagagtcagcaagggacccgtgcgcctcgtcctcctacgccaactgtgcagcctggccaaggccgcagggacgcttcaggtccgcagcgtctgtgcttcaactgcttcgagcccgggcactttgcggataaatgcccgaagccaaggcgacagcaaggccaagcgcctccccgctccaacaacggtggtaaggacgtcattcggggtcgtgtgaaccacgtgacggccgaggacgtgctgacaactccagacgtcatcgttggtacgttcctcattcattccatccctgctaccattttgttcgactctggagcttcccactcgtttatatctgtgccattcgtggggagaaatcagttgggggtagaaaggcttagaaaccctctgctcatcaccacccctggaggggttatgacagcaaagtattatagccctgcggttcctatagaaattcaggggattccttttccctcggatctgattctgctagacaccaagaacttggatgtggtccttgggatgaattggttggctcaattccaaggagtagtggattgtgcgagacgcaccgtcactctgtaccgagggccgggacaaccggttgttttctttgcacccccaacctctgtcagtagttcagaactgcatcagatagggctgtcagaaatccccatagtcagagagttcggagacgtgtttccggaagaactacctggtatgccgcccaagcgagagattgagttccggatagatcttgctctaggaaccactcctctgtgcaagcgaccctaccgtatggcagcaaatgaactggccgaagtcaagaaacagctggaagagttgaaagaaaaggggtacatacgtccgagcacttccccctggggtgctcctgtgatttttgtggagaagaaagacaagacgaagaggatgtgcgttgactacagagctctcaatgaagtcaccatcaaaaacaagtaccctcttccccggatcgatgatctgttcgatcagcttaaaggtgccactgtattctccaagatcgatcttcgttccggatatcaccaattgcgtattcgggaagaagattttccgaagaccgcattcaccacgcgatacggactgtatgaattcacggtgatgtcattcggtttaaccaatgcacctgccttcttcatgaacttaatgaacaaagtgttcatggaatacttggataagtttgttgtggttttcattgatgacattctgatatactcacaatccgaggaagaccatcagcaccatctcctcctggtgttgggaaagttgcgggaacatcaattgtatgccaaacttagcaagtgtgagttctggttgtccgaagtcaaattcttagggcacgtgatatctgctaaaggagttgctgtggaccccgaaacagtgaccgccgtcactgattggaagcaacccaagacagtcactcaagtccgcagtttcttaggtttggcaggatactaccggaggttcatcgagaacttctccaaaatcgctcgacccatgacacagttgttgaagaaagaagagaaatttgtgtggagcccgcaatgtgagaaggcgttcagaactctcaaagaaaagctggttgcctcgccagtgttaatcttgccggatactcgcaaggacttcatagtgtattgtgacgcttcgcgccaaggattggggtgcgtgctcatgcaggacggtcatgtggtggcctatgcctcacgccagcttcgacctcatgaaggcaactaccctacccatgacttggaattagccgcggtggttcatgctctaaaaatctggcggcactatctcattgggaatcgctgtgaaatatatactgatcataggagtttgaaatacatcttcacccagtcggatctgaatcttcggcaaaggagatggttagaactcatcaaggattatgatgtgggaattcactatcatcctggtaaggccaacgtggtcgccgacgctctaagtcgaaagagccattgcaacactcttaacgtccgtggcattccaccggaacttaatcaacagatggaagccctgaacctaagcatagttagtcgtggattcttggctacgctggaagccaagcctaccttgctcgatcaaattcgcgaggctcagaagaatgacccggatatgcatgggctcctcaagaatatgaaacagggtaaagccgctggtttcacagaggatgaacacggaaccctatggaacggaaatcggcgtgtcaaggcagagcaccaacgaccggccggacttctccaacctctccaagtcccagaatggaaatgggatgaaattgggatggattttatcaccggacttccaaaaacccaaggcggatatgattctatatgggtagtcgtggatcgactaaccaaggtagcacggttcattcccgtaaagaccacctatggagggaacaaactagctgaactctacttcgctaggattgtaagtctgcatggcgtccccaagaaaattgtatctgataggggaagccagttcacctctcacttttggaagaagctccaagaagagctgggtacccgattaaatttcagcaccgcgtatcacccgcagatagatggacagaccgagcgtctaaatcagatcctagaggatatgcttcgcgcatgtgtcctagatttcgggaagacctgggataagagtctcccctatgccgagttctcctacaataacagttatcaagccagcatacaaatggcaccttatgaagcgttgtatgggcgcaaataccggacaccgctattgtgggaccaagttggagaaagccaagtgttcgggactgatatcctgagagaagctgaagctaaagtcagaaccattcgggataatctaaaggtggcacagtcccggcagaaaagttatgcagataaccgtcgccgtgatctggaattcgcagtggatgactttgtgtatcttcgggtcacgccattgcgaggtgtacacaggtttcggacaaaggggaagctcgcacctcggtatgtgggtcctttccgtatcactgctcggcgcggagaagtcgcctaccagttggagctgcccgcctccttgggcaacgtgcatgatgtgttccatgtgtcacaactcaagaaatgtctccgagtgccatccgagcaggccgactcagagcaaattgtagttcgcgaagacttgacctacgtggagaggccagtaaaaatcctggacaccatggagcgcaggaccaggaaccgggtaatccgtttttgcaaggtcgagtggagcaaccacgccgaagaagaagctacctgggagcgcgaagacgagctgaaggcagcccatcccgatctcttcgccagttcttccgaatctcggggtcgagattccgtt

SEQ ID NO: 14195 - DNA, 5463 bp, Oryza sativa
  Clone ID: TFbOSC401018j.C1.o35.gm
atgatgactgcttttctccaccacctccaaaatccgccacaacataatgctccaccaccacctccccaacactctaaactcgccgagttcctccgcatccgtccacctaccttctctagctccaacaaccccgtggatgcgttggattggttgcatgccgtggggaaaaagctagacactgtggagtgcagcgatgaggagaaagtcatcttcgccgcccatcagctgcaggggcccgcatctctatggtgggaccatttccaggctacgcagccagagggacagcctattacttgggcccgtttcaccgccgctttccggagaacccatgtgcccgccggagtcgtggcccttaagaaaagggaattccgagagttgaagcaaggcaaccgctccgtgatggagtatttgcatgagttcaacaacctggcccgttacgccccggaggatgtgcgggaagatgaggagaagcaagagaagttcttggcaggaatggaccctgagctgtccgtccgtctagtctccggggactatctggatttccaacgtctggtggacaagagcatccgcttggaagccaagcacaaggaactggagtcgcacaagcgccgcttggcgaatttccgcaatcaacagggagctaaccaaagggtccgctacaccaatccctatccagggggatcctcctcgcagcagcaacaacagcagcagcaacctcgctccgcgccccgccctcaattcgtggtgcgcgtcccacagccgcagcaacagcagagtcagcaagggacccgtgcgcctcgtcctcctacgccaactgtgcagcctggccaaggccgcagggacgcttcaggtccgcagcgtctgtgcttcaattgcttcgagcccgggcactttgcggataaatgcccaaagccgaggcatcagcaaggccaagcgcctccctgctccaacaacggtggtaaggatgtcattcggggtcgtgtgaaccatgtgacggccgaggacgtgctgacaactccagacgtcatcgttgaactgcatcagataggtctgtcagaaatccccatagtcagagagttcggagacgtgtttccggaagaactacctggtatgccgcccaagcgagagattgagttccagatagatcttgctccaggaaccactcctctgtgcaagcgaccctaccgtatggcagcaaatgaactggccgaagtcaagaaacagctggaagagttgaaagaaaaggggtacatacgtccgagcacttccccctggggtgctcctgtgatttttgtggagaagaaagacaagacgaagaggatgtgcgttgactatagagctctcaatgaagtcaccataaaaaacaagtaccctcttccccggatcgatgatctgttcgatcagcttaaaggtgccactgtattttccaagattgatcttcgttccggatatcaccaactgcgtattcgtgatgaagatattccgaagaccgcattcaccacgcgatacggactgtatgaattcacggtgatgtcattcggtttaaccaatgcacccgccttcttcatgaacttaatgaacaaagtgttcatggaatacttggataaatttgttgtggttttcattgatgacattctgatatactcacaatccgaggaagaccatcagcaccatctcggtctggtattgggaaagttgcgggaacatcaattgtatgccaaacttagcaagtgtgagttctggttgtccgaagtcaaattcttagggcacgtgatatctgctaaaggagttgctgtggaccccgaaacagtgaccgccgtcactgattggaagcaacccaagacagtcactcaagtccgcagtttcttaggtttggcaggatactaccggaggttcatcgagaacttctccaaaatcgctcgacccatgacacagttgttgaagaaagaagagaaatttgtgtggagcccgcaatgcgagaaggcgttcaaaaccctcaaagaaaagctggttgcctcgccagtgttaatcttgccggatactcgcaaggatttcatggtgtattgtgacgcttcgcgccaaggattggggtgcgtgctcatgcaggatggtcatgtggtggcctatgcctcacgccagctacggcctcatgaaggcaactaccctacccatgatttggagttagccgcggtggttcatgctctaaaaatctggcggcactatctcattgggaatcgctgtgaaatatatactgatcataagagtttgaaatacatcttcactcagtcggacctgaatcttcggcagaggagatggttagaactcatcaaggattatgatgtgggaattcactatcatcctggtaaggccaacgtggttgccgacgctctaagtcgaaaaagccattgcaacactcttaacatccgtggcattccaccggaacttaatcaacagatggcagccctgaacctaaacatagttagtcgcggattcttggctgcgttggaagccaagcctaccttgctcgatcaaatccgcgaggctcagaagaacgatccggacatgcatggactcctcaagaatatgaaacagggtaaagccgctggtttcacagaggatgaacacggaaccctatggaatggaaatcggtacgaagatgtacttagacttgaaggagaaatactgagcaccaacgaccggccggacttctccaacctctccaagtaccagaatggaaaagggatgaaattgggatggatttcatcaccggacttccaaaaacccaaggtggatatgattctatatgggatcgtaagtctgcatggcgtccccaagaaaatcgtatctgataggggaagccaattcacctctcacttttggaagaagctccaagaagagctgggtacccgattaaacttcagcaccgcataccacccgcagacagatgggcagaccgagcgtctaaatcagatcctagaagatatgcttcgcgcatgtgtcctggatttcgggaagacctgggataagagtctcccctatgccgagttctcctacaataacagctaccaagccagtatacaaatggcaccttatgaagcgttgtatggacgcaagtgccggacaccgctattgtgggaccaagttggggaaagccaagtgttcgggactgatatcctgagacaagctgaagcgaaggtcagaaccattcgggataatctaaaggtggcacagtcccggcagaaaagttatgcagataaccatcgccgtgacctggaattcgcagtggatgactttgtgtaccttcgggtcacaccattgcgagctgtacacagctttcggacaaaagggaagctcgcacctcggttcgtgggtcctttccgtatcattgctcggcgcggagaagtcgcttaccagctggaactgcccgcctccttgggcaacgtgcatgatgtgttccatgtgtcgcaactcaagaaatgccttcgagtgccatccgagcaggccgactcagagcaaattgaagttcgcgaagacttgacctacgtggagaggccagttaaaatcctggacgccatggagcgcaggaccaggagccggcctttcccgtcgtcgccgtcgacccggggtgagccgtggaccgccgtttcgcttcccccttccctcccctctctcgggcgccgctccgccgcgccggtggtcgccggcggcgaccatcggggcgcgggcgtgccgcctcccgtcggctgtgctggcgaggccgccttcgggcgcgccccgcggctgccatgtggggcccggccgtcagccgcccgcgccctcggggcaaatgaaggctacacgagctgcggcccggtagtcgagatgtcatggcacagggccggtgtcctgctgctaggggctcagtcctgcctgcctgtcccgggtgttccggccgtaggtgggattgggtcgaggttcatggagaacttctccaaaatcgctcgacccatgacacagttgttgaagaaagaagagaaatttgtgtggagcccgcaatgtgagaaggcgttcagaactctcaaagaaaagctggttgcctcgccagtgttaatcttgccggatactcgcaaggacttcatagtgtattgtgacgcttcgcgccaaggattggggtgcgtgctcatgcaggacggtcatgtggtggcctatgcctcacgccagcttcgacctcatgaaggcaactaccctacccatgacttggaattagccgcggtggttcatgctctaaaaatctggcggcactatctcattgggaatcgctgtgaaatatatactgatcataagagtttgaaatacatcttcacccagtcggatctgaatcttcggcaaaggagatggttagaactcatcaaggattatgatgtgggaattcactatcatcctggtaaggccaacgtggtcgccgacgctctaagtcgaaagagccattgcaacactcttaacgtccgtggcattccaccggaacttaatcaacagatggaagccctgaacctaagcatagttagtcgtggattcttggctacgctggaagccaagcctaccttgctcgatcaaatctgcaaggctcagaagaatgacccggatatgcatgggctcctcaagaatatgaaacagggtaaagccgctggtttcacagaggatgaacatggaaccctatggaacggaaatcgggaagctcacgaaagtccttattccatccaccctggcagtacgaagatgtacctagacttgaaggagaaatactggtgggttagtatgaagcgggaaattgcagagttcgtggccctctgtgatgtgtgccagcgtgtcaaggcagagcaccaacgaccggccggacttctccaacctctccaagtaccagaatggaaatgggatgaaattgggatggattttatcaccggacttccaaaaacccaaggcggatatgattctatatgggtagtcgtggatcgactaaccaaggtagcacggttcattcccgtaaagaccacctatggagggaacaaactagctgaactctacttcgctaggatcgtcagtctgcatggcgtccccaagaaaattgtatctgatcggggaagccagttcacctctcacttttggaagaagctccaagaagagctgggtacccgattaaatttcagcaccgcgtatcacccgcagacagatggacagaccgagcgtctaaatcagatcctagaggatatgcttcgcgcatgtgtcctagatttcgggaagacctgggataagagtctcccctatgccgagttctcctacaataacagttatcaagccagcatacaaatggcaccttatgaagcgttgtatgggcgcaaatgccggacaccgctattgtgggaccaagttggagaaagccaagtgttcgggactgatatcctgagagaagctgaagcgaaggactga

SEQ ID NO: 14196 - DNA, 6050 bp, Oryza sativa
  Clone ID: TFbOSC401018j.C1.o37.np
gatggagccgagatcgccgcgccggtttccttcccctccggccgccctctctcactcccaacactatttaagcactccccgtgcctccctcctccgtttccgacccttgccgctttctctccccgtcggaatcgagctcgcgccgtcgtcctctctctccgccgttgccgccgagcttcggttcgccgccgtcgtcgccccggacctcctcccgcttcggcatcgcctccttcggcttcgccgcgtcctcgtcgacctcgtccaccccttcgtttcgcccgccgaccgccggaacgccgccgtcctcgtcgacccgagccgcgccgccgcctctctccgcttcggtcgccgttcccgtcatcgccgtcgacccggggtgagccgaggactgccatctcgcttcccccttccctcccctctctcgggcgccgctccgtcgcgccggaggtcgccgccggtgaccatcggggcgcgggcgcgccgcctcccgtcggccgtgccggcgaggccgccatcgggcgcgccccgcggctgccatgtggggcccggctgtcagccgcccgcgccctcgggtgcggctgacgcgtgggacccacggcgccggccggcgcaagccgtgtgcacccggtccaccgtggacccacctcggccatataaggaccggtgttcgggcctctgttgcaaagcactaccgtacttccacatgtctagtggggcaaatgaaggctacacgagctgcggcccggtagtcgagatgtcatggcacagggccggtgtcctgctgctaggggctcagtcctgcctgcctgtcccgggggttccggccgtagatgggattgggtcgatgtacacctctgatcagagtaaaatctattcgaatagccgcgccctcggttatgggcaagccgagcaatgtacccaaatggccggcagcgtcagccgtcgtggtttggacatgactggcttcgtcttggagctgcggggcatgtgcgtggtcctggggtatccacatggagtggactaccaggccaggccatttccggagcaggagggtgacgatgcagagccccacgctgcttgggaggtcactgcagtgatcctcgctggctctcccgagcggacttcgctgacagtcaccgcgggtggggactccttccccgccgcttgccagagcgccgctctcctcgccatcggcactcttcaccagcgctacccggacgagttgcagcactcgccctaccgctaccaccctcgtcgcggaggagcccgcgactacgccaccttccgggacgctagctcggaggatgacgctaccatcgtgcacctggcgcgcatggtggaggcgtacgacgcggctcgtatcgacttccatcagatggtgcgccgtgggatggtcgagaacaacatgaagatcctggagctgcgtcaggagaacctgcagctcaagaaggacctagatgcggtggaggcgcagctgcatcagctcaagatcgcccagggagagatctgccgccccaagcatcgccgcgtctaccgcagccagaagatcaccgcccgcaagagcacctccaggcccgagcttgttcgtcagtccctggcgtggacttgcttcgtggagacccctcgtgccgagcccgcgcccgtggttccccaggagggggaagcctccggcgttggtagcacggaggatgcgctgttgctcaccttccatggtgatgaccaggagaaatgctgccaccagtgatggcaaccaacccgaagacagcaaccacaacaaccatggcagcccacctccacctcctcctccgcctccaccaccaccaccagataccaacgccattctcacccaaatcctcgcccagcaggccaacatgatgactgcttttctccaccacctccaaaatccgccacaacataatgctccaccaccacctccccaacactctaaactcgccgagttcctccgcatctgtccacctaccttctctagctccaacaaccccgtggatgcgttggattggttgcatgccgtggggaaaaagctagacactgtgcagtgcagcgatgaggagaaagtcatcttcgccgcccaccagctgcagggacccgcatctctatggtgggaccatttccaggctacgcagccagagggacagcctattacatgggctcgcttcaccgccgctttccgaagaacccatgtgcccgccggagtcgtggcccttaagaaaagggaattccgagagttgaagcaaggcaaccgctccgtgatggagtatttgcacgagttcaacaacctggcccgttacgctccggaggatgtgcgggaagatgaggagaagcaagagaagttcctggcaggaatggaccctgagctgtccgtctgtctagtctccggggattatccggatttccaacgtctggtggacaagagcatccgcttggaagccaagcacaaggaactggagtcgcacaagcgccgcttggcgaatttccacaaccaacagggtgctaaccaaagggtccgctacaccaatccctatccagggggatcctcctcgcagcagcaacagcagcagcagcaacctcgctccgcgcctcgacctcaattcgtggtgcgcgtcccacagccgcagcaggagcagaatcaacaagggactcgtgcgccccgtcctcctccaccgactgtgcagcctggtcaaggccgcagggacgctcaaggtccgcagcgtctgtgcttcaactgcttcgagcccgggcactttgcggataaatgcccgaagccaaggcgtcagcaaggccaagcgcctccccgccccaacaacggtggtaaggacgtcattcggggtcgtgtgaaccatgtgacggccgaggacgtgctgacaactccagacgtcatcgttggtacgttcctcattcattccatccctgctaccattttgttcgactctggagcttcccactcatttatatctgtgccattcgtggggagaaatcagttgggggtagaaaggcttagaaaccctctgctcatcaccacccctggaggggttatgacagcaaagtattatagccctgccgtccctatagaaattcaggggattccttttccctcggatctgattctgctaggcaccaagaacttggatgtgatccttgggatgaattggttggctcaattccaaggagtagtggattgcgcgagacgcactgtcactctgtaccgagggccggaacaaccggttgttttctttgcacccccaacctcagtcagaagttcagaacttcatcagatagaactgtcagaaattcccatcgtcagagagttcggagacgtgtttccggaagaactacctggtatgccgcctaagcgagagattgagttccggatagatcttgctccaggaaccgctcctctgtacaagcgaccctaccgtatggcagcaaatgaattggccgaagttaagaaacagttggaagagctgaaagaaaaggggtatatacgtccaagtacttccccctggggtgctcctgtgatttttgtggagaagaaagacaagacgaagaggatgtgcgttgactacagagctctcaatgaagtcaccatcaaaaacaagtaccctcttccccggatcgatgatctgttcaatcagcttaaaggtgccactgtattctccaagattgatcttcgttccggatatcaccaattacgtattcgcgaagaagatattccgaagaccgcattcaccacgcgatacggactgtatgaattcacggtgatgtcgttcggtttaaccaatgctcctgccttcttcatgaacttaatgaacaaagtgttcatggaatacttggataagtttgtggtggttttcattgatgacattctgatatactcacaatcagaggaagaccatcagcaccatctccgtctggtattgggaaagctgcgggaacatcaattgtatgccaaacttagcaagtgtgagttctggttgtccgaagtcaaattcttagggcacgtgatatctgctaaaggagttgctgtggaccccgaaacagtgatcgccgtcaccgattggaagcaacccaagacagtcactcaagttcgcagtttcttaggtttggcaggatactaccgaaggttcatcgagaacttctccaaaatcgctcgacccatgacacagttgttgaagaaagaagagaaatttgtgtggagcccgcaatgcgagaaggcgtttcaaactctcaaagaaaagctggtttcctcgccggtgttaatcttgccagatactcacaaggacttcatggtgtattgtgacgcttcgcgccaaggataggggtgcgtgctcatgcaggatggttatgtggtggcctatgcctcacgccagcttcggcctcatgaaggcaactaccctactcatgatttggagttagccgcggtggttcatgccctaaaaatctggtggcactatctcattgggaatcgctgtgaaatatatactgatcataagagtttgaaatacatcttcactcagtcggatctgaatcttcggcaaaggagatggttagaactcatcaaggattatgatgtgggaattcactatcatcctggtaaggccaacgtggttgccgacgctctaagtcgaaaaggccattgcaacactcttaacgtccgtggcattccacccgaacttaatcaacagatggaagccctgaacctaagcatagttagtcgcggattcttggctgcgctggaagccaagcccaccttgctcgatcaaatccgcgaggctcagaagaatgctccagacatgcatggactcctcaagaatatgaaacagggtaaagccgctggtttcacagaggatgaacacggaaccctatggaacggaaatcgacgtgtcaaggcagagcaccaacgaccggccggacttctccaacctctccaagtacctgaatggaaatgggatgaaattgggatggatttcatcaccggacttccaaaaacccaaggtggatatgattctatatgggtagttgtggatcgattaaccaaggtagctcgattcattcctgtgaagaccacctatagagggaacaaactagccgaactctacttcgctaggatcgtaagtctccatggcgttcctaagaaaatcgtatctgataggggaagccaattcacctctcacttttggaagaagctccaagaagagctgggtacccgattaaacttcagcacagcgtatcacctgcagacagatgggcagaccgagcgtctaaatcagatcctagaagatatgcttcgcgcatgtgtcctggatttcgagaagacctgggataagagtctcccctatgccgagttctcctacaacaacagctatcaagccagcatacaaatggcaccttatgaagcgttgtatgggcgcaaatgccggacaccgctaatgtgggatcaagttggggaaagccaagtgttcgggactgatatcctgagagaagctgaagctaaagtcagaaccattcgggataatctaaaggtggcacggtcccggcagaaaagttatgcagataaccgtcgccgtgacctggaattcgcagtggacgattttgtatatcttcgggtcacgccattgcgaggtgtacacaggtttcggacaaaagggaagctcgcacctcggtatgtgggtcctttccgtatcgttgctcgacgcggagaagtcgcttaccaattggagctgcccgcctccttgggcaacgtgcataatgtgttccatgtgtcgcaactcaagaaatgccttcgagtgccatccgagcaggccgactcagagcaaattgaagttcgcgaagacttgacctacgtggagaggccagtgaagatcctggacaccatggagcgcaggaccaggaaccgggtaatccgtttttgcaaggaccagtggagcaaccacgccgaagaagaagctacctgggagcgcgaagacgagctgaaggcagcccatccagatctcttcgccagttcttccgaatctcggggtcgagattccgtt

SEQ ID NO: 14197 - DNA, 3143 bp, Oryza sativa
  Clone ID: TFbOSC401054j.C1.o1.fg
atgggttggaaactatgtcacgtcttccgcccgtataccgtggtgatggccggcagcgtcacccgtcgtggtttgagcatgactggcttcgtcttggagctgcggggcatgtgcgtggtcttggggtatccacatggagtggattaccaggccaggccgctcccggagcaggagggtgaggatgcagagcctcacgctggttgggaggtcactgcagtgatcctctccggctctcccgagcggacttcgctggcagtcaccgcgggtggagattccttccccgccgcttgccagaacgccgctctcctcgccatcggcacccttcaccagcgctacccggacgagttgcagcactcgccctaccgctaccaccctcgtcgcggaggagcccgcgactacgccaccttccgagacgccagctcggaggatgacgccaccgtcgtgcacctggcacgcatggtggaggcgtacgacgcggctcgtatcgacttccatcagatggtgcgccgtggcatggtggagaacaacctgaagatcctggagctgcgtcaggagaatctgcagctcaagaaggacctcgacgcgttggaggcgcagctgcatcagctcaagatcgcccagggagaggacagccgccccaagcgtcgccgcgtctgccgcagccagaagatcaccgcccgcaagagcacctccaggcccgagcttgttcgtcagtccctggcgtggacctgcttcgtcgagacccctcgtgccgagcctgcgcccgtggttccccaggagggggaagcctccggcgttggtagctcggagggtgcgctgttgctcaccttccgtcctggcccgtcgcagcgctctctttctctgtttgctggttctgtgtggggttttcagatggtgacgaccaggagaaatgttaacaccggtgaaggcaaccaacccgaaggcagcaaccacaaccaccaaggcaatccacctccacctccacctccgcctccaccaccaccgccagacaccaacgccattctcacccaaatcctcgcccagcaagccaacatgatgaccgctttcctccaccacctccaaaacccgccacaacagaatgctccaccaccacctccccaacactctaaactcgccgagttcctccgcatccgcccacctaccttctccagctccaacaaccccgtggatgctttggattggttgcatgccgtggggaagaagctagacacggtgcagtgcagtgatgaggagaaagtcgtcttcgccgcccatcagctgcagggacccgcatctctctggtgggaccacttccaggctacgcagccagagggacagccgattacttgggctcgcttcaccgccgctttccggagaacccatgtgcccgctggagtcgtggctcttaagaaaagggaattccgagagttgaagcaaggcaaccgctccgtgatggagtatttgcatgagttcaacaatctggcccggtacgctccgcaggatgtgcgggaagacgaggagaagcaggagaagttcttggcaggaatggaccctgagctgtccgttcgtctagtctctggggactatcctgattttcaacgactggtggacaagagcatccgcttggaagccaagcacaaggagctggaatcgcacaagcgccgcttggcgaatttccgcaatcaacagggtgctaaccagagggtccgctacaccaatccctacccagggggatcctcctcgcagcagcagcagcagcagcagcaacctcgctccgcgcctcgacctcaattcgtggtgcgcatcccacagccgcagcagcagcagaatcagcaagggactcgtgcaccccgtcctcctacgccaactgtgcagcccgttcaaggccgcagggacgctcaaggtcagcagcgtctgtgcttcaactgcttcgagcccgggcactttgcggataaatgcccaaagccaaggcgtcagcaaggccaagcgcctccccgctccaacaacggcgggaaggatgtcattcggggccgtgtgaatcatgtgacggccgaggacgtgctgacaactccagacgtcatcgttggtacgttcctcgttcattccatccctgctactattttgttcgactctggagcttcccactcgtttatatctgtgtcattcgtggggagaaatcagttgggggtagaaaggcttagaaaccctctgctcatcaccacccctggcggggttatgacagcaaagtattatagccctgccgttcctatagaaattcaggggattccttttccctcggatctgattctgctagacaccaagaacttggatgtgattcttgggatgaattggttggcacaattccaaggagtagtggattgcgcgagacgcactgttactctgtaccgagggccagaacaaccggttgttttctttgcacctccaacctctgtcagaagttcagaactgcatcagataggtctgtcagaaatccccatagtcagagagttcggagacgtgtttccggaagaactacctggtatgccgcccaagcgagagattgagttccggatagatcttgctccaggaaccactcctctgcacaagcgaccctaccgtatggcagcaaatgaactggccgaagtaaagaaacagttggaagagttgaaagaaaaggggtacatccgtccgagtacttccccatggggtgctcctatgatttttgtagagaagaaagacaagacgaagaggatgtgcgtcgactacagagctctcaatgaagtcaccatcaaaaacaagtaccctcttccccggatcgatgatctgttcgatcagcttaaaggtgccactgtattctccaagattgatcttcgttccggatatcaccaattacgtattcgggaagaagatattccgaagaccgcattcaccacgcgatacgggctgtatgaattcacggtgatgtcgttcggcttgaccaatgctcctgccttcttcatgaacttaatgaacaaagtgttcatggaatacttggacaagtttgttgtggttttcatcgatgacattctgatatactcacaatcagaggaagaccatcagcaccatctccgtctggtgttgggaaagttgcgggaacatcaatt

SEQ ID NO: 14198 - DNA, 5418 bp, Oryza sativa
  Clone ID: TFbOSC401054j.C1.o116.gm
atggttatgccgatggtgacgaccaggagaaatgttaacaccggtgaaggcaaccaacccgaaggcagcaaccccaaccaccaaggcaacccacctccacctccacctccacctccaccaccaccaccagataccaacgccattctcactcaaatcctcgcccaacaggcaaacatgatgactgctttcctccaccacctccaaaacccgccacaacagaatgctccaccaccacctccccaacactctaaactcgccgagttcctccgcatccgcccacctaccttctctagctccaacaaccccgtggatgcgttggactggttgcatgccgtggggaaaaagctagacacggtgcagtgcagcgatgaggagaaagtcgtcttcgccgcccatcagctgcagggacccgcatctctatggtgggaccacttccaggctacgcagccagaggggcaacctattacttggactcgcttcaccgccgctttccggagaacccatgtgcccgctggagtcgtggctcttaagaaaagggaattccgggagttgaagcaaggcaaccgctccgtgatggagtatttgcatgagttcaacaatctagcccgttacgctccggaggatgtacgggaagatgaggagaagcaagagaagttcttggcaggaatggaccctgagctgtccgtccgtctagtctctggggactatcctgattttcaacgactggtggacaagagcatccgcttggaggccaagcacaaggagctggaatcgcacaagcgccgtttggcgaatttccgcaatcaacagggtgctaaccagagggtccgctacaccaatccctacccagggggatcctcctcgcagcagcagcaacagcagcagcaacctcgctccgcgcctcgacctcaattcgtggtgcgcgtcccacagccgcagcagcagcagaatcaacaagggactcgtgcaccccgtcctcctacgccaactgtgcagcccgttcaaggccgcagggacgctcaaggtcagcagcgtctgtgcttcaactgcttcgagcccgggcactttgcggataaatgcccgaagccaaggcgtcagcaaggccaagcgcctccccgctccaacaacggcgggaaggatgtcattcggggccgtgtgaatcatgtgacggccgaggacgtgctgacaactccagacgtcatcgttgaacttcatcagatagaactgtcagaaattcccatcgtcagagagttcggagacgtgtttccggaagaactacccggtatgccgcccaagcgagagattgagttccgaatagatcttgctccaggaaccactcctctgcacaagcgaccctaccgtatggcagcaaatgaactggccgaagttaagaaacagttggaagagttgaaagaaaaggggtacatacgtccgagtacttccccatggggtgctcctgtgatttttgtagagaagaaagacaagacgaagaggatgtgcgttgactacagagctctcaatgaagtcaccatcaaaaacaagtaccctcttccccggatcgatgatctgttcgatcagctcaaaggtgccactgtattctccaagattgatctccgttccggatatcaccaattacgtattcgtgaagaagatattccgaagaccgcattcaccacgcgatacgggctgtatgaattcacggtgatgtcgttcggtttgaccaatgcacctgccttcttcatgaacttaatgaataaagtgttcatggaatacttggataagtttgttgtggttttcattgatgacattctgatatactcacaatcagaggaagaccatcagcaccatctccgtctggtgttgggaaagttgcgggaacatcaattgtatgccaagcttagcaagtgtgagttctggttgtccgaagtcaaattcttagggcacgtgatatctgcaaaaggagttgctgtggatcccgaaacagtgaccgccgtcaccgactggaagcaacccaagacagttacccaagtccgcagtttcttaggtttggcaggatactaccggagattcatcgagaacttctccaagatcgctcgacccatgacgcagttgttgaagaaagaagagaaatttgtgtggagcccgcaatgcgagaaggcgtttcaaactctcaaggaaaagctggtttcctcgccagtgttaatcttgccggatactcgcaaggacttcatggtgtattgtgatgcttcgcgccaaggattggggtgcgtgctcatgcaggacggtcatgtggtagcctatgcctcacgccagctacgtcctcatgaaggcaactaccctacacatgatttggagttagccgcagtagttcatgctctaaaaatctggcggcactatctcattgggaatcgctgtgaaatctataccgaccataagagtttgaaatacatcttcactcagtcggacctgaatcttcggcaaaggagatggttagaactcatcaaggactatgatgtgggaattcactatcatcctggtaaggccaacgtggttgccgacgctctaagtcgaaagagccattgcaacaatcttaacgtccgtggcattccacccgaacttagtcaacagatggaagccctgaacctaaacatagttggtcgtggattcttggctgcgttagaagccaagcctaccttgctcgatcaaatccgcgaggctcagaagaatgatccggacatgcatggactcctcaagaatatgaaacagggtaaagccgctggtttcacagaggatgaacacggaaccctatggaacggaaatcggcgtgtcaaggcagagcaccaacgaccggccggacttctccaaccactccaagtacccgaatggaaatgggatgaaattgggatggatttcatcactggacttccaaagacccaaggcggatatgattccatatgggtagttgtggatcgattaaccaaggtggctcgatttattcctgtgaagaccacctatggagggaacaaactagcggagctctacttcgctaggatcgtgagtctccacggcgttcccaagaaaatcgtatctgataggggaagccaattcacctctcacttttggaagaagctccaagaagagctgggcactcgattgaatttcagcaccgcctatcacccgcagacagatggacagaccgagcgtctaaatcagatcctagaagatatgctccgcgcatgtgtactagatttcgggaagacctgggataagagtctcccctatgccgagttctcctacaataacagctatcaagccagcatacaaatggcaccatatgaagcgttgtacgggcgcaaatgccggacaccgctcctgtgggaccaagttggggaaagccaagtgttcgggactgatatcctgagagaagctgaagctaaagtcagaatcattcgggataatctaaaggtggcacagtcacggcagaaaagttatgcagataaccgtcgccgtgatctggaattcgcagtggatgactttgtgtatcttcgggtcacgccattgcgaggtgtacacaggtttcagacgaaagggaagcttgcacctcggtatgtgggtcctttccgtatcgttgctcgacgcggagaagtcgcttaccagttggagctgcccgcctccttgggcaatgtgcatgatgtgttccatgtgtcgcaactcaagaaatgtcttcgagtgccgtccgagcaggccgactcagagcaaattgaagttcgcgaagacttgacctatgtggaaaggccagtgaaaatcctggacaccatggagcgcaggaccaggaaccgggtaatccgtttttgcaaggtccagtggagcaaccacgccgaagaagaagctacttgggagcgtgaagacgagctgaaggcagcccatcccgatctcttcgccacggcaaagggaggtcctgtcaaaaaggtggctaagaagaaaggactcgtcgatgtcgctcgcgtttttagcgacgatgagtcctccgacgggactccgacctcgcccgctggtcgcagcctggatctttcggccgcccccattccttcactcggcgtcgctggagtgggcggtagtaccgccgctggggcttcggcttctgcggaaaggattgtgacggccgcggcgaaagtattcggcagtcctccgcatcagccggttgcgtcgccgctgattgaggcgaagggaaagagagcggtcgctgagacgtccacttcggaatattcgctctcggtaccccgcttcgcccctggcgatttcgagacgcgggcggacctccttccttttgtggagggggtaagcaatcttgtactgcccgccagtgccccgagcttgttcaccgaactgaatgagttcgatgaggggtgtactgctataaaaagcctggctgttcggatcctcgcggctcactgctcaatggagcgaaccgtgcgagcccgacttgatgggttcaaaagccatcttcgggccaaggatgatgaactaggccgtaaaaatttggagatggacgcccttgccaactcccttaaggaggcgaaggctgaaaacaagcggctccaatcggaactggagaaagggaaagaagccagggccgaagtcgatcgcttaaaggccgaactggagaaagagaaggcccacaccgccgtgctcatagattattacagcctcaccgagccgaagatggaggctcttcggcaggaggttcgcaaggccgaagcaagcgctgcagaggagtcgtggcggttttcgcgggagatagtgaaaaccaccgagtccgcgcggacagcgtgccaaacgcttcgcctcgcccgtattgacatgggcgcgaaagtgtggggtgtcccctccgaagatgcatcagccttcgacttctccgaatggacccaacaggctggtggttcggtttccgactgcgccaccgcatacggcgactgctgtgcgcgcgtgtcagcgacctttaccatgggcctcctgcagcagttcggctgcgagcacatcgccgagttccccaagtacgcgaagggggattgggaaatcagtgcgcaagacatttcgcccacacttcgtgcgtggcgaaaacaattttggcagaaggacggccgctccgccgctaaggcgcgccttttggagcagctggcgaaagctgaggcggcggacctttgtgaagatgaaggcgcggcggccagagggggtggaggcgatgcccgggaccatgcagagatcatactggggcgcggcttggcttcggccatgacgctggcaactttcgcacttcttgatttgctcaacacagactttcaacacagtgggccaataaactccttgtctaaatactttggaggccactgttcttgcagcctggtgcgcgccacatag

SEQ ID NO: 14199 - DNA, 5466 bp, Oryza sativa
  Clone ID: TFbOSC401054j.C1.o41.fg
atgtcatggcacagggccggtgtcctgctgctaggggctcagttctgcctgcctgtcccgggtgttccggccgtaggcaggattgggtcggtactcttgtctatggctaggatgggttggaaactatgtcacgtcttccgtctatataccgtggtgatggccggcagcgtcacccgtcgtggtttggacatgactggcttcgtcttggagttgcggggcatgtgcgtggccctggggtatccacacggagtggactaccaggccaggccgctcccggagcaggagggtgacgatgcggagccccgcgctggttgggaggtcactgcagtgatcctcgctggctcttctgagcggacttcgctgacagtcaccgcgggtggcgattccttccccgccgcttgccagagcgccgctctcctcgccatcggcactcttcaccagcgctacccggacgagttgcagcactcgccctaccgctaccaccctcgtcgcggaggagcccgcgactacgccaccttccgggatgctagctcggaggatgacgctaccatcgtgcacctggcgcgcatggtggaggcgtacgacgcggctcgtatcgacttccatcagatggtgcgccgtgggatggtcgagaacaacatgaagatcctggagctgcgtcaggagaacctgcagctcaagaaggacctcgacgcggtggaggcgcagctgcatcagctcaagatcgcccagggagagatctgccgccccaagcgtcgccgcgtctgccgcagccagaagatcaccgcccgcaagagcacctccaggcccgagcttgttcgtcagtccctggcgtggacttgcttcgtcgagacccctcgtgccgagcccgcgcccgtggttccccaggagggggaagcctccggcgttggtagcacggaggttgtgtggggcatggttatgccgatggtgacgaccaggagaaatgctaacaccggtgatggcaaccaacccgaatgcagcaaccacaaccaccagggcaacccacctccacctcctcctcctcctccaccaccaccaccagacaccaacgccattctcacccaaatcctcgcccagcaagccaacatgatgaccgctttcctccaccacctccaaaacccgccacaacaaaatgctccaccaccacccccacaacactctaaactcgccgaattcctccgcatccgcccacctaccttctctagctccaacaaccccgtggatgctttggattggttgcatgccgtggggaaaaagttaggcactgtgcagtgcagcgatgaggagaaagtcatcttcgccgcccaccagctgcaaggacccgcatctctatggtgggaccacttccaggctacgcagccagagggacagcctattacttgggctcgcttcaccgccgctttccggagaacccatgtgcccgccggagtcgtggcccttaagaaaagggaattccgagagttgaagcaaggcaaccgctccgtgatggagtatttgcatgagttcaacaatctggcccgttacgctccggaggatgtgcgggaagatgaggagaagcaagaaaagttcttggcaggaatggaccccgagctgtccgtccgtctagtctctggggattatccggattttcaacgactggtggacaagagcatccgcttggaagctaagcacaaggagctggagtcgcacaagcgtcgcttggcgaatttccgcaatcaacagggtgctaaccaaagggtccgctacaccaatccctatccagggggatcctcctcgcagcagcaacaacagcagcagcaacctcgctccgcgccccgacctcaattcgtggtgcgcgtcccacagccgcagcagcagcagaatcagcaagggactcgtgcgccccgtcctcctacgccaactgtgcagcctggccaaggccgcagggacgctcaaggtcagcagcgtctatgcttcaactgcttcgagcccgggcactttgcggataaatgcccaaagccaaggcgtcagcaaggccaagcgcctccccgctccaacaacggcgggagggatgtcattcggggtcgtgtgaatcacgtgacggccgaggacgtgctgacaactccggacgtcatcgttggtacgttcctcgttcattccatccctgctacaattttgttcgactctggagcttcccactcgtttatatctgtgccatttgtggggagaaatcagttgggggtagaaaggcttaggaaccctctgctcatcaccacccctggaggggttatgacagcaaagtattatagccctaccgtccctatagaaattcaggggattccttttccctcggatctgattctgctagacaccaagaacttggatgtgatccttgggatgaattggttggctcaattccaaggagtagtggattgcgcgagacgcacggtcactctgtaccgagggccggaacaaccggttgttttctttgcacccccaacctctgtcagaagttcagaacttcatcagatagaactgtcagagattcccatcgtcagagagttcggagacgtgtttccggaagaactacctggtatgccgcccaagcgagagattgagttccggatagatcttgctccaggaaccactcctctgtacaagcgaccctaccgtatggcagcaaatgaactggccgaagtcaagaaacagttggaagagttgaaagaaaaggggtatatacgtccgagtacttccccatgggatgctcctgtgatttttgtagagaagaaagacaagacgaagaggatgtgcgtcgactacagagctctcaatgaagtcaccatcaaaaacaagtaccctcttccccggatagatgatctgttcgatcagcttaaaggtgccactgtattctccaagattgatcttcgttccggatatcaccaattacgtattcgtgaagaagatattccgaagaccgcattcaccacgcgatacgggctgtatgaattcacggtgatgtcgttcggtttgaccaatgcacctgccttcttcatgaacttgatgaacaaagtgttcatggaatacttggataagtttgttgtggttttcattgatgacattctgatatactcacaatcagaggaagaccatcagcaccatctccgtctggtattgggaaagctgcgggaacatcaattgtatgccaaacttagcaagtgtgagttctggttgtccgaagtcaaattcttagggcacgtgatatctgctaaaggagttgctgtggatcccgaaacagtgatcgccgtcaccgattggaagcaacccaagacagtcactcaaattcgcagtttcttaggtttggcagggtactatcggagattcatcgagaacttctccaaaatcgctcgacccatgacacagttgttgaagaaagaagagaaatttgtgtggagcccgcaatgcgagaaggcgtttcaaactctcaaggaaaagctggtttcctcgccagtgttaatcttgccggatactcgcaaggacttcatggtgtattgtgacgcttcgcgccaaggattggggtgcgtgctcatgcaggacggtcatgtggtagcctatgcctcacgtcagctacgacctcatgaaggcaactaccctacccatgatttggagttagccgcggtggttcatgctctaaaaatctggaggcactatctcattgggaatcgctgtgaaatatataccgaccataagagtttgaaatacattttcacccagtcggatctgaatcttcggcaaaggagatggttagaactcatcaaggactatgatgtgggaattcactatcatcctggtaaggccaacgtggttgccgacgctctaagtcgaaagagccattgcaacactcttaacgtccgtggcattccacccgaacttagtcaacagatggaagccctgaacctaagcatagttggtcatggagtcttggctgcgttggaagccaagcctaccttgctcgatcaaatccgcgaggctcagaagaatgatccggacatgcatggactcctcaagaatatgaaacagggtaaagccgctggtttcacagaggacgaacacggaaccctatggaacggaaatcgggtatgcgttccagatgacagagaacttaaacagctgatactacaggaagctcacgaaagtccttattccattcacccgggcagtacaaagatgtacctagacttgaaggagaaatactggtgggttagcatgaagcgggagattgcagagttcgtggccctgtgtgatgtgtgccagcgtgtcaaggcagagcaccagcgaccggccggacttctccaacctctccaagtaccagaatggaaatgggatgaaattgggatggatttcatcaccggacttccaaaaacccaaggcggatatgattctatatgggtagttgtggatcgattaaccaaggtagctcgatttattcctgtgaagaccacctatggagggaacaaactagcggagctctacttcgctaggatcgtgagtctccatggcgttcccaagagaatcgtatctgataggggaagccaattcacctctcacttttggaagaagctccaagaagagctgggtactcgattgaatttcagcaccgcctatcacccgcagacagatggacagaccgagcgtctaaatcagatcctagaagatatgcttcgcgcatgtgtcctagatttcgggaagacctgggataagagtctcccctatgccgagttctcctacaacaacagttatcaagccagcatacaaatggcaccttatgaagcgttgtatgggcgcaaatgccggacaccgctcttgtgggaccaagttggagaaagccaagtgttcgggactgatatcctgagagaagctgaagctaaagtcagaatcattcgggataatctaaaggtggcacagtcccggcagaaaagttatgcagataaccgtcgccgtgacctggaattcgcagtggatgattttgtgtaccttcgggtcacgccattgcgaggtgtacacaggtttcagacaaaagggaagctcgcacctcggtatgtgggtcctttccgtatcgttgctcggcgcggagaagtcgcttaccagttggagctgcccgcctccttgggcaacgtgcatgatgtgtttcatgtgtcgcaactcaagaaatgccttcgagtgccatccgagcaggccgactcagagcaaattgaagttcgcgaagatttgacctacgtggagaggccagtgaaaatcctggataccatggagcgcaggaccaggaaccgggtaatccgtttttgcaaggtccagtggagcaaccacgccgaagaagaagctacctgggagcgtgaagacgagctgaaggcagcccatccagatctcttcgccagttcttccaaatctcggggtcgagattccgtttaa

SEQ ID NO: 14200 - DNA, 5466 bp, Oryza sativa
  Clone ID: TFbOSC401054j.C1.o71.fg
atgtcatggcagagggttggtgccctgctgctaggggctcagtcttgcctgcctgtcccgggggttccggccgtaggcaggattgggtcggtactcttgtctatggctaggatgggttggaaactatgtcacgtcttccgtctgtataccgtggtgatggccggcagcgtcacccgtcgtggtttggacatgactggcttcgtcttggagttgcggggcatgtgcgtggccctggggtatccacacggagtggactaccaggccaggccgctcccggagcaggagggtgacgatgcggagccccgcgctggttgggaggtcactgcagtgatcctcgctggctcttctgagcggacttcgctgacagtcaccgcgggtggcgattccttccccgccgcttgccagagcgccgctctcctcgccatcggcactcttcaccagcgctacccggacgagttgcagcactcgccctaccgctaccaccctcgtcgcggaggagcccgcgactacgccaccttccgggatgctagctcggaggatgacgctaccatcgtgcacctggcgcgcatggtggaggcgtacgacgcggctcgtatcgacttccatcagatggtgcgccgtgggatggtcgagaacaacatgaagatcctggagctgcgtcaggagaacctgcagctcaagaaggacctcgacgcggtggaggcgcagctgcatcagctcaagatcgcccagggagagatctgccgccccaagcgccgccgtgtctgccgcagccagaagatcaccgcccgcaagagcacctccaggcccgagcttgttcgtcagtccctggcgtggacttgcttcgtcgagacccctcgtgccgagcccgcgcccgtggttccccaggagggggaagcctccggcgttggtagcacggaggttgtgtggggcatggttatgccgatggtgacgaccaggagaaatgctaacaccggtgatggcaaccaacccgaatgcagcaaccacaaccaccagggcaacccacctccacctcctcctcctcctccaccaccaccaccagacaccaacgccattctcacccaaatcctcgcccagcaagccaacatgatgaccgctttcctccaccacctccaaaacccgccacaacaaaatgctccaccaccacccccacaacactctaaactcgccgaattcctccgcatccgcccacctaccttctctagctccaacaaccccgtggatgctttggattggttgcatgccgtggggaaaaagttaggcactgtgcagtgcagcgatgaggagaaagtcatcttcgccgcccaccagctgcaaggacccgcatctctatggtgggaccacttccaggctacgcagccagagggacagcctattacttgggctcgcttcaccgccgctttccggagaacccatgtgcccgccggagtcgtggcccttaagaaaagggaattccgagagttgaagcaaggcaaccgctccgtgatggagtatttgcatgagttcaacaatctggcccgttacgctccggaggatgtgcgggaagatgaggagaagcaagaaaagttcttggcaggaatggaccccgagctgtccgtccgtctaatctctggggattatccggattttcaacgactggtggacaagagcatccgcttggaagctaagcacaaggagctggagtcgcacaagcgtcgcttggcgaatttccgcaatcaacagggtgctaaccaaagggtccgctacacccatccctacccagggggatcctcctcgcagcagcaacaacagcagcagcaacctcgctccgcgcctcgacctcaattcgtggtgcgcgtcccacagccgcagcaacagcagaatcaacaagggactcgtgcgccccgtcctcctacgccaactgtgcagcctggccaaggccgcagggacgctcaaggtcagcagcgtctatgcttcaactgcttcgagcccgggcactttgcggataaatgcccaaagccaaggcgtcagcaaggccaagcgcctccccgctccaacaacggcgggagggatgtcattcggggtcgtgtgaatcacgtgacggccgaggacgtgctgacaactccggacgtcatcgttggtacgttcctcgttcattccatccctgctacaattttgttcgactctggagcttcccactcgtttatatctgtgccatttgtggggagaaatcagttgggggtagaaaggcttaggaaccctctgctcatcaccacccctggaggggttatgacagcaaagtattatagtcctgccgtccctatagaaattcaggggattccttttccctcggatctgattcttctagacacaaagaacttggatgtgatccttgggatgaattggttggctcaattccaaggagtagtggattgcgcgagacgcactgtcactctgtaccgagggccagaacaaccggttgttttctttgcacccccaacctctgtcagaagttcagaacttcatcagatagaactgtcagagattcccatcgtcagagagttcggagacgtgtttccggaagaactacctggtatgccgcccaagcgagagattgagttccggatagatcttgctccaggaaccactcctctgtacaagcgaccctaccgtatggcagcaaatgaactggccgaagtcaagaaacagttggaagagttgaaagaaaaggggtatatacgtccgagtacttctccctggggtgctcctgtgatttttgtggagaagaaagacaagacgaagaggatgtgcgttgactacagagctctcaatgaagtcaccatcaaaaacaagtaccctcttccccggatagatgatctgttcgatcagcttaaaggtgccactgtattctccaagattgatcttcgttccggatatcaccaattacgtattcgtgaagaagatattccgaagaccgcattcaccacgcgatacgggctgtatgaattcacggtgatgtcgttcggtttgaccaatgcacctgccttcttcatgaacttgatgaacaaagtgttcatggaatacttggataagtttgttgtggttttcattgatgacattctgatatactcacaatcagaggaagaccatcagcaccatctccgtctggtattggaaaagctgcgggaacatcaattgtatgccaaacttagcaagtgtgagttctggttgtccgaagtcaaattcttagggcacgtgatatctgctaaaggagttgctgtggatcccgaaacagtgatcgccgtcaccgattggaagcaacccaagacagtcactcaaattcgcagtttcttaggtttggcagggtactatcggagattcatcgagaacttctccaaaatcgctcgacccatgacacagttgttgaagaaagaagagaaatttgtgtggagcccgcaatgcgagaaggcgtttcaaactctcaaggaaaagctggtttcctcgccagtgttaatcttgccggatactcgcaaggacttcatggtgtattgtgacgcttcgcgccaaggattggggtgcgtgctcatgcaggacggtcatgtggtagcctatgccttacgtcagctacgaccttatgaaggcaactaccctacccatgattgggagttagccgcggtggttcatgctctaaaaatctggaggcactatctcattgggaatcgctgtgaaatatataccgaccataagagtttgaaatacattttcacccagtcggatctgaatcttcggcaaaggagatggttagaactcatcaaggactatgatgtgggaattcactatcatcctagtaaggccaacgtggttgccgacgctctaagtcgaaagagccattgcaacactcttaacgtccgtggcattccacccgaacttagtcaacagatggaagccctgaacctaagcatagttggtcatggagtcttggctgcgttggaagccaagcctaccttgctcgatcaaatccgcgaggctcagaagaatgatccggacatgcatggactcctcaagaatatgaaacagggtaaagccgctggtttcacagaggacgaacacggaaccctatggaacggaaatcgggtatgcgttccagatgacagagaacttaaacagctgatactacaggaagctcacgaaagtccttattccattcacccgggcagtacaaagatgtacctagacttgaaggagaaatactggtgggttagcatgaagcgggagattgcagagttcgtggccctgtgtgatgtgtgccagcgtgtcaaggcagagcaccagcgaccggccggacttctccaacctctccaagtaccagaatggaaatgggatgaaattgggatggatttcatcaccggacttccaaaaacccaaggcggatatgattctatatgggtagttgtggatcgattaaccaaggtagctcgatttattcctgtgaagaccacctatggagggaacaaactagcggagctctacttcgctaggatcgtgagtctccatggcgttcccaagagaatcgtatctgataggggaagccaattcacctctcacttttggaagaagctccaagaagagctgggtactcgattgaatttcagcaccgcctatcacccgcagacagatggacagaccgagcgtctaaatcagatcctagaagatatgcttcacgcatgtgtcctagatttcgggaagacctgggataagagtctcccctatgccgagttctcctacaacaacagttatcaagccagcatacaaatggcaccttatgaagcgttgtatgggcgcaaatgccggacaccgctcttgtgggaccaagttggagaaagccaagtgttcgggactgatatcctgagagaagctgaagctaaagtcagaatcattcgggataatctaaaggtggcacagtcccggcagaaaagttatgcagataaccgtcgccgtgacctggaattcgcagtggatgattttgtgtactttcgggtcacgccattgcgaggtgtacacaggtttcagacaaaagggaagctcgcacctcggtatgtgggtcctttccgtatcgttgctcggcgcggagaagtcgcttaccagttggagctgcccgcctccttgggcaacgtgcatgatgtgtttcatgtgtcgcaactcaagaaatgccttcgagtgccatccgagcaggccgactcagagcaaattgaagttcgcgaagatttgacctacgtggagaggccagtgaaaatcctggataccatggagcgcaggaccaggaaccgggtaatccgtttttgcaaggtccagtggagcaaccacgccgaagaagaagctacctgggagcgtgaagacgagctgaaggcagcccatccagatctcttcgccagttcttccgaatctcggggtcgagattccgtttaa

SEQ ID NO: 14201 - DNA, 5304 bp, Oryza sativa
  Clone ID: TFbOSC401058j.C1.o35.fg
atggatgaagtcgggggtcgatggacattctccagggcaaatgaaggctacacgagctgcggcccgatggccggcagcgtcacccgtcgtggtttggacatgactggcttcgttttggagctgcgaggcatgtgcgtggtcctggggtatccacacggagaggactaccaggccaggccgcttccggatcaggagggagacgacgcggagccccacgctgggtgggaggtcaccgcagtgatcctctctggctcccccgagcggacttcgctggcagtcaccgcgggtggagactccttccccgccgcttgccagaacgccgctctcctcgccatcggcacccttcaccagcgctacccggacgagttgcagcactcgccctaccgctaccaccctcgtcgcggaggagcccgcgactacgccaccttccgggatgctagctcggaggatgacgctaccatcgtgcacctggcacgcatggtggaggcgtacgacgcggctcgtatcgacttccatcagatggtacgccgcgggatggtcgagaacaacatgaagatcctggagctgcgtcaggagaacctgcagctcaagaaggacctcgacgcagtggaggcgcagctgcaccagctcaaggtcgcccagggagagatctgccgccccaagcgtcgccgtgtctgccgcagccagaagatcaccgcccgcaagagcacctccaggcccgagcttgttcgtcagtccctggcgtggacctgcttcgtcgagacccctcgtgccgagcctgcgcccgtgatggtgacgaccaggagaaatgctgctaccggtgatggcaaccaacccgaaagcagcaaccacaaccaccagggcaacccacctccacctcctcctccgcctccaccaccaccaccagacaccaacgccattctcacccaaatcctcgcccagcaagccaacatgatgaatgctttcctccaccacctccaaaacccgccacaacagaatgctccaccaccacctccccaacactctaaactcgccgagttcctccgcatccgcccacctaccttctccagctccaacaaccccgtggatgctttggattggttgcatgccgtggggaaaaagctagacacggtgcagtgcagcgatgaggagaaagtcgtcttcgccgcccatcagctgcagggacctgcatctctatggtgggaccacttccaggctacgcagccagagggacagccgattacttgggctcgcttcaccgccgctttccggagaacccatgtgcccgctggagtcgtggctcttaagaaaagggaattccgagagttgaagcaaggcaaccgctccgtgatggagtatttgcatgagttcaacaacctggcccgttacgctccggaggatgtgcgggaagatgaggagaagcaagagaagttcttggcaggaatggaccctgagctgtccgtccgtctagtctctggggactatccggattttcaacgactggtggacaagagcatccgcttggaagccaagcacaaggagttggaatcgcacaagcgccgcttggcgaatttccgcaatcaacagggtgctaaccaaagggttcgctacaccaatccctatccagggggatcctcctcgcagcagcagcagcagcaacctcgcccagcgcctcgacctcaattcgtggtgcgcgtcccacagccgcagcagcagcagaatcagcaagggactcgtgcgccccgtcctcctacgccagctgtgcagcccgttcaaggccgcagggacgctcaaggtcagcagcgtctgtgcttcaactgcttcgagcccgggcactttgcggataaatgcccaaagccaaggcgtcagcaaggccaagcgcctccccgctccaacaacggcgggaaggatgtcattcggggtcgtgtgaatcacgtgacggccgaggacgtgctgacaactccagacgtcatcgttggtacgttcctcgttcattccatccctgctacaattttgtttgactctggagcttcccactcgtttatatctgtgccattcgtggggagaaatcagttgggggtagaaaggcttagaaaccctctgctcatcaccacccctggaggggttatgacagcaaagttttatagccctgccgtccctatagaaattcaggggattccttttccctcggatctgattctgctagacaccaagaacttggatgtgattcttgggatgaattggttggcacaattccaaggagtagtggattgcgcgagacgcactgttactctgtaccgagggccggaacaaccggttgttttctttgcacccccaacctctgttagaagttcagaacttcatcagatagaactgtcagaaattcccatcgtcagagagttcggagacgtgtttccggaagaactacctggtatgccgcccaagcgagagattgagttccgaatagatcttgctccaggaactactcctctgcacaagcgaccctaccgtatggcagcaaatgaactagccgaagtaaagaaacagttggaagagttgaaagaaaaggggtacatacgtccgagtacttccccatggggtgctcctgtgatttttgtagagaagaaagacaagacgaagaggatgtgcgttgactacagagctctcaatgaagtcaccatcaaaaacaagtaccctcttccccggatcgatgatctgttcgatcaactcaaaggtgccactgtattctccaagattgatctccgttccggatatcaccaattacgtattcgtgaagaagatattccgaagaccgcattcaccacgcgatacgggctgtatgaattcacggtgatgtcgttcggtttgaccaatgcacctgccttcttcatgaacttaatgaataaagtgttcatggaatacttggataagtttgttgtggttttcattgatgacattctgatatactcacaatcagaggaagaccatcagcaccatctccgtctggtgttgggaaagttgcgggaacatcaattgtatgccaagcttagcaagtgtgagttctggttgtccgaagtcaaattcttagggcacgtgatatctgctaaaggagttgctgtggatcccgaaacagtgaccgccgtcaccgattggaagcaacccaagacagttacccaagtccgcagtttcttaggtttggcaggatactatcggagattcatcgagaacttctccaaaatcgctcgacccatgacacagttgttgaagaaagaagagaaatttgtgtggagcccgcaatgcgagaaggcgttccaaactctcaaggaaaagctggtttcctcgccggtgttaatcttgccggatactcgcaaggacttcatggtgtattgtgatgcttcgcgccaaggattggggtgcgtgctcatgcaggacggtcatgtggtagcctatgcctcacgccagctacgtcctcatgaaggcaactaccctacacatgatttggagttagccgcagtagttcatgctctaaaaatctggcggcactatctcattgggaatcgctgtgaaatctataccgaccataagagtctgaaatacatcttcactcagtcggacctgaatcttcggcaaaggagatggttagaactcatcaaggactatgatgtgggaattcactatcatcctggtaaggccaacgtggttgccgacgctctaagtcgaaagggccattgcaacactcttaacgtccgtggcattccacccgaacttagtcaacagatggaagccctgaacctaaacatagttggtcgtggatttttggccgcgttggaagccaagcccaccttgctcgatcaaatccgcgaggctcagaagaatgatccggacatgcatggactcctcaagaatatgaaacagggtaaagccgctggtttcacagaggatgaacacggaaccctatggaacggaaatcgggtatgcgttccagataaccgagaacttaaacagctgatacttcaggaagctcacgaaagtccttattccatccaccctggcagtacaaagatgtacttagatttgaaggagaaatactggtgggttagcatgaagcgggaaattgcagagtttgtggccctgtgtgatgtgtgccagcgtgtcaaggcagagcaccaacgaccggccggacttctccaaccactccaagtacctgaatggaaatgggatgaaattgggatggatttcatcaccggacttccaaaaacccaaggcggatatgattctatatgggtagttgtggatcgattaaccaaggtggctcgatttattcttgtgaagaccacctatggagggaacaaactagcggagctctacttcgctaggatcgtgagtctccacggcgttcccaagaaaatcgtatctgataggggaagccaattcacctctcacttttggaagaagctccaagaagagctgggtactcgattgaatttcagcaccgcctatcacccgcagacagatggacagaccgagcgtctaaatcaaattctagaagatatgctccgcgcatgtgtactagatttcgggaagacctgggataagagtctcccctatgccgagttctcctacaataacagctatcaatccagcatacaaatggcaccatatgaagcgttgtacgggcgcaaatgccggacaccgctcctgtgggaccaagttggggaaagccaagtgttcgggactgatatcctgagagaagctgaagctaaagtcagaatcattcgggataatctaaaggtggcacagtcacggcagaaaagttatgcagataaccgtcgccgtgacctggaattcgcagtggatgattttgtgtatcttcgagtcacgccattgcgaggtgtacacaggtttcagacgaaagggaagcttgcacctcggtatgtgggtcctttccgtatcgttgctcgacgcggagaagtcgcttaccagttggagctgcccgcctccttgggcaacgtgcatgatgtgttccatgtgtcgcaactcaagaaatgccttcgagtgccatccgagcagaccgactcagagcaaattgaagttcgcgaagatttgacctacgtggagaggccagtgaaaatcctggacaccatggagcgcaggaccaggaaccgggtaatccgtttttgcaaggtccagtggagcaaccacgccgaagaagaagctacttgggagcgtgaagacgagctgaaggcagcccatcccgatctcttcgccagttcttccgaatctcggggtcgagattccgtttaa

SEQ ID NO: 14202 - DNA, 5391 bp, Oryza sativa
  Clone ID: TFbOSC401058j.C1.o48.fg
atggatgaagtcgggggtcgatggacattctccagggcaaatgaaggctacacgagctgcggcccgatggccggcagcgtcacccgtcgtggtttggacatgactggcttcgtcttggagctgcgaggcatgtgcgtggtcttggggtatccacatggagtggactaccaggccaggccgcttccagagcaggagggtgatgacacggagccccgcgctggttgggaggtcactgcagtgatcctcgctggctcttctgagcggacttcgctgacagtcaccgcgggtggcgactccttccccgccgcttgccagaacgccgctctcctcgccatcggcactcttcaccagcgctacccggacgagttgcagcactcgccctaccgctaccaccctcgtcgcggaggagcccgcgactacgccaccttctgggatgctagctcggaggatgacgctaccatcgtgcacctggcacgcatggtggaggcgtacgacgcggctcgtatcgacttccatcagatggtgcgccgcgggatggtcgagaacaacatgaagatcctggagctgcgtcaggagaacctgcagctcaagaaggacctcgacgcggtggaggcgcagctgcaccagctcaagatcgcccagggagagatctgccgccccaagcgtcgccgcgtttgccgcagccagaagatcaccgcccgcaagagcacctccaggcctgagcttgtccgtcagtccctggcgtggacttgcttcgtcgagacccctcgtgccgagcctgcgcccgtggttccccaggagggggaagcctccggcgttggtagctcggaggctctctctctgcttgctggttctgtgtggggttttcagatggtgacgaccaggagaaatgctgttaccggtgatggcaaccaacccgaaggcagcaaccccaaccaccaaggcaacccacctccacctcctcctccgcctccaccaccaccaccagacaccaacgccattctcacccaaatcctcgcccagcaagccaacatgatgaatgctttcctccaccacctccaaaatccgccacaacagaatgctccaccaccacccccacaacactctaaactcgccgagttcctccgcatccgcccacctaccttctccagctccaacaaccccgtggatgctttggattggttgcatgccgtggggaagaagttagacacggtgcagtgcagcgatgaggagaaagtcgtcttcgccgcccaccagctgcagggacccgcatctctatggtgggaccatttccaggctacgcagccaaaggggcaacctattacttgggctcgcttcaccgccgctttccggagaacccatgtgcccgctggagtcgtggctcttaagaaaagggaattccgagagttgaagcaaggcaaccgctccgtgatggagtatttgcatgagttcaacaacctggcccgttacgccccagaggatgtgcgggaagatgaggagaagcaggagaagttcctggcaggaatggaccccgagctgtccgtccgtctagtctctggggactatcctgattttcaacgactggtggacaagagcatctgcttggaagctaagcacaaggagctggagtcgcacaagcgccgcttggcgaatttccgcaatcaacagggtgctaaccaaagggtccgctacaccaatccctatccagggggatcctcctcgcagcagcaacaacagcagcagcaacctcgcccagcgccccgacctcaattcgtggtgcgcgtcccacagccgcagcagcagcagaatcagcaagggactcgtgcgccccgtcctcctacgccaactgtgcagcctggtcaaggccgcagggacgctcaaggtcagcagcgtctgtgcttcaactgcttcgagcccgggcactttgcggataaatgcccgaagccaaggcgtcagcaaggccaagcgcctccccgctccaacaacggcgggaaggatgtcattcggggtcgtgtgaatcacgtgacggccgaggacgtgctgacaactccagacgtcatcgttggtacgttcctcgttcattccatccctgctacaattttgttcgactctggagcttcccactcgtttatatctgtgccattcgtggggaaaaatcagttgggggtagaaaggcttagaaaccctctgctcatcaccacccctggaggggttatgacagcaaagtattatagtcctgccgtccctatagaaattcaggggattccttttccctcggatctgattcttctagacacaaagaacttggatgtgattcttgggatgaattggttggctcaattccaaggagtagtggattgcgcgagacgcactgtcactctgtaccgaggtccagaacaaccggttgttttctttgcacccccaacctctgtcagaagttcagaacttcatcagatagaactgtcagaaattcccatcgtcagagagttcggagacgtgtttccggaagaactacccggtatgccgcccaagcgagagattgagttccggatagatcttgctccaggaaccactcctctgcacaagcgaccctaccgtatggcagcaaatgaactagccgaagtaaagaaacagttggaagagttgaaagaaaaggggtacatacgtccgagtacttccccatggggtgctcctgtgatttttgtagagaagaaagacaagacgaagaggatgtgcgttgactacagagctctcaatgaagtcaccataaaaaacaagtaccctcttccccggatcgatgatttgttcgatcagcttaaaggtgccactgtattctccaagattgatctccgttccggatatcaccaattacgtattcgtgaagaagatattccgaagaccgcattcaccacgcgatacgggctgtatgaattcacggtgatgtcgttcggtttgaccaatgcacctgccttcttcatgaacttgatgaacaaagtgttcatggaatacttggataagtttgttgtggttttcattgatgacattctgatatactcacaatcagaggaagaccatcagcaccatctccgtctggtgttgggaaagttgcgggaacatcaattgtatgccaagcttagcaagtgtgagttctggttgtccgaagtcaaattcttagggcacgtgatatctgctaaaggagttgctgtggatcccgaaacagtgaccgccgtcaccgattggaagcaacccaagacagttactcaagtccgcagtttcttaggtttggcaggatactatcggagattcatcgagaacttctccaaaatcgctcgacccatgacacagttgttgaagaaagaagagaaatttgtgtggagcccgcaatgcgagaaggcgtttcaaactctcaaggaaaagctggtttcctcgccggtgttaatcttgccggatactcgcaaggacttcatggtgtattgtgatgcttcgcgccaaggattggggtgcgtgctcatgcaggacggtcatgtggtagcctatgcctcacgccagctacgtcctcatgaaggcaactaccctacacatgatttggagttagccgcagtagttcatgctctaaaaatctggcggcactatctcattgggaatcgctgtgaaatctataccgaccataagagtctgaaatacatcttcactcagtcggacctgaatcttcggcaaaggagatggttagaactcatcaaggattatgatgtgggaattcactatcatcccggtaaggccaacgtggttgccgacgctctaagtcgaaagagccattgcaacactcttaacgtccgtggcattccacccgaacttaaccaacagatggaagccctgaatctaagcatagtgggtcgtggattcttagctgcattggaagccaagcccaccttgctcgatcaaatccgcgaggctcagaagaatgatccggacatgcatggactcctcaagaatatgaaacagggtaaagccgctggtttcgcagaggatgaacacggaaccctatggaacggaaatcgggtatgcgtcccagataacagagaacttaaacagctgatacttcaggaagctcacgaaagtccttattccatccaccctggcagtacaaagatgtacttagacttgaaagagaaatactggtgggttagcatgaagcgggagattgcagagttcgtggccctgtgtgatgtgtgccagcgtgtcaaggcagagcaccagcgaccggccggacttctccaacctctccaagtaccagaatggaaatgggatgaaattgggatggatttcatcaccggacttccgaagacccaaggtggatatgattctatatgggtagttgtggatcgattaaccaaggtagctcgattcattcctgtgaagaccacctatggagggaacaaactagcggagctctacttcgccaggatcgtgagtctccatggcgttcccaagaaaatcgtatctgataggggaagccaattcacctctcacttttggaagaagctccaagaagagctgggtactcgattgaatttcagcaccgcctatcacccacagacagatggacagaccgagcgtctaaatcagatcctagaagatatgctccgcgcatgtgtactagatttcgggaagacctgggataagagtctcccctatgccgagttctcctacaataacagctatcaagccagcatacaaatggcaccttatgaagcgttgtacgggcgcaaatgccggacaccgctattgtgggaccaagttggagaaagccaagtgttcgggaccgatatcctgagagaagctgaagctaaagtcagaatcattcgggataatctaaaggtggcacagtcccggcagaaaagttatgcagataaccgtcgccgtaatctggaattcgcagtggatgactttgtgtatcttcgggtcacgccattgcgaggtgtacacaggtttcagacgaaagggaagctcgcacctcggtatgtgggtcctttccgcatcattgctcgacgcggagaagtcgcttaccaattggagctgcccgcctccttgggcaacgtgcatgatgtgttccatgtgtcgcaactcaagaaatgtcttcgagtgccatccgagcagaccgactcagagcaaattaaagttcgcgaagatttgacctacgtggagaggccagtaaaaatcctggacaccatggagcgcaggaccaggaaccgggtaatccgtttttgcaaggtccagtggagcaaccatgccgaagaagaagctacctgggagcgtgaagacgagttgaaggcagcccatcccgatctcttcgccagttcttccgaatctcggggtcgagattccgtttaa

SEQ ID NO: 14203 - DNA, 4512 bp, Oryza sativa
  Clone ID: TFbOSC401068j.C1.o3.gm
atggttacaccgatggtgacgaccaggagaaatgttaacaccggtgaaggcaaccaacccgaaggcagcaaccccaaccaccaaggcaacccacctccaccaccaccaccagacaccaacgccattctcacccagatcctcgcccagcaagccaacatgatgaatgctttcctccaccacctccaaaatccaccacaacagaatgctccaccaccacctccccaacactctaaactcgccgaattcctccgcatccgcccacctaccttctctagctccaacaaccccgtggatgctttggattggttgcatgccgtggggaagaagctggacactgtgcagtgcagtgatgaagagaaagtcatcttcgccgcccatcagctgcaggggcccgcatctctctggtgggaccatttccaggccacgcagcccgaggggcaaccgattacttgggctcgcttcaccgccgctttccggagaacccatgtgcccgctggagtcgtggctcttaagaaaaaggaattccgagagttgaagcaaggcaaccgctctgtgatggagtatttgcatgagttcaacaatctagcccgttacgctccggaggatgtgcgggaagatgaggagaaacaagagaagttcctggcaggaatggaccccgagctgtccgttcgtttagtctctggggactatccggacttccaacgtctggtggacaagagcatccgcttggaagccaagcacaaggagctggaattgcacaagcgccgcttggcgaacttccgcaatcaacagggtgctaaccagagggtccgctacaccaatccctacccagggggatcctcctcgcagcaacaacagcagcagcaacctcgcccagcgccccgacctcaattcgtggtgcgcgtcccacagccgcagcagcagcagaatcagcaagggacccgtgcaccccgtcctcctacgccaactgtgcagcccgttcaaggccgcagggacgcttcaggtccgcagcggctgtgcttcaactgcttcgagcccggacactttgcggataaatgcccaaagccaaggcgtcagcaaggccaagcgcctccccgctccaacaacggtggcaaggacgtcagccgtggtcgtgtgaatcacgtgacggccgaggacgtgctgacaactccagacgtcatcgttgagaagaaagacaagacgaagaggatgtgcgtcgactacagagctctcaatgaagtcaccatcaaaaacaagtaccctcttcctcggatcgatgatctgttcgatcagcttaaaggtgccactgtattctccaagattgatcttcgttccggatatcaccaattacgtattcgtgaagaagatattccgaagaccgcattcactacgcgatatggactgtatgaattcacggtgatgtcgttcggcttgaccaatgctcctgccttcttcatgaacttaatgaataaagtgttcatggaatacttggataagtttgttgtggttttcattgatgacattctgatatactcacaatcagaagaagatcatcagcaccatctccgtctggtgttgggaaagttgcgggaacatcaattgtatgccaagcttagcaagtgtgagttctggttgtccgaagtcaaattcttggggcacgtgatatctgctaaaggagttgctgtggaccccgaaacagtgaccgccgtcaccgattggaagcaacctaagacagtcactcaaattcgcagtttcttgggtttggcaggatactaccggagattcatcgagaacttctccaaaatcgctcgacccatgacacagttgttgaagaaagaagagaagtttgggtggagcccgcaatgcgaaaaggcgttccaaactctcaaggaaaagctggtttcctcgccagtgttaatcttgccggatactcgcaaggacttcatggtgtattgtgatgcttcgcgccaaggattggggtgcgtgctcatgcaggacggtcatgtggtagcctatgcctcacgccagctacgacctcatgaaggcaactaccctacacatgacttggagttagccgcagtgtcagatctgaaccttcggcaaaggagatggttagaactcatcaaggattatgatgtgggaattcactatcatcctggtaaggctaacgtggttgccgacgctctaagtcgaaagagccactgcaacactctcaacgtccgaggcattccacccgagcttaatcaacagatggaagccctgaacctaagcatagttggtcgcggattcttagctgcgttagaagccaagcccaccttgctcgatcaaatccgcgaggctcagaagaatgatccggacatgcatggactcctcaagaatatgaaacagggtaaagccgctggtttcacagaggatgaacacggaaccttatggaacggaaagcgggagaaatactggtgggttagcatgaagcgggaaattgcagagtttgtggctctatgtgatgtgtaccagcgtgtcaaggcagaacaccaacgaccggccggacttctccaacctctccaagtgccggaatggaaatgggatgaaattgggatggatttcatcaccggccttccaaaaacccaaggtggatatgattctatatgggtaattgtggatcgactaacaaaggtagctcgattcattcctgtgaagaccacctatggaggaaacaaactagcggagctctacttcgctaggatcgtgagtctccatggtattcccaagaaaatcgtatctgataggggaagccaattcacctctcacttttggaagaagctccaagaagagctgggtactcggttgaatttcagcaccgcctatcacccgcagacagatggacagaccgagcgtctaaatcagatcctagaagatatgctccgcgcatgtgtcctagatttcgggaagacctgggataagagtctcccctatgccgagttctcctacaataacagctatcaagccagcatacaaatggcaccatatgaagcgttgtacgggcgcaaatgccggacaccgctcctgtgggaccaagtcggagaaagccaagtgttcgggactgatatcctgagagaagctgaaactaaagtcagaatcattcgggataatctaaaggtggcacagtcccggcagaaaagttatgcagataaccgtcgccgtgatctggaattcgcagtggatgattttgtgtaccttcgggtcacgccattgcgaggtgtacacaggtttcagacaaaagggaagctcgcacctcggtatgtgggtccctttcgtatcactgctcgacgcggagaagtcgcctaccagctggagttgcccgcctccttgggcaacgtgcatgatgtgttccatgtgtcgcaactcaagaaatgtctccgagtgccatccgagcaggccgactcagagcgaattgaagttcgcgaagacttgacgtatgtggagaagccagtgaaaatcctggacaccatggagcgcaggaccaggaaccgagtaatccgtttctgcaaggcgggcccgcccgccgctctcgctgacgggtgggacccacctgtcatcgccctcctcgcgccgcgcccgccgccgcgcccgtgccctagcgccgccgccgccgcgaatcccgccgctcccgtccgccccgcgtgcaatcaagaggggggaattactccccgtaatcccctcccccgtttccccctctttcccctctctctctccctcggattcgctcggaatcaatcccgcattcatcgccggcgcaatcaatggcggccgaatcctccgcgcgcgattcctccctccccggccgctctttccttcccccggcgctatttaaacgttgcccgagctccgctctttcgtttccgccgctcgccgctcgctctcgccgtcggaatcgtgctcgcgccgtgctcctctctctccgccgtcgccgccgagctccgttgcgccrccgtcgtcgctccggttctcctcccgactcggcgacccctccctcggcatcgccgcatcgccgtcgacctcgtccgcgcctccgtttcgctcgccgactgccggagcgccgtcgtcatcgtcatcccgaaccgcgccgccgccttcttccgctccgtccgccgtttccgccgccttcgctgtctcggggtgagccgtggaccgtccccttcgtttcccccttccctcctctctctcgggtgccgctccgccgcgccgttggtcgccggcagtgaccatcggggcgcgggcgcgccgctcccgtcggccgtgccggcgaggccgccctcgggcgcgccctcgcggctgccaagtgggcccggccgtcagccgcccgcgcccgcgggtgcggctgacgcgcgggacccacggcgccgaccgccgccagccgcgtgcgcccggtccaccgtggaccgagcggctgacgcgtgggccccacttcccgtggacccggtccgcgcgcccgcccctcggctgacgcaataa

SEQ ID NO: 14204 - DNA, 5415 bp, Oryza sativa
  Clone ID: TFbOSC401143j.C1.o10.fg
atggatgaagtcgggcgtcgatggacattctccagggcaaatgaaggctacacgagctgcggcccgatggccggtagcgttacccgtcgtggtttggacatgactggcttcgtcttggagctgcgaggcatgtgcgtggtcttggggtatccacatggagtggattaccaggccaggccgctcccggagcaggagggtgaggatgcagagcctcacgctggttgggaggtcactgcagtgatcctctccggctctcccgagcggacttcgctggcagtcaccgcgggtggagattccttccccgccgcttgccagaacgccgctctcctcgccatcggcacccttcaccagcgctacccggacgagttgcagcactcgccctaccgctaccacgctcgtcgcggaggagcccgcgactacgccaccttccgagacgccagttcggaggatgacgctaccgtcgtgcatctggcacgcatggtggaggcgtacgacgcggctcgtatcgacttccatcagatggtgcgccgtggcatggtggagaacaacatgaagatcctggagctgcgccaagagaatctgcagctcaagaaggacctcgacgcagtggaggcgcagctgcatcagctcaagatcgcccagggagaggacagccgtcccaagcgtcgccgcgtctgccgcagccagaagatcaccgcccgcaagagcacctccaggcccgagcttgttcgtcagtccctggcgtggacctgcttcgtcgagacccctcgtgccgagcctgcgcccgtggttccccaggagggggaagcctccggcgttggtagctcggagggtgcgctgttgctcaccttccgtcctggcccgtcgcagcgctctccttctctgtttgctggttctgtgaggggttttcagatggtgacgaccaggagaaatgttaacaccggtgaaggtaaccaacccgaaggcagcaaccccaaccaccaaggcaatccacctccgccaccaccaccagacaccaacgccattctcacccagatcctcgcccaacaggccaacatgatgaatgctttcctccaccaccttcaaaacccgccacaacagaatgctcccccaccacctccccaacactctaaactcgccgagttcctccgcatccgcccacctaccttctctagctccaacaaccccgtggatgcgttggattggttgcatgccgtggggaagaagttagacactgtgcagtgcagtgatgaggagaaagtcatcttcgccgcccatcagctgcaggggcccgcatctctctggtgggaccacttccaggctacgcagccagagggacagccgatcacttgggcccgcttcaccgccgctttccggagaacccatgtgcccgctggagtcgtggctcttaagaaaagggaatttcgggagttgaagcaaggcaaccgctccgtgatggagtatttgcatgagttcaacaatctagcccgttatgccccggaggatgtgcgggaagatgaggagaagcaagagaagttcttggcaggaatggaccctgagctgtccgttcgtctagtctctggggactatcctgattctcaacgtctggtggacaagagcatccgcttggaagccaagcacaaggagctggagtcgcacaagcgccgcttggcgaatttccgcaatcaacagggtgctaaccagagggtccgctacaccaatccctacccagggggatcctcctcgcagcagcagcagcagcagcagcaacctcgctccgcgccccgacctcaattcgtggtgcgcgtcccacagcagcaacagcagcagaatcagcaggggactcgtgcgccccgtcctcctacgccaactgtgcagcctgttcaaggtcgcagggacgctcaaggtcagcagcgtctgtgcttcaactgcttcgagcccgggcactttgcggataaatgcccaaagccaaggcgtcagcaaggccaagcgcctccccgctccaacaacggcgggaaggatgtcattcggggtcgtgtgaatcacgtgacggccgaggacgtgctgacaactccagacgtcatcgttggtacgttcctcgttcattccatccctgctacaattttgttcgactctggagcttcccactcgtttatatctgtgccattcgtggggagaaatcagttgggggtagaaaggcttagaaaccctctgctcatcaccacccctggaggggttatgacagcaaagtactatagccctgccgtccctatagaaattcaggggattccttttccctcggatctgattctgctagacaccaagaacttggacgtgattcttgggatgaattggttggcccaattccaaggggtagtggattgcgcgaggcgcactgtcactctgtaccgagggccagaacagccggttgttttctttgcacctccaacctctgtcagaagttcagaactgcatcagataggtctgtcagaaatccccatagtcagagagttcggagacgtgtttccggaagaactacctggtatgccgcccaagcgagagattgagttccggatagatcttgctccaggaaccactcctctgcacaagcgaccctaccgtatggcagcaaatgaactagccgaagtaaagacacagttggaagaattgaaagaaaaggggtacatacgtccgagtacttccccatggggtgctcctgtgatctttgtagagaagaaagacaagacgaagaggatgtgcgttgactacagagctctcaatgaagtcaccatcaaaaacaagtaccctcttccccggatcgatgatctgttcgaccaactcaaaggtgccactgtattctccaagattgatcttcgttccggatatcaccaattacgtattcgtgaagaagatattccgaagaccgcattcactacgcgatacgggctgtatgaattcacggtgatgtcgttcggcttaaccaatgctcctgccttcttcatgaacttgatgaacaaagtgttcatggaatacttggataagttcgttgtggttttcatcgatgacattctgatatactcacaatcagaggaagaccatcagcaccatctccgtctggtattgggaaagctgcgggaacatcaattgtatgccaagctcagcaagtgtgagttctggttgtccgaagtcaaatttttggggcacgtgatatctgctaaaggagttgctgtggatcccgaaacagtgaccgccgtcaccgattggaagcaacccaagacagtcactcagattcgcagtttcttgggtttggcaggatactaccggaggttcatcgagaacttctccaaaatcgctcgacccatgacacagttgttgaagaaagaagagaagtttgtgtggagcccgcaatgcgagaaggcgttccaaactctcaaagaaaagctggtttcctcgccagtgttaatcttgccggatactcgcaaggatttcatggtgtactgtgatgcttcgcgccaaggattggggtgcgtgctcatgcaggacggtcatgtggtagcctatgcctcacgccagctacgacctcatgaaggcaactaccctacacatgacttggagttagcagcggtggttcatgctttaaaaatctggcggcactatctcattgggaaccgctgtgaaatatatactgatcataagagtttgaaatacatcttcacccagtcggatctgaatcttcggcaaaggagatggttagaactcatcaaggattatgatgtgggaattcactatcaccctggtaaggctaacgtggttgccgatgctctaagtcggaagagccattgcaatactctcaacgtccgaggcattccacccgagcttaatcaacagatggaagccctgaacctaaacatagttggtcgtggatttttggccgcgctagaagcccagcccaccttgctcgatcaaatccgcgaggctcagaagaatgatccggacatgcatggactcctcaagaatatgaaacagggtaaagccgctggtttcacagaggatgaacacggaaccttatggaacggaaagcgggtatgcgttccggatagcagagaacttaaacagctgatacttcaggaagctcacgaaagtccttattccattcacccgggcagtaccaagatgtacttagatttgaaggagaaatactggtgggttagcatgaagcgggaaattgcagagtttgtggctctatgtgatgtgtgccagcgtgtcaaggcagaacaccaacgaccggccggacttctccaacctctccaagtgccagaatggaaatgggatgaaattgggatggatttcatcaccggccttccaaaaacccaaggtgggtatgattctatatgggtaatagtggatcgattaaccaaggtagctcgattcattcctgtgaagaccacctatggagggaataaactagcggagctctacttcgctaggatcgtgagtctccatggcgttcccaagaaaatcgtatctgataggggaagccaattcacctctcacttttggaagaagctccaagaagagcttggtacccgactaaatttcagcaccgcatatcacccgcagacagatggacagaccgagcgtctaaatcagatcctagaagatatgctccgcgcatgtgtcctagatttcgggaagacttgggataagagtctcccctatgccgagttctcctacaataacagctaccaagccagcatacaaatggcaccatatgaagcgttgtacgggcgcaaatgccggacaccgctcctgtgggaccaagttggggaaagccaagtgttcgggactgatatcctgagagaagctgaagctaaagtcagaatcattcgggataatctaaaggtggcacagtctcggcagaaaagttatgcagataaccgtcgccgtgatctggaattcgcagtggatgactttgtgtatcttcgggtcacgccattgcgaggtgtgcacaggtttcagacaaaagggaagctcgcacctcggtatgtgggtcccttccgtatcactgctcgccgcggagaagtcgcctaccagctggagttgcccgcctccttgggcaacgtgcatgatgtgtttcatgtgtctcaactcaagaaatgtcttcgagtgccatccgagcaggccgactcagagcaaattgaagttcgcgaagacttgacctatgtggagaagccagtgaaaatcctggacgccatggagcgcaggaccaggaaccgagtaatccgtttttgcaaggtccagtggagcaaccacgccgaagaagaagctacttgggagcgtgaagacgagctgaaggcagcccatcccgatctcttcgccagttcttccgaatctcggggtcgagattccgtttaa

SEQ ID NO: 14205 - DNA, 4035 bp, Oryza sativa
  Clone ID: TFbOSC401143j.C1.o3.fg
atgtcatggcacagggccggtgtcctgctgctaggggctcagtcctgcctgcctgtcccggaggttccggccgtaggtgggattgggtcggtactcttgtctatggctaggatgggttggaaactatgtcacgtcttccgtccgtataccgtggtgatggccggcagcatcagccgtcgtggtctggacctgactggtttcgtcttggagctgcggggcatgtgcgttgtcctggggtatccacatggagtggactaccagggcaggccgcttccggagcaggagggtgacgatgcagagccccacgctgcttgggaggttactgcagtgatcctcactggctctcccgagcggacttcgttggcagtcaccgcgggtggagattctttccccgccgcttgccagaacgccgctctcctcgccatcggcactcttcaccagcgctacccggacgagttgcagcactcgccctaccgctaccaccctcgccgcggaggagcccgcgacttcgccaccttccgggatgctagctcggaggatgacgctaccatcatgcacctggcgcgcatggtggaggcgtacgacgcggctcgtatcgacttccatcagatggtgcgccgtgggatggtcgagaacaacatgaagatcctggagctgcgtcaagagaatctgcagctgaagaaggaactagacgcagtggaggcgcagctgcatcagctcaagatcgcccagggagaggtctgtcgccccaagcgtcgccgcgtctgccgcagccagaagatcaccgcccgcaagagcacctccaggcccgagcttgttcgtcagtccctggcgtggacttgcttcgtcgagacccctcgtgccgagcccgcgcccgtggttcctcaggagggggaagcctccggcgttggtagcacggaggatgcgctgttgctcaccttccgtcctggcccgtcgcagcggagaagtgctaataccggtgatggcaaccaacccgaaggcagcaaccacaacaaccatggcagtccacctccacctcctcctccgcctccaccaccaccaccagacaccaacgctattctcacccaaatcctcgcccagcaggccaacatgatgactgctttcctccaccacctccaaaatccgccacaacagaatgctcctccaccacccccacaacactgtaaactcgccgagttcctccgcatccgtccaccaaccttctctagctccaataaccccgtggatgcgttggattggttgcatgccgtggggaaaaagctagacactgtgcagtgcagcgatgaggagaaagtcatcttcgccgcccaccagctgcaggggcccgcatctctatggtgggaccatttccaggctacgcagccagaggggcagcctattacttgggctcgcttcaccgccgctttccggagaacccatgtgcccgccggagtcgtggcccttaagaaaagggaattccgagagttgaagcaaggcaaccgctccgtgatggagtatttgcatgagttcaacaacctggcccgttacgccctggaggatgtgcgggaagatgaggaaaagcaggagaagttcttggcaggaatggaccctgagctgtccgtccgtctagtctccggtgactatccggatttccaacgtctggtggacaagagcatccgcttggaagccaagcacaaggaactggagtcgcacaagcgccgcttggcgaatgtccgcaatcaacagggtgctaaccaaagggtccgctacaccaatccctatccagggggatcgtcctcgcagcagcaacagcagcaacaacctcgctccgcgccccgacctcaattcgtggtgcgcgtcccacagccgcagcaacagcagagccagcaagggacccgtgtgccccgtcctcctacgccagctgcgcagtctggtcaaggccgcagggacgcttcaggtccgcagcgtctgtgcttcaactgcttcgagcccgggcactttgcggataaatgcccgaagccgaggcgccagcaaggccaagcgcctccccgctccaacaacggtggtaaggatgtcattcggggtcgtgtgaaccacgtgacggccgaggacgtgctgacaactccagacgtcatcgttggtacgttcctcattcattccatccctgctaccattttgttcgactctggagcttcccactcgtttatatctgtgccattcgtggggagaaatcagttgggggtagaaaggcttaggaaccctctgctcatcaccacccctggaggggttatgacagcaaagtattatagtcctgccgtccctatagaaattcaggggattccttttccctcggatctgattctgctagacaccaagaacttggatgtgatccttgggatgaattggatggctcaattccaaggagtagtggattgcgcgagacgcactgtcactctgtaccgagggccggaacaatcggttgttttctttgcacccccaacctctgtcagtagttcagaacttcatcagataggactgtcagaaatccccatcgtcagggagttcggagatgtgtttccggaagaactacccggtatgccgcccaagcgagagattgagttccggatagatcttgctccaggaaccactcctctgtacaaacgaccctaccgtatggcagcaaatgaattggccgaagtcaagaaacagttggaagagttgaaagaaaagggagctctcaatgaagtcaccatcaaaaacaagtaccctcttccccggatcgatgatctgttcgatcagcttaaaggtgccactgtattctccaagattgatcttcgttccggatatcaccaattacgtattcgtgaagaagatattcctaagaccgcattcaccacgcgatacggactgtatgaattcacggtgatgtcgttcggtttaaccaatgcacctgccttcttcatgaacttaatgaacaaagtgttcatggaatacttggataagtttgttgtggtgttcattgatgacattctggtgtactcacaatcagaggaagaccatcagcaccatctccgtctggtgttgggaaagttgcgggaacatcaattgtatgccaaacttagcaagtgtgagttctggttgtccgaagtcaaattcttagggcacgtgatatctgctaaaggagttgctgtggaccccgaaacagtgaccgccgtcaccgattggaagcaacccaagacagtcactcaagtccgcagtttcttaggttttgcaggatactaccggaggttcatcgagaacttctccaaaatcgctcgacccatgacacagttgttgaagaaagaagagaaatttgtgtggagcccgcaatgcgagaaggcgtttcaaactctcaaagaaaagctggtttcctcgccggtgttaaccttgccagatactcgcaaggatttcatggtgtattgtgatgcttcgcgccaaggattggggtgcgtgcttatgcaggatggtcatgtggtggcctatgcctcacgccagctacggcctcatgaaggcaactaccctacccatgatttggagttagccgcggtggttcatgctctaaaaatctggcggcactatctcattgggaatcgcagtgaaatatatactgatcataagagtttgaaatacatcttcacccagtcggatctgaatcttcggcagaggagatggttagaactcatcaaggattatgatgtgggaattcactaccatcctggtaaggccaacgtggtcgccgacgctctaagtcgaaagagccattgcaacactcttaacgtccgtggcattccacccgaacttaaccaacagatggaagccctgaatctaagcatagtgggtcgtggattcttggttgcgttggaagccaagcccaccttgctcgatcaaatccgcgaggctcagtgtcgcgaccgggaaaattgccttttcccgaacgccagtgtattaatccccgtcccaggaaaagccggggtacaccacacaagcatgatataa

SEQ ID NO: 14206 - DNA, 5187 bp, Oryza sativa
  Clone ID: TFbOSC401235j.C1.o53.fg
atgtcatggcacagggccggtgtcctgctgctaggggctcagtcctgcctgcctgtcccgggggttacggccgtaggtgggattgggtcggtactcttgtctatagctagaatgggttggaaactatgtcacgtcttccgtctgtataccgtggtgatggccggcagcgtcagccgtcgtggtttggacatgactggcttcgtcttggagctgcggggcatgtgcgttgtcctggggtatccgcatggagtggactaccaggccaggccgcttccggagcaggagggtgacgatgcagagccccacgctgcttgggaggttactgcagtgatcctcactggctctcccgagcggacttcgttggcagtcaccgcgggtggagattccttccccgccgcttgccagagcgccgctctcctcgccatcggcactcttcaccagcgctacccggacgagttgcagcactcgccctaccgctaccaccctcgtcgcggaggagcccgcgactacgccaccttccgggatgctagctcggaggatgacgctaccatcgtgcacctagcgtgcatggtggaggcgtacgacgcggctcgtatcgacttccatcagatggtgcgccgtgggatggtcgagaacaacatgaagatcctggagctgcgtcaggagaatctgcagctgaagaaggacctagacgcggtggaggcgcagctgcatcagctcaagatcgcccagggagaggtctgtcgccccaagcgccgccgcgtctgccgcagccagaagatcaccgcccgcaagagcacctccaggcccgagcttgttcgtcagtccctggcgtggacctgcttcatggagacccctcgtgccgagcccgcgcccatggttccccaggagggggaagcctccggcgttggtagcacggaggatgcgctgttgctcaccttccgccctggcccgtcgcagcggagaagtgttaataccggtgatggcaaccaacccgagggcagcaaccacaacaaccatggcagcccacctccacctcctcctccgcctccaccaccaccaccagataccaacgccattctcacccaaatcctcgcccagcaggccaacatgatgactgctttcctccaccacctccaaaatccgctacaacagaatgctccaccaccacccccacaacactctaagctcgccgagttcctccgcatccgtccacccaccttctctagctccaacaaccccgtggatgcgttggattggttgcatgccgtggggaaaaagctagacactgtgcagtgcagcgatgaggagaaagtcatcttcgccgcccaccagctgcaggggcccgcatctctatggtggtaccatttccaggctacgcagccagaggggcagcctattacttgggctcgcttcaccgccgctttccggagaacccatgtgcccgctggagtcgtggcccttaagaaaagggaattccgagagttgaagcaaggcaacctctccgtgatggagatgtgcgggaagatgaggagaagcaagagaagttcaggaatggaccctgagctgtccgtccgtctagtctccggggactatccggatttccaacgtctggtggacaagagcatccgcttggaagccaagcacaaggaactggagtcgcacaagcgccgcttggcgaatttccgcaatcaacagggtgctaaccaaagggtccgctacaccaatccctatccagggggatcgtcctcgcagcagcaacagcagcaacaacctcgctccgcgccccgacctcaattcgtggtgcgcgtcccacagccccagcaacagcagagtcagcaagggactcgtgcgccccgtccttctacgccaactgtgcagcctggtcaaggccgcagggacgctcaaggcccgcagcgtctgtgcttcaactgcttcgagcccgggcactttgcggataaatgcccgaagccgaggcgccagcaaggccaagcgcctccccgctccaacaacggtggtaaggatgtcattcggggtcgtgtgaaccacgtgacggccgaggacgtgctgacaactccagacgtcatcgttggtacgttcctcattcattccatccctgctaccattttgttcgactctggagcttcccactcgtttatatctgtgccattcgtggggagaaatcagttgggggtagaacggcttaggaaccctctcctcatcaccacccctggaggggttatgacagcaaagtattatagtcctgccgtccctatagaaattcaggggattccttttccctcggatctgattctgctagacaccaagaacttggatgtgatccttgggatgaattggttggctcaattccaaggagtagtggattgcgcgagacgcactgtcactctgtaccgagggccggaacaaccggttgtattctttgcacccccaacctctgtcagtagttcagaacttcatcagataggactgtcagaaatccccatcgtcagggagttcggagacgtgtttccggaagaactacccggtatgccacccaaacgagagattgagttccggatagatcttgctccaggaaccactcctctgtacaagcgaccctaccgtatggcagcaaatgaactcgctgaagtcaagaaacagttggaagagttgaaagaaaaggggtatatacgtccgagtacttccccctggggtgctcctgtgatttttgtggagaagaaagacaagacgaagaggatgtgcgttgactacagagctctcaatgaagtcaccatcaaaaacaagtaccctcttcctcggatcgatgatctgtttgatcagcttaaaggtgccacggtattctccaagattgatcttcgttccggatatcaccagttacgtatccgcgaagaagatattccgaagaccgcattcaccacgcgatacggactgtatgaattcacggtgatgtcgttcggtttaaccaatgcacctgccttcttcatgaacttaatgaacaaagtgttcatggaatacttggataagtttgttgtggttttcattgatgacattctggtatactcacaaacagaggaagaccatcagcaccatctccgtctggtgttgggaaagttgcgggaacatcaattgtatgccaaacttagcaagtgtgagttctggttgtccgaagtcaaattcttagggcacgtgatatctgctaaaggagttgctgtggaccccgaaacagtgaccgccgtcactgattggaggcaacccaagaccgtcactcaaattcgcagtttcttaggtttggcaggatactaccggaggttcatcgagaacttctccaaaatcgctcgacccatgacacagttgttgaagaaagaagagaaatttgtgtggagcccgcaatgcgagaaggcgttccaaactctcaaagaaaagctggtttcctcgccagtgttaatcttgccagatactcgcaaggattttatggtgtattgtgatgctgcgcgccaaggattggggtgcgtgctcatgcaggacggtcatgtggtggcctatgcctcacgccagctacggcctcatgaaggcaattaccctacccatgatttggagttagccgctgtggttcatgctctaaaaatctggcggcactatctcattgggaattgctgtgaaatatatactgatcataagagtttgaaatacatcttcacccagtcggatctgaatcttcggcaaaggagatggttagaactcatcaaggattatgatgtgggaattcactatcatcctggtaaggccaacgtggtcgccgacgctctaagtcgaaagagccattgcaacactcttaacgtccgtggcattccactcgaacttaaccaacagatggaagccctgaatctaagcatagtgggtcgtggattcttggctgcgttggaagccaagcctaccttgctcgatcaaatccgcgaggctcagaagaatgatccggacatgcgtggactcctcaagaatatgaaacagggtaaagccactggtttcacagaggatgaacacggaaccctatggaacggaaatcgggtatgcgttccagataacagagaacttaaacagctgatacttcaggaagctcacgaaagtccttattccatccaccctggcagtacgaagatgtacttagacttgaagaagaaatactggtgggttagtatgaagcgggaaattgcagagttcgtggccctgtgtgatgtgtgccagcgtgtcaaggcagaacaccaacggccggccggacttctccaacctctccaagtaccagaatggaaatgggatgaaattgggatggatttcatcaccggacttccaaaaacccaaggtggatatgattctatatgggtagttgtggatcgattaaccaaggtggctcgatttattcctgtgaagaccacctatggagggaacaaactagccgagctctacttcgctaggatcgtgagtctccatggcgttcccaagaaaatcgtatctgataggggaagccaattcacctctcacttttggaagaagctccaagaagagctgggtacccgattaaatttcagcaccgcgtatcacccgcagacagatggacagaccgagcgtctaaatcagatcctagaagatatgcttcgcgcatgcgtcctagatttcgggaagacctgggataagagtctcccctatgccgagttctcctacaataacagctatcaagccagcatacaaatggcaccctatgaagcgttgtttcagacaaaagggaagctcgcacctcggttcgtgggtcctttccgtatcattgctcgacgcggagaagtcgcttaccagttggagctgcccgcctccttgggcaacgtgcatgatgtgttccatgtgtcgcaactcaagaaatgtcttcgagtgccatccgagcaggccgactcagagcaaattgaagttcgcgaagacttgacctacgtggagaggccagtgaaaatcctggacaccatggagcgcaggaccaggaaccgggtaatccgtttttgcaaggtccaatggagcaaccacgccgaagaagaagctacctgggagcgtgaagacgagctgaaagcagcccatcccgatctcttcgccagttcttccgaatctcggggtcgagattccgtttaa

SEQ ID NO: 14207 - DNA, 5355 bp, Oryza sativa
  Clone ID: TFbOSC401235j.C1.o71.fg
atggatgaagtcgggggtcgatggacattctccagggcaaatgaaggctacacgagctgcggcccgatggccggcagcgttacccgtcgtggtttggacatgactggcttcgtcttggagctgcggggcatgtgcgtggtcttggggtatccacatggagtggattaccaggccaggccgctcccggagcaggagggtgaggatgcagagcctcacgctggttgggaggtcactgccgtgatcctctccggctctcccgagcggacttcgctggcagtcaccgcgggtggagattccttccccgccgcttgccagaacgctgctctcctcgccatcggcacccttcaccagcgctacccggacgagttgcagcactcgccctaccgctaccaccctcgtcgtggaggcgcccgcgaccacgccaccttccgagatgccagctcggaggatgacgctaccgtcgtgcatctggcacgcatggtggaggcatacgacgcggctcgtatcgacttccaccagatggtgcgccgtggcatggtggagaacaacatgaagatcctggagctgcgtcaggagaatctgcagctcaagaaggacctcgacgcgttggaggcgcagctgcatcagctcaaggtcgcccaaggagaggacagccgccccaagcgccgccgcgtctgccgcagccagaagatcaccgcccgcaagagcacctccaggcccgagcttgttcgtcagtccctggcgtggacctgcttcgtcgagacccctcgtgccgagcctgcgcccgtggttccccaggagggggaagcatccggcgttggtagcacggaggatgcgctgttgctcaccttccgccctggcccgtcgcagcggagaaatgttagcaccggtgaaggcaaccaacccgaaggcagcaaccccaacccccaaggcaacccacctccaccaccaccacctgacaccaacgccattctcacccaaatcctcgcccagcaagccaacctgatgaccgctttcctccaccacctccaaaatccgccacaacagaatgctccaccactacctccccaacactccaaactcgccgaattcctccgcatccgcccacccaccttctctagctccaacaatcccgtggatgcgttggattggttgcatgccgtggggaagaagctagacacggtgcagtgcagcgacgaagagaaagtcaccttcgccgcccaccaactgcaagggcccgcatctctatggtgggaccacttccaggctacgcagcccgaggggcaaccgatcacttgggctcgcttcaccgccgctttccggagaacccatgtgcccgccggagtagtggctctcaagaagagggagttccgggagttgaaacaaggcaaccgctccgtgatggagtacttgcacgagttcaacaatctggcccggtacgctccggaggatgtgcgggaagatgaggagaagcaggagaagtttctggcaggaatggaccctgagctgtctgttcgtctggtctctggggactatccagacttccaacgtctggtggacaagagcatccgcttggaggccaagcacaaggagctggagtcgcacaagcgccgcttggcgaacttccgcaatcagcagggtgctaaccagagggtccgctacaccaatccctatccagggggatcctcctcgcagcagcagcagcagcaacctcgttccgcgccccgacctcaattcgtggtgcgcgtcccacagccgcagcagcagcagaaccaacaagggactcgtgcaccccgtcctcctacgccagccgtgcagcccgttcaaggccgcagggacgcttcaggtccgcagcgtctgtgcttcaactgcttcgagcccgggcactttgcggataaatgcccaaagccgaggcgccagcaaggccaagcgcctccccgctccaacaacggtggcaaggacgtcatccggggtcgtgtgaaccacgtggcggccgaggacgtgctgacaactccagacgtcattgttggtacgttcctcattcattccatccctgctaccattttgttcgactctggagcttcccactcgttcatatctgtgccattcgtggggaaaaatcagttgggggtagaaaggcttagaaaccctctgctcatcaccacccctggaggggttatgacagcaaagtattatagccctgccgtccctatagaaatccaggggattccttttccctcggatctgattctgctagacaccaagaatttggatgtgatccttgggatgaattggttggctcaattccaaggagtagtggattgcgcgagacgcactgtcactctgtaccgagggccagaacaaccggttgttttctttgcaccaccaacctctgtcaggagttcagaacttcatcagatagaactgtcagaaatccccgttgtcagagaattcggagatgtgtttccggaagaactacccggtatgccgcccaagcgagagattgagttccggatagatcttgctccaggaaccactcctctgcacaagcgaccctaccgtatggcagcaaatgaactggccgaagttaagaaacagttggaagagttgaaagaaaaggggtacatacgtccgagtacttccccttggggtgctcctgtgatttttgtggagaagaaagacaaaacgaagaggatgtgcgttgactacagagctctcaatgaagtcaccatcaaaaacaagtaccctcttccccggatcgatgatctgttcgatcagcttaaaggtgccactgtattctccaagattgatcttcgttccggatatcaccaattacgtatccgtgaggaagatattccgaagaccgcattcaccacgcgatatgggttatatgaattcacggtgatgtcgttcggcttgaccaatgcacctgcattcttcatgaacttaatgaataaagtgttcatggaatacttggacaagtttgttgtggttttcattgatgacattctgatatactcacagtcagaagaagaccatcagcaccatctccgtctggtgttgggaaagttgcgggaacatcaattgtatgccaagcttagcaagtgtgagttctggttgtccgaagtcaaattcttggggcacgtgatatctgctaaaggagttgccgtggaccccgaaacagtgaccgccgtcaccgattggaagcaacccaagacagttacccaagtccgcagtttcttgggtttggcaggatactaccggagattcatcgagaacttctccaaaatcgctcgacccatgacacagttgttgaagaaagaagagaaatttgtgtggagcccgcaatgcgagaaggcgttccaaactctcaaagaaaagctggtttcctcgccagtgttaatcttgccggatactcgcaaggatttcatggtgtactgtgatgcttcgcgccaaggattggggtgcgtactcatgcaggacggtcatgtggtagcctatgcctcgcgtcagctgcgacctcatgaaggcaactaccctacacatgacctggagttagcagcggtggttcacgctctgaaaatctggcggcactatctcattgggaatcgctgtgaaatatataccgatcataagagtttgaaatacatcttcacccagtcggatctgaatcttcggcaaagaagatggttagaactcatcaaggattatgatgtgggaattcactaccatcctggtaaggccaatgtggttgccgacgctctaagtcgaaagagccactgcaacactctcaacgcccgagacatcccacccgagcttaatcaacagatggaagccttgaacctaagcatagtcggtcgtggattcttagctgcgttggaagctaagcctaccttgctcgatcaaatccgcgaggctcagaagaatgatccggacatgcatggactcctgaagaatatgaaacagggtaaagccgctggtttcacggaggatgaacacggaaccctatggaacggaaaccgggtatgcgttccagctgacaaagaacttaaacagctgatacttcaggaagctcacgaaagtccttactcaatccacccgggcagtaccaagatgtacttagacttgaaggggaaatactggtgggtcagcatgaagcgggaaattgcagagttcgtggctctttgtgatgtgtgccagcgtgtcaaggcagaacaccagcgaccggccggacttctccaacctctccaagtgccagaatggaagtgggatgaaattgggatggatttcatcaccggccttccaaaaacccaaggtggatatgattctatatgggtaattgtggatcgattaacaaaggtagctcgatttattcctgtgaagaccacctatggagggaacaaactagcggaactctacttcgctaggatcgtgagtctccatggtattcccaagaaaatcgtatctgataggggaagccaattcacctctcacttttggaagaagctccaagaagagctgggtactcgattgaatttcagcactgcctatcacccgcagacagatggacagaccgagcgtctaaatcagatcctagaagatatgcttcgcgcatgtgtcctagatttcgggaagacttgggataagagtctcccctatgccgagttctcctacaataacagctaccaagccagcatacaaatggcaccttatgaagcgttgtacgggcgcaaatgccggacaccgcttttgtgggaccaagttggggaaagccaagtgttcgggactgatatcttgagagaagctgaagctaaagtcagaatcattcgggataatttaaaggtggcacagtcccggcagaaaagctatgcagacaaccgtcgccgtgacctggaattcgcggtggatgattttgtgtacctccgggtcacaccattgcgaggtgtgcacaggtttcagacaaaagggaagcttgcacctcggtatgtgggtcccttccgtgtcatcgctcgacgcggagaagtcgcttaccagctggagttgcccgcctccttgggcaacgtgcatgatgtgttccatgtgtcgcaactcaagaaatgtctccgagtgccatccgagcaggccgactcagagcagattgaagttcgcgaagacctgacttatgtggagaggccagtgaaaatcctggacaccatggagcgcaggaccaggaaccgggtaatccgtttttgcaaggtccagtggagcaaccacgccgaagaagaagctacgtgggagcgcgaagacgagctgaaggccgcccatcccgatctcttcgccagttcctccgaatctcggggtcgagattccgtttaa

SEQ ID NO: 14208 - DNA, 5055 bp, Oryza sativa
  Clone ID: TFbOSC401237j.C1.o35.fg
atggacatctctagggcaaatgaaggctacacgagctgcggcccggtagtcgagatgtcatggcacagggccggtgtcctgctgctaggggctcagtcctgcctacctgtcccggagattccggccgtaggtgggattgggtcggtactcttgtctatggctaggatgggttggaaactatgtcacgtcttccgtctgtataccgtggtgatggccggcagcatcaaccgtcgtggtctggacctgactggctttgttttggagctgcggggcatgtgtgttgtcctggggtatccgcatggagtggactaccagggcaggcagctcccggagcaggagggtgacgatgcagagccccacgctgcttgggaggttactgcagtgatcctcactggctctcccgagaggacttcgttggcagtcaccgcgggtggagattctttctccgccgcttgccagaacgccgctctcctcgccatcggcactcttcaccagcgctacccggacgagttgcagcactcgccctaccgctaccaccctcgccgcggaggagcccgcgaccacgccacctttcgggatgctagctcggaggatgacgctaccatcatgcatctggcgcgcatggtggaggcgtacgacgcggcccgtatcgacttccatcagatggtgcgccgtgggatggtcgagaacagcatgaagatcctggagctgcgtcaggagaatctgcagctgaagaaggacctagacgcagtggaggcgcagctgcatcagctcaagatcgcccagggagaggtctgtcgccccaagcgtcgccgcgtctgccgcagccagaagatcaccgcccgcaagagtacctccaggcccgagcttgttcgccagtccttggcatggacctgcttcgtcgagacccctcgtgccgagcccgcgcccgtggttcctcaggagggggaagcctcaggcgttggtagcacggaggatgcgctgttgctcaccttccgtcctggcccgtcgcagcggagaagtgctaacaccggtgatggcaaccaacctgaaggcagcaaccacaacaaccatggcagcccacctccacctcctcctccgcctccaccaccaccactagacaccaatgccatcctcacccaaatcctagcccagcaggccaacatgatggctgctttcctccaccacatccaaaatccgccacaacataatgctccaccaccacccccacaacactctaaactcgccgagttcctccgcatccgtccacctaccttctctagctccaataaccccgtggatgcattggattggttgcatgccgtggggaaaaagttagacaccgtgcagtgcagcgatgaggagaaagtcgtcttcgccgcccaccagctgcaggggcccgcatctctatggtgggaccatttccaggctacgcagccagaggggcagcctattacttgggcccgcttcaccgccgccttccggaggacccatgtgcccgccggagtcatggcccttaagaaaagggaattccgagagttgaagcaaggcaaccgctccgtgatggagtatttgcatgagtttaacaacctggcccggtacgccccggaggatgtacgggaagatgaggaaaagcaggagaagttcttggcaggaatggaccctgagctgtccgtgcgtctagtctccgggggatcgtcctcgcagcagcaacagcagcaacaacctcgctccgcgccccgacctcaattcgtggtgcgcatcccacagccgcaacaacagcagagtcagcaagggacccgtgcgccccgtcctcctacgacagccgcgcagtctggtcaaggccgcagggacgttcaaggtccgcagcgtctgtgcttcaattgcttcgagcctgggcactttgcggataaatgcccaaagccgaggcgccagcaaggccaagcgcctccccgctccaacaacggtggtaaggatgtcattcggggtcgtgtgaaccacgtgacggccgaggacgtgctgacaactccagacgtcatcgttggtacgttcctcattcattccatccctgctaccattttgttcgactctggagcttcccactcgtttatatctgtgccattcgtggggagaaatcagttgggggtagaaaggcttaggaaccctccgctcatcaccacccctggaggggttatgacagcaaagtattatagccctgctgttcctatagaaattcagggaattccttttccttcggatctgattcttctagacaccaagaacttggatgtgatccttgggatgaattggttggctcaattccaaggagtagtggattgcgcgagacgcactgtcactctgtaccgagggccggaacaaccggttgttttctttgcacccccaacctctgtcagtagtttagaacttcatcagataggactgtcagaaatccccatcgtcaaagagttcggagacgtgtttccggaagaactacccggtatgccgcccaagcgagagattgagttccggatagatcttgctccaggaaccactcctctgtacaagcgaccctaccgtatggcagcaaatgaactggccgaagttaagaaacagttggaagagttgaaagaaaaggggtatatacgtccgagtacttccccctggggtgctcctgtgatttttgtggagaagaaagacaagacgaagaggatgtgcgttgactacagagctctcaatgaagtcaccatcaaaaacaagtaccctcttccccggatcgatgatctgttcaatcagcttaaaggtgccacggtattctccaagattgatcttcgttccggatatcaccagttgcgcatccgtgaagaagatattccgaagaccgcattcaccacgcgatacggactgtatgaattcacggtgatgtcgttcggtttaaccaatgctcctgccttcttcatgaacttaatgaacaaagtgttcatggaatacttggataagtttgttgtagttttcattgatgacattatggtatactcacaatcagaggaagaccatcagcaccatctccgtctggtgttgggaaagttgcgggaacatcaattgtatgccaaacttagcaagtgcgagttctggttgtccgaagtcaaattcttagggcacgtgatatctgctaaaggagttgctgtggaccccgaaacagtgaccgccgtcaccgattggaagcaacccaagacagtcactcaaattcgcagtttcttaggtttggctggatactaccggaggttcatcgagaacttctccaaaatcgctcgacccatgacacagttgttgaagaaagaagagaaatttgtgtggagcccgcaatgcgagaaggcgttccaaactctcaaagaaaagctggaaggtcatgtggtggcctatgcctcacgccagctacggccccatgaaggcaattaccctacccatgatttggagttagccgctgtggttcatgctctaaagatctggcggcactacctcattgggaatcgctgtgaaatatatactgatcataagagtttgaaatacatcttcacccagtcggatctgaatcttcggcagaggagatggttagaactcatcaaggattatgatgtgggaattcactatcatcctggtaaggccaacgtggtagccgacgctctaagtcgaaaaagccattgcaacactcttgtcgtccgtggcattccacccgaacttaatcaacagatggaagccctgaatctaagcatagttagtcgtggattcttggctacgctggaagccaagccttccttgctcgatcaaatccgcgaggctcagaagaacgatccggacatgcgtggactcctcaagaatatgaaacagggtaaagccgctggtttcacagaggatgaacacggaaccctatggaacggaaatcgggtatgcgttccagatgtcagagaacttaaacagctgatacttcaggaagctcacgagagtccttattccatccaccctggcagcacgaagatgtacttagacttgaaagagaaatactggtgggttagtatgaagcgggaaattgcagagttcgtggccctttgtgacgtgtgccagcgtgtcaaggcagagcaccaacgaccggccggacttctccaacctctccaagtaccagaatggaaatgggatgaaattgggatggatttcatcaccggacttccaaaaacccaaggtggatatgattctatatgggtagttgtggaccgattaaccaaggtagctcggtttattcctgtgaaaaccacctatggagggaacaaactagccgagctctacttcgctaggatcgtgagtctccatggcgttcctaagaaaattgtatctgataggggaagccaattcacctctcacttttggaagaagctccaagaagagctgggtacccgattaaatttcagcaccgcgtatcacccgcagacagatggacagaccgagcgtctaaatcagatcctagaagatatgcttcgcgcatgtgtcctagatttcgggaagacctgggataagagtctcacctatgccgagttctcctacaataacagctatcaagccagcatacaaatggcaccctatgaagcgttgtatggacgcaaatgccggacaccgctattgtgggaccaagttggggaaagccaagtgttcgggactgatatcctgagagaagctgaagctaaagtcagaaccattcgggataatctaaaggtggcccagtctcggcagaagagttatgcagacaaccgacgccgtgacctggaattcgcagtggatgactttgtgtatcttcgggtcacgccattgcgaggtgtacacaggtttcagacgaaagggaagctcgcacctcggttcgtgggtcctttccgcatcattgctcgacgcggagaagttgcttaccagttggagctgcccgcctccttgggcaacgtgcatgatgtgttccatgtgtcgcaactcaagaaatgtcttcgagtgccatccgagcaggccgactcagagtaa

SEQ ID NO: 14209 - DNA, 5352 bp, Oryza sativa
  Clone ID: TFbOSC401303j.C1.o1.fg
atggatgaagtcgggggtcgatggacattctccagggcaaatgaaggctacacgagctgcggcccgatggccggcagcgttacccgtcgtggtttgcacatgactggcttcgtcttggagctgcgaggcatgtgcgtggtcttggggtatccacatggagtggattaccaggccaggccgcttccggatcaggagggtgaggatgcagagcctcacgctggttgggaggtcactgcagtgatcctctccggctctcccgagcggacttcactggcagtcaccgcgggtggggattccttccccgccgcttgccagaacgccgctctcctcgccatcggcacccttcaccagcgctacccggacgagttgcagcactcgccctaccgctaccaccctcgtcgcggaggagcccgcgactacgccaccttccgggacgccagctcggaggatgacgctaccgtcgtgcatctggcacgcatggtggaggcgtacgacgcggctcgtatcgacttccatcagatggtgcgtcgtggcatggtggagaacaacatgaagatcctggagctgcgtcaggagaacctgcagctcaagaaggacctcgacgcgttggaggcgcagctgcatcagctcaagatcgcccagggagagatctgccgccccaagcgtcgccgcgtctgccgcagccagaagatcaccgcccgcaagagcacctccaggcctgagcttgtccgtcagtccctggcgtggacttgcttcgtcgagacccctcgtgccgagcctgcgcccgtggttccccaggagggggaagcctccggcgttggtagctcggagggtgcgctgttgctcaccttccgccctggcccgtcgcagcgctctccttctctgtttgctggttctgtgtggggttttcagatggtgacgaccaggagaaatgttaacaccggtgaaggcaaccaacccgaaggcagcaaccccaacccccaaggcaatccacctccaccaccaccaccagacaccaacgccattctcacccaaatcctcgcccagcaagccaacatgatgaatgctttcctccaccacctccaaaacccgccacaacagaatgctccaccaccacctccccaacactccaaactcgccgaattcctccgcatccgcccacccaccttctctagctccaacaatccagtagatgcgttggattggttgcatgccgtggggaagaagctggacactgtgcagtgcagtgatgaagagaaagtcatcttcgccgcccatcagctgcagggacccgcatctctatggtgggaccatttccaggccacgcagccagagggacagcctattacttgggcccgcttcaccgccgctttccggagaacccatgtgcccgctggagtcgtggctcttaagaaaagggaattccgagagttgaagcaaggcaaccgctccgtgatggagtatttgcatgagttcaacaatctagcccgttatgccccggaggatgtgcgggaagatgaggagaagcaagagaagttcttggcaggaatggaccctgagctgtccgttcgtctagtctctggggactatcctgattttcaacgactggtggacaagagcatccgcttggaagccaagcacaaggagctggaatcgcacaagcgccgcttggcgaatttccgcaatcagcagggtgctaaccagagggtccgctacaccaatccctacccagggggatcctcctcgcagcagcagcaacagcagcagaatcagcaagggactcgtgcgccacgtcctcctacgccaactgtgcagcccgttcaaggccgcagggacgcttcaggtccgcagcggctgtgcttcaactgcttcgagcccgggcactttgcggataaatgcccgaagccaaggcgtcagcaaggccaagcgcctccccgctccaacaacggtggcaaggacgtcattcggggtcgtgtgaatcacgtgacggccgaggacgtgctgacaactccagacgtcatcgttggtacgttccccgttcattccatccccgctacaattttgttcgactctggagcttcccactcgtttatatctgtgccattcgtggaaaaaaatcagttgggggtagaaaggcttagaaaccctctgctcatcaccacccctggcggggttatgacggcaaagtattatagccctgccgttcctatagaaattcaggggattccttttccctcggatctgattctgttagacacaaagaacttggatgtgattcttgggatgaattggttggctcaattccaaggagtagtggattgcgcgaggcgcactgtcactctgtaccgaggaccagaacaaccggttgttttctttgcacctccaacctctgtcagaagttcagaactgcatcagataggtctgtcagaaatccccatagtcagagagttcggagacgtgtttccggaggaactacctggtatgccgcccaagcgagaaattgagttccggatagatcttgctccaggaaccactcctctgtacaagcgaccctaccgtatggcagcaaatgagctggccgaagttaagaaacagttggaagagttgaaagaaaaggggtacatacgtccgagtacttccccttggggtgcccctgtgatttttgtagaaaagaaagacaagacgaagaggatgtgcgttgactacagagctctcaatgaagttaccatcaaaaacaagtaccctcttccccggatagatgatttgttcgatcagcttaaaggtgccactgtattctccaagattgatcttcgttccggatatcatcaattacgtattcgtgaggaagacattccgaagaccgcattcactacgcgatatgggctgtatgaattcacggtgatgtcgttcggcttgaccaatgcacctgccttcttcatgaacttgatgaacaaagtgttcatggaatacttggataagttcgttgtggttttcatcgatgacattctgatatactcacaatcagaggaagaccatcagcaccatctccgtctggtgttgggaaagttacgggaacatcaattgtatgccaagcttagcaagtgtgagttctggttgtccgaagtcaaattcttggggcacgtgatatctgctaaaggagttgctgtggatcccgaaacagtgaccgccgtcaccgattggaagcaacccaagacagtcactcagattcgcagtttcttgggtttggcaggatactaccggagattcatcgagaacttctccaaaatcgctcgacccatgacacagttgttgaagaaagaagagaagtttgtgtggagcccgcaatgcgagaaggcgttccaaactctcaagcaaaagctggtttcctcgccagtgttaatcttgccggatacccgcaaggacttcatggtgtactgtgatgcttcgcgccaaggattggggtgcgtactcatgcaggacggtcatgtggtagcctatgcctcacgccagctacgacctcatgaaggcaactaccctacacatgacttggagctagcagcggtggttcatgctctaaaaatctggcggcactatctcattgggaatcgctgtgaaatatatactgatcacaagagcttgaaatacatcttcactcagtcggacctgaatcttcgacaaaggagatggttagaactcatcaaggattatgatgtgggaattcactatcatcctggcaaggctaacgtggttgccgacgctctaagtcgaaagagccattgcaatactctcaacgttcgtggcattccacccgaacttagtcaacagatggaagccctgaacctaaacatagttggtcgtggatttttggccgcgttggaagccaagcctaccttgctcgatcaaatccgcgaggctcagaagaatgatccggacatgcatggactcctcaagaatatgaaacagggtaaagccgcaggtttcacagagggtgaacacggaaccttatggaacggaaagcgggtatgcgttccagatagcagagaacttaaacagctgatacttcaggaagctcacgaaagtccttattccattcacccgggcagtaccaagatgtacttagatttgaaggagaaatactggtgggtcagcatgaagcgggaaattgcagagtttgtggctctatgtgatgtgtgccagcgtgtcaaggcagaacaccagcgaccggccggacttctccaacctctccaagtgccggaatggaaatgggatgaaattgggatggatttcatcaccggacttccaaaaacccaaggtggatatgattctatatgggtaatagtggatcgattaaccaaggtagctcgatttattcctgtgaagaccacctatggagggaacaaactagcggagctctacttcgctaggatcgtgagtctccatggcgttcccaagaaaatcgtatctgataggggaagccaattcacctctcacttttggaagaagctccaagaagagctgggtactcgattgaatttcagcaccgcgtatcacccgcagacagatggacagaccgagcgtctaaatcagatcttagaagatatgcttcgcgcatgtgtcctggacttcgggaagacttgggataagagtctcccctatgccgagttctcctacaataacagctatcaagccagcatacaaatggcaccctatgaagcgttgtacgggcgcaaatgccggacaccgctattgtgggaccaagttggagaaagccaagtgttcgggactgatatcctgagagaagctgaagctaaagtcagaatcattcgggataatctaaaggtggcacagtctcggcagaaaagttatgcagataaccgacgccgtgatctggaattcgcagtggatgactttgtgtaccttcgagtcacgccattgcgaggtgtgcacaggtttcagacaaaagggaagctcgcacctcggtatgtgggtcccttccgtatcatcgctcgacgcggagaagttgcttaccagctggagttgcccgcctccttgggtaacgtgcatgatgtgttccatgtgtcgcaactcaagaaatgtctccgagtgccatccgagcaggccaactcagagcaaattgaagttcgcgaagatttgacctatgtggagaggccagtgaaaatcctggacaccatggagcgcaggaccaggaaccgggtaatccgtttttgcaaggtccagtggagcaatcacgccgaagaagaagctacttgggagcgcgaagacgagctgaaggcagcccatcccgatctcttcgccagttcttccgaatctcggggtcgagattccgtttaa

SEQ ID NO: 14210 - DNA, 5424 bp, Oryza sativa
  Clone ID: TFbOSC401317j.C1.o24.fg
atggaggtggatgaagtcgggggtcgatggacattctccagggcaaatgaaggctacacgagctgcggcccggtagtcgagatgtcatggcacagggccggtgtcctgctgctaggggctcagtcctgcctgcctgtctcgggggttccggccgtaggtgggattgggtcggtactcttgtctatagctaggatgggttggaaactatgtcacgtcttccgtctgtataccgtggtgatggccggcagcgtcacccgtcgtggtttggacatgactggtttcgtcttggagctgcggggcatgtgcgtggtcctggggtatccacatggagtggactaccaggccaggccgcttccggagcaggagggtgacgatgcggagccccacgctgcttgggaggtcactgcagtgatcctcgctggctctcccgagcggacttcgctgacagtcaccgcgggtggagactccttccccgccgcctgccagagcgccgctctcctcgccatcggcactcttcaccagcgctacccggacgagttgcagcactcgccctactgctaccaccctcgtcgcggaggagcccgcgaccacgccaccttccgggacgctagctcggaggatgacgctaccatcgtgcacttggcgcgcatggtggaggcatacgacgcggctcgtatcgacttccatcagatggtgcgccgtgggatggtcgagaacaacatgaagatcctggagctgcgtcaggagaacctgcagctcaagaaggacctggacgcagtggaggcgcagctgcaccagctcaagatcgcccagggagaggtctgccgccccaagcgtcgccgcgtctgccgcagcctgaagatcaccgcccgcaagagcacctccaggcctgagcttgttcgtcagtccctggcgtggacctgcttcatcgagacccctcgtgccgagcctgcgcccgtgatggtgacgaccaggagaaacgctgttaccggtgatggcaaccaacctgaaggcagcaaccacaacaaccatggcagtccacctccacctccacctcctcctccaccaccaccaccagataccaacgccattctcacccaaatcctcgcccagcaggccaacatgatgactgctttcctccaccacctccaaaatccgccacaacttaatgctccaccaccacccccacaacactctaaactcgccgagtttctccgcatccgcccacctaccttctctagctccaacaaccccgtggatgcgttggattggttgcatgccgtggggaaaaagttagacactgtgcagtgcagcgatgaggagaaagtcatcttcgccgcccaccaactgcagggacccgcatctctatggtgggaccatttccaggctacgcagccagaggggcagcctattacttgggcccgttttaccgccgctttccggagaacccatgtgcccgccggagtcgtggcccttaagaaaagggaattccgagagttgaagcaaggcaaccgctccgtgatggagtatttgcatgagttcaacaacctggcccgttacgccccggaggatgtgcgggaagatgaggagaagcaagagaagttcttggcaggaatggaccctgagctgtccgtgcgtctagtctccggggactatccggacttccaacgtctggtggacaagagcatccgcttggaagccaagcacaaggaactggagtcgcacaagtgccacttggagaatttccgcaaccaacagggtgctaaccaaagggtccgctacaccaatccctatccagggggatcctcctcgcagcagcaaccacagcagcagcaacctcgctccgcgcctcgacctcaattcgtggtgcgcgtcccacagccgcagcagcaacagaatcaacaagggactcgagcgccccgtcctcctacgccaactgtgcagcctggtcaaggccgcagggacgcttcaggtccgcagcgtctgtgcttcaactgcttcgagcccgggcactttgcggataaatgcccgaagccaaggcgtcagcaaggccaagcgcctccccgccccaacaacggtggtaaggatgtcattcagggtcgtgtgaaccatgtgacggccgaggacgtgctgacaactccagacgtcatcgttggtacgttcctcattcattccatccctgctaccattttgttcgactctggagcttcccactcgtttatatctgtgccattcgtggggagaaatcagttgggggtagaaaggcttagaaaccctctgctcatcaccacccctggagaggttatgacagcaaagtattatagccctgccgtccctatagaaattcaggggattccttttccctcggatctgattctgctagacaccaggaacttggatgtgatccttgggatgaattggttggctcaattccaaggagtagtggattgcgcgagacgcactgtcactctgtaccgagggccggagcaaccggttgttttctttgcacccccaacctctgtcaatagatcagaactgcatcagataggactgtcagaaatccccatcgtcagagagtttggagacgtgttcccggaagaactacccggtatgccgcccaagcgagagattgagttccggatagatcttgctccaggaaccacccctctgtacaagcgaccctaccgtatggcagcaaatgaactggccgaagttaagaaacagttggaagagctgaaagaaaaggggtatatacgtccgagtacttccccctggggtgctcctgtgatttttgtggagaagaaggacaagacgaagaggatgtgcgttgactacagagctctcaatgaagtcaccatcaaaaacaagtaccctcttccccggatcgacgatctgttcgatcagcttaaaggtgccactgtattctccaagattgatcttcgttccggatatcaccaattacgtattcgcgaagaagatattccgaagaccgcattcaccacgcgatacggactgtatgaattcacggtgatgtcgttcggtttaaccaatgcccctgccttcttcatgaacttaatgaacaaagtgttcatggaatacttggataagtttgtggtggtattcattgatgacattctgatatactcacaatcagaggaagaccatcagcaccatctccgtctggtattgggaaagttgcgggaacatcaattgtatgccaaacttagcaagtgtgagttctggttgtccgaagtcaaattcttagggcacgtgatatctgctaaaggagttgctgtggaccccgaaacagtgaccgccgtcaccgattggaagccacccaagacagtcactcaagttcgcagtttcttaggtttggcaggatactaccggagattcatcgagaacttctccaaaatcgctcgacccatgacacagttgttgaagaaagaagagaaatttgtgtggagcccgcaatgcgagaaggcatttcaaactctcaaagaaaagctggtttcctcgccagtgttaatcttgccggatactcgcaaggacttcatggtgtattgtgacgcttcgcgccaaggattggggtgcgtgctcatgcaggatggtcatgtggtggcctatgcctcacgccagctacgacctcatgaaggcaactaccctacccatgatttggagttagcagcggtggttcatgctctaaaaatctggcggcactatctcattgggaatcgatgtgaaatatatactgatcataagagtttgaaatacatcttcacccagtcggatctgaatcttcggcaaaggagatggttagaactcatcaaggattatgatgtgggaattcactatcatcctggtaaggccaacgtggtcgccgacgctctaagtcaaaaaggccattgcaacactcttaacgtccgtggcattccacccgaacttaatcaacagatggaagccctgaacctaagcatagttagtcgcggatttttggctgcgctggaagccaagcccaccttgctcgatcaaatccgcgaggctcagaagaatgatccagacatgcatgggctcctcaagaatatgaaacagggtaaagccgctggtttcacagaggatgaacacggaaccctatggaacggaaatcgggtatgcgttccagataacagagaacttaaacagttgatacttcaggaagctcacgaaagtccttattccatccaccctggcagcacgaagatgtacttagacttgaaggagaaatactggtgggttagtatgaagcgggaaattgcagagttcgtggccctttgtgatgtttgccagcgtgtcaaggcagagcaccaacgaccggccggacttctccaacctctccaagtacctgaatggaaatgggatgaaattgggatggatttcatcaccggacttccaaaaacccaaggtggatatgattccatatgggtagttgtggatcgattaaccaaggtagctcgattcattcctgtgaagaccacctatggagggaacaaactagccgaactctacttcgctaggatcgtaagtctccatggcgttcctaagaaaatcgtatctgataggggaagccaattcacctctcacttttggaagaagctccaagaagagctgggtacccgattaaacttcagcaccgcgtatcacccgcagacagatggacagaccgagcgtctaaatcagatcctacaagatatgcttcgcgcatgtgtcctagatttcgggaagacctgggataagagtctcccctatgccgagttctcctacaataacagctatcaagccagcatacaaatggcaccttatgaagcgttgtatgggcgcaaatgccggacaccgctcctgtgggaccaagttggagaaagccaagtgttcgggactgatatcctgagagaagctgaagctaaagtcagaaccattcgggataatctaaaggtggcacagtcccggcagaaaagttatgcagataaccgtcgccgtgacctggaattcgcagtggatgattttgtgtaccttcgggtcacgccattgcggggcgtacacaggtttcagacaaaaggggaagctcgcacctcgctgcccgcctccttgggcaacgtgcatgatgtgttccatgtgtcgcaactcaagaaatgtctccgagtgccatccgagcaggccgactcagagcaaattgaagttcgcgaagacttgacctacgtggagaggccagtgaaaatcctggataccatggagcgcaggaccaggaaccgggtaatccgtttttgcaaggtccaatggagcaaccacgccgaggaagaagctacttgggagcgtgaagacgagctgaaggcagcctatcccgatctcttcgccagttcttccgaatctcggggtcgagattccgtttaa

SEQ ID NO: 14211 - DNA, 4908 bp, Oryza sativa
  Clone ID: TFbOSC401317j.C1.o25.fg
atgtcatggcacagggccggtgtcctgctgctaggggctcagtcctgcctacctgtcccgggggttccggccgtaggtgggattgggtcggtactcttgtctatggctaggatgggttggaaactatgtcacgtcttccgtctgtataccgtggtgatggccggcagcatcaaccgtcgtggtctggacctgactggctttgttttggagctgcggggcatgtgcgttgtcctggggtatgcgcatggagtggactaccagggcaggcagctcccggagcaggagggtgacgatgcagagccccacgctgcttgggaggttactgcagtgatcctcactggctcacccgagaggacttcgttggcagtcaccacgggtggagattctttctccgccgcttgccagaacgccgctctcctcgccatcggcactcttcaccagcgctacccggacgagttgcagcactcgccctaccgctaccaccctcgccgcggaggagcccgcgactacgccaccttccgggatgctagctcggaggatgacgctaccatcatgcacctggcgcgcatggtggaggcgtacgacgcggctcgtatcgacttccatcagatgctgaagaaggacctagacgcagcagaggcgcagctgcatcagctcaagatcgcccagggagaggtctgtcgccccaagcgccgccgcgtctgccgcagccagaagatcaccgcccgcaagagcacctccaggcccgagcttgttcgccagtccttggcatggacctgcttcgtggagacccctcgtgccgagcccgcgcccatggctcctcaggagggggaagcctccggcgttgatggtgacgaccaggagaagtgctgctacggtgaaggcagtcaccccgaaggcagcaaccacaacaaccagggcagcccacctccacctcctcctccgcctctaccaccaccaccagacaccaacgccattctcacccaaatcctcgcccagcaggccaacatgatggctgctctcctccaccacatccaaaatccgccacaacataatgctccaccaccaccgccacaacactctaaactcgctgagttcctccgcatccgtccacctaccttctctagctccaataaccccgtggatgcgttggattggttgcatgccgtggggaaaaagttagacaccgtgcagtgcagcgatgaggagaaagctacgcagccagaggggcagcctattacttgggcccgcttcaccgccgctttccggaggacccatgtgcccgccggagtcatggcccttaagaaaagggaattccgagagttgaagcaaggcaaccgctccgtgatggagtatttgcatgagttcaacaacctggcccggtacgccccggaggatgtacgggaagatgaggaaaagcagaagaagttcttggcaggaatggatcctgagctgtccgtctgtctagtctccggggactatccggatttccaacgtctggtggacaagagcatccgcttggaagccaagcacaaggaactggagtcgcacaagcgccgcttggcgaatttccgcaatcaacagggagctaaccaaaggatccgctacaccaatccctatccagggggatcgtcctcgcagcagcaaaagcagcagcaacctcgctccgcgccccgacctcaattcgtggtgtgcgtcccacagccgcagcaacagcagagccagcaagggacccgtgcgccccgtcctcctacgccagccgcgcagtctggtcaaggccgcagggacgttcaaggtccgcagcgtctgtgcttcaactgctttgagcctgggcactttgcggataaatgcccaaagccgaggcgccagcaaggccaagcgcctccccgctccaacaacggtggtaaggatgtcattcggggtcgtgtgaaccacgtgacggccgaggacgtgctgacaactccagacgtcatcgttggtacgttcctcattcattccatccctgctaccattttgttcgactctggagcttcccactcgtttatatctgtgccattcgtggggagaaatcagttgggggtagaaaggcttaggaaccctctcctcatcaccacccctggaggggttatgacagcaaagtattatagtcctgccgtccctatagaaattcaggggattccttttccctcggatctgattcttctagacaccaagaacttggatgtgatccttgggatgaattggttggctcaattccaaggagtagtggattgtgcaagacgcactgtcactctgtaccgagggccggaacaaccggttgttttctttgcacccccaacctctgtcagtagttcagaacttcatcagataggactgtcagaaatccccatcgtcagagagttcggagacgtgtttccggaagaactacccggtatgccgcccaagcgagagattgagttctggatagatcttgctccaggaaccactcctctgtacaagcgaccctaccgtatggcagcaaatgaactggccgaagttaagaaacagttggaagagttgaaagaaagggggtacatacgtccgagtacttccccctggggtgctcctgtgatttttgtggagaagaaagacaagacgaagaggatgtgcgttgactacagagctctcaatgaagtcaccatcaaaaacaagtaccctcttccccggatcgatgatctgttcgatcagcttaaaggtgccacggtattctccaagattgatcttcgttccggatatcaccagttgcgcatccgtgaagaagatattccgaagaccgcattcaccacgcgatacggactgcatgaattcacggtgatgtcgttcggtttaaccaatgctcctgccttcttcatgaacttaatgaacaaagtgttcatggaatacttggataagtttgttgtggttttcattgatgacattctggtatactcacaatcagaggaagaccatcagcaccatctccgtctggtgttgggaaagttgcgggaacatcaattgtatgccaaacttagcaagtttgttgaagaaagaagagaaatttgtgtggagcccgcaatgcgagaaggcgttcaagaaaagctggtttcctcgccagtgttaatcttgccggatactcgcaaggacttcatggtgtattgtgacgcttcgcgccaaggattggggtgcgtgctcatgcaggaaggtcatgtggtggcctatgccttacgccagctacggcctcatgaaggcaactaccctacccatgatttggagttagccgcggtggttcatgctctaaaaatctggcggcattatctcattgggaatcgctatgaaatatatactgatcataagagtttgaaatacatcttcaaccagtcggatctgaatcttcggcagagaagatggttagagctcatcaaggattatgatgtgggaatccactatcatcccggtaaggccaacgtggtcgccgacgcgctaagtcgaaaaagccattgcaacactcttaacgtccgtggcattccacccgaacttaatcaacagatggaagccctgaacctaagcatagttggtcgcggattcttggctgcgttggaagctaagcctaccttgctcgatcaaatccgcgaggctcagaagaatgatccggacatgcgtggactcctcaagaatatgaaacagggtaaagccgctggtttcacagaggatgaacacggaaccctatggaacggaaatcgggtatgcgttccagataacagagaacttaaacagctgatacttcaggaagctcacgaaagtccttattccatccaccctggcagtacgaagatgtacttagacttgaaggagaaatactggtgggttagtatgaagcgggaaattgcagagttcgtggccctttgtgatgtgtgccaacgtgtcaaggcagagcaccaacgaccagccggacttctccaacctctccaagtaccagaatggaaatgggatgaaattgggatggatttcatcaccggacttccaaaaacccaaggtggatatgattctatatgggtagttgtggaccgattaaccaaggtagctcggtttattcctgtgaagaccacctatggagggaacaaactagccgagctctacttcgctaggatcgtgagtctccatggcgttcctaagaaaattgtatccgataggggaagccaattcacctctcacttttggaagaagctccaagaagagatggatacccgattaaatttcagcaccgcgtatcacccgcagacagatggacagaccgagcgtctaaatcagatcctagaagatatgcttcgcgcatgtgtcctagatttcgggaagacctgggataagagtctcccctatgccgagttctcctacaataacagctaccaagccagcatacaaatggcaccttatgaagcgttgtatgggcgcaaatgccggacaccgctcctgtgggacctagttggggaaaaccaagtgttcgggactgatatactgagagaagctgaagcgaaggttatcattgctcggcgcggagaagtcgcttaccagttggatctgcccgcctccttgggcaacgtgcatgatgtgttcgatgtgtcgcaactcaagaaatgtcttcgagtgccatccgagcaggccgactcagagcaaattgaagttcgcgaagacttgacctacgtggaaaggccagtgaaaatcctggacaccatggagcgcgggaccaggaaccgagtaattcgtttttgcaaggtccaatggagcaaccacgccgaggaagaagctacctgggagcgtgaagacgagctgaaggcagcccatcccgatctcttcgccagttcttccgaatctcggggtcgaaattccgtttaa

SEQ ID NO: 14212 - DNA, 2360 bp, Oryza sativa
  Clone ID: TFbOSC401341j.C1.o51.np
atggccgccaccggcgaccataggggcgcgggcgccgcctcccgccggccgcgccggcttggccgccctcgggcgcaccgagtggctgccgcgtggggcccggccgtcagccgcccgcgcccttaggtgcggctgacgcgtgggacccacggtgccggccgatggccggcagcatcaatcgtcgtggtctggacctgactggcttcgttttggagctgcggggcatgtgcgttgtcctggggtatccgcatggagtggactaccagggcaagcagctcccggagcaggagggtgacgatgcagagccccacgctgcttgggaggttactgcagtgatcctcactggctcacccgagaggacttcgttggcagtcaccgcgggtggagattccttctccgccgcttgccagaacgccgcactcctcgccatcggcactcttcaccagcgctacccggacgagttgcagcactcgccctaccgctaccaccctcgccgcggaggagcccgcgactacgccaccttccgggatgctagctcggaggatgacgctaccatcatgcacctagcgcgcatggtggaggcgtacgacgcggcccgtatggacttccatcagatggtgcgccgcgggttggtcgagaacaacatgaagatcctggagctgcgtcaggagaatctgcagctgaagaaggacctagacgtagtggaggcgcagctgtgtcagctcaagatcgcccagggagaggtctgtcgccccaagcgtcgccgcgtctgccgcagcctgaagatcaccgcccgcaagagtacctccaggcccgagcttgttcgtcagtccctggcgtggacctgcttcgtcgagacccctcgtgccgagcccgcgcccgtggttcctcaggaggatggagtctccggcgttggcagcacggaggatgcgctgctgctcaccttccgccctggcccgttgcagaagagaagtgctgctaccggtgatggcaaccaacccgtaggcagcaaccacaacaaccatggcagcccacctccacctcctcccccgcctccaccaccaccactagacaccaacaccatcctcacccaaatcatcgcccagcgggccaacatgatggctgctttcctccaccacatccaaaatccgccacaacataatgctccaccaccacccccacaacactctaaactcgccgagttcctccgcatccgtccacctaccttctctagctccaataaccccgtggatgctttggattggttgcatgccgtggggaaaaagttagacaccgtgcagtgcaacgatgaggagaaagtcatctttgccgctcactaactgcaggggcccgcatctctatggtgggaccacttccaggctacgtagccagaggggcagcctattacttgggcccgcttcaccgcctctttccagagaacccatgtgcccgtcggagtcatggcccttaagaaaagggaattctgagagttgaagcaaggcaaccgctccatgatggagtatttgcatgagtttaacaacctggcccggtacgccccggaggatgttcgtgaagatgaggagaagcaagagaagttcttggcaggaatggaccctgagctgtccgtgcgtctggtctccggggactatccggatttccaacgtctggtggacaagagcatccgcttggaagccaagcacaaggaactggagtcgcacaagcgtcgcttggcgaatttccgcaaccaacagggggctaaccaaagggtccgctacaccaatccctatccagggggatcctcctcgcagcagcagcagcagcagcaacctcgctccacgtcccgacctcaattcgtggtgcatgtcccacagccgcagcaacagcagagtcagcaagggactcgtgcgccccgtcctcctacgccagccgtgcagcctgttcaaggccgcagggacgctcaaggtcagcagcgtctgtgcttcaactgcttcgagcctgggcactttgcggataaatgcccaaagccgaggtgccagcaaggccaagcgcctccccgctccaacaacggtggtaaggatgtcattcggggtcgtgtgaaccacgtgacggccgagaacgtgctgacaactccagacgtcatcgttggtacgttcctcattcattccatccctgctaccatttttgtcacgtcccaaaacgactctaaaatacatcctctaaattatgcctagaataattaaaatccgtgtgaaagccttcaacaaataaaatccctaacctcgccggcgccattaatggcggccgggtcttccgcgcccgtttccccctcctccggccgccctctctcacccccaacccta

SEQ ID NO: 14213 - DNA, 5469 bp, Oryza sativa
  Clone ID: TFbOSC401344j.C1.o11.fg
atgtcatggcacagggccggtgtcctgctgctaggggctcagtcctgcctgcctgtcccggaggttccggccgtaggtgggattgggtcggtactcttgtctatggctaggatgggttggaaactatgtcacgtcttccgtctgtataccgtggtgatggccggcagcgtcacccgtcgtggtttggacatgactggcttcgtcttggagctgcggggcatgtgcgtggtcctagggtatccacatggagtggactaccaggccaggccgcttccggagcaggagggtgacgatgcagagccccacgctggttgggaggtcactgcagtgatcctctctggctctcccgagcggacttcgctggcagtcaccgcgggtggagattccttccccgccgcttgccagagcgccgctctcctcgccatcggcactcttcaccagcgctacccggacgagttgcagcactcgccctaccgctaccaccctcgccgcggaggagcccgcgactacgccaccttccgggatgctagctcggaggatgacgctaccatcgtgcacctggcgcgcatggtggaggcgtacgacgcggctcgtatcgacttccatcagatggtgcgccgtgggatggtcgagaacaacatgaagatcctggagctgcgtcaagagaacctgcagctcaagaaggacctagacgtggtggaggcgcagctgcatcagctcaagatcgcccagggagaggtctgccgccccaagcgccgccgtgtctgccgcagccagaagatcaccgcccgcaagagcacctccaggcccgagcttgttcgtcagtccctggcgtggacttgcttcgtcgagacccctcgtgccgagcccgcgcccgtggttccccaggagggggaagcctccggcgttggtagcacggaggatgcgctgttgctcaccttccgtcctggcccgtcgcagcggagaagtgctaacaccggtgatggcaaccaacctgaaggcagcaaccaccaccaccagtgcagcccacctccacctcctcctccgcctccaccaccaccaccagacaccaacgccattctcacccaaatcctcgcccagcaggccaacatgatgactgctttcctccaccacctccaaaatccgccacaacataatgctccaccaccacccccacaacactctaaactcgccgagttcctccgcatccgcccacctaccttctctagctccaacaaccccgtggacgcgttggattggttgcatgctgtggggaaaaagctagacactgtgcagtgcagcgatgaggagaaagtcatcttcgccgcccaccagctgcagggacccgcatctctatggtgggaccatttccaggctacgcagccagaagggcaacctattacttgggcccgtttcaccgccgctttccggagaacccatgtgcccgccggagtcgtggcccttaagaaaagagaattccgagagttgaagcaaggcaaccgctccgtgatggagtatttgcatgagttcaacaacctggcccgttacgccccggaggatgtgcgggaagatgaggagaagcaagagaagttcttggcaggaatggaccctgagctgtccgtccgtctagtctccggggactatccggatttccaacgtctagtggacaagagcatccgcttggaagccaagcacaaggaactggagtcgcacaagcgccgcttggcgaatttccgcaatcaacagggtgctaaccaaagggtccgctacaccaatccctatccagggggatcctcctcgcaacagcaacaacagcagcagcaacctcgctccgcgcctcgacctcaattcgtggtgcgcgtcccacagccgcagcagcagcagaatcaacaagggactcgtgcgccccgtcctcctacgccaactgtgcagcctggtcaaggccgcagggacgctcaaggtccgcagcgtctgtgcttcaactgcttcgagcccgggcactttgcggataaatgcccaaagccgaggcgtcagcaaggccaagcgcctccccgctccaacaacggtgggaaggatgtcattcggggtcgggtgaaccacgtgacggccgaggacgtgctgacaactccagacgtcatcgttggtacgttcctcattcattccatccctgctaccattctgttcgactctggagcatcccactcgtttatatctgtgccattcgtggggagaaatcagttgggggtagaaaggcttaggaaccctctgctcatcaccacccctggaggggttatgacagcaaagtattatagtcctgccgtccctatagaaattcaggggattcctttttcctcggatctgattctgctagacaccaagaacttggatgtgatccttgggatgaattggttggctcaattccaaggagtagtggattgtgcgagacgcactgtcactctgtaccgagggccggaacaaccggttgttttctttgcacccccaacctctgtcagtagttcagaacttcatcagataggactgtcagaaatccccatcgtcagagagttcggagacgtgtttccggaagaactacccggtatgccgcccaaacgagagattgagttccggatagatcttgctccaggaaccactcctctgtacaagcgaccctaccgtatggcagcaaatgaactggccgaagtcaagaaacagttggaagagttgaaagaaaaggggtatatacgtccgagtacttccccctggggtgctcctgtgatttttgtggagaagaaagacaagacgaagaggatgtgcgttgactacagagctctcaatgaagtcaccatcaaaaacaagtaccctcttccccggatcgatgatctgttcgatcagcttaaaggtgccactgtattctccaagattgatcttcgttccggatatcaccaattacgtattcgtgaagaagatattccgaagaccgcattcaccacgcgatacggactgtatgaattcacagtgatgtcattcggtttaaccaacgcacctgccttcttcatgaacttaatgaacaaagtgttcatggaatacttggataagtttgttgtggttttcattgatgacattctgatatactcacaatccgaggaagaccatcagtaccatctccgtctggtgttgggaaagttgcgggaacatcaattgtatgccaaacttagcaagtgtgagttctggttgtccgaagtcaaattcttagggcacgtgatatctgctaaaggagttgctgtggaccccgaaacagtgaccgccgtcactgattggaagcaacccaagacagtcactcaagtccgcagtttcttaggtttggcaggatactaccggaggttcatcgagaacttctccaaaatcgctcgacccatgacacagttgttgaagaaagaagagaaatttgtgtggagcccgcaatgcgagaaggcgttcaaaactctcaaagaaaagctggtttcctcgccagtgttaatcttgccggatacttgcaaggatttcatggtgtattgtgatgcttcgcgccaaggattggggtgcgtgctcatgcaggatggtcatgtggtggcctatgcctcacgccagctacggcctcatgaaggcaactaccctacccatgatttggagttagatgcggtggttcatgctctaaaaatctggcggcactatctcattgggaatcgctgtgaaatatatactgatcataagagtttgaaatacatcttcactcagtccgacctgaatcttcggcaaaggagatggttagaactcatcaaggattatgatgtgggaattcactatcatcctggtaaggccaacgtggtcgccgacgctctaagtcgaaaaagccattgcaacactcttaacgtccgtggcattccactcgaacttagtcaacagatggaagccctgaacctaagcatagttggtcgcggattcttggctgcgttggaagccaagcctaccttgctcgatcaaatccgcgaggctcagaagaatgatccggacatgcatggactcctcaagaatatgaaacaaggtaaagccgctggtttcacagaggatgaacacggaaccctatggaacggaaatcgagtatgcgttccagataacagagaacttaaacagctgatactacaggaagctcacgaaagtccttattccatccaccctggcagtacgaagatgtacttagacttgaaggagaaatactggtgggttagtatgaagcgggaaattgcagagttcgtggccctttgtgatgtgtgccagcgtgtcaaggcagagcaccaacgaccggccggacttctccaacctctccaagtacctgaatggaaatgggatgaaattgggatggatttcatcaccggacttcgaaagacccaaggtggatatgattctatatgggtagttgtggatcgattaaccaaggtagctcgatttattcctgtgaagaccacctatggagggaacaaactagccgagctctacttcgctaggatcgtgagtctccatggcgttcccaagaaaatcgtatctgataggggaagccaattcacctctcacttttggaagaagcttcaagaagagctgggtacccggttaaacttcagcaccgcataccacccgcagacagatgggcagaccgagcgtctaaatcagatcctagaagatatgcttcgcgcgtgtgtcctggatttcgggaagacctgggataagagtctcccctatgccgagttctcctacaataacagctatcaagccagcatacaaatggcaccttatgaagcgttgtatgggcgcaaatgccggacaccgctcttgtgggatcaagttggggaaagccaagtgttcgggactgatatcctgagagaagctgaagctaaagtcagaaccattcgggataatctaaaggtggcacagtcccggcagaaaagttatgcagataaccgtcgccgtgacctggaattcgcagtggacgattttgtataccttcgggtcacgccattgcggggtgtacacaggtttcggacaaaagggaagctcgcacctcggtatgtgggtcctttccgtatcgttgcccgacgcggagaagtcgcttaccaattggagctgcccgcctccttgggcaacgtgcacgatgtgttccatgtgtcgcaactcaagaaatgccttcgagtgccatccgagcaggccgactcagagcaaattgaagttcgcgaagacttgacctacgtggagaggccagtgaaaatcctggacaccatggagcgcaggaccaggaaccgggtaatccgtttttgcaaggtccagtggagcaaccacgtcgaagaagaagctacctgggagcgtgaagacgagctgaaggcagcccatcccgatctcttcgccagttcttccgaatctcggggtcgagattccgtttaa

SEQ ID NO: 14214 - DNA, 717 bp, Oryza sativa
  Clone ID: TFbOSC401344j.C1.o4.fg
atggagtatttgcatgagtttaacaacctggcccggtacgccccggaggatgttcgtgaagatgaggagaagcaagagaagttcttggcaggaatggaccctgagctgtccgtgcgtctggtctccggggactatccggatttccaacgtctggtggacaagagcatccgcttggaagccaagcacaaggaactggagtcgcacaagcgtcgcttggcgaatttccgcaaccaacagggggctaaccaaagggtccgctacaccaatccctatccagggggatcctcctcgcagcagcagcagcagcagcaacctcgctccacgtcccgacctcaattcgtggtgcatgtcccacagccgcagcaacagcagagtcagcaagggactcgtgcgccccgtcctcctacgccagccgtgcagcctgttcaaggccgcagggacgctcaaggtcagcagcgtctgtgcttcaactgcttcgagcctgggcactttgcggataaatgcccaaagccgaggtgccagcaaggccaagcgcctccccgctccaacaacggtggtaaggatgtcattcggggtcgtgtgaaccacgtgacggccgagaacgtgctgacaactccagacgtcatcgttggtacgttcctcattcattccatccctgctaccatttttgtcacgtcccaaaacgactctaaaatacatcctctaaattatgcctag

SEQ ID NO: 14215 - DNA, 5403 bp, Oryza sativa
  Clone ID: TFbOSC401348j.C1.o7.fg
atgtcatggcacagggccggtgtcctgctgctaggggctcagtcctgcctgcctgtcccggaggttccggccgtaggtgggattgggtcgatggccggcagcgtcacccgtcgtggtttggacatgactggcttcgtcttggagctgcggggcatgtgcgtggtcctggggtatccacatggagtggactaccaggccaggccgcttccggagcaggagggtgacgatgcagagccccacgctggttgggaggtcactgcagtgatcctctctggctctcccgagcggacttcgctggcagtcaccgcgggtggagattccttccccgccgcttgccagagcgccgctctcctcgccatcggcactcttcaccagcgctacccggacgagttgcagcactcgccctaccgctaccaccctcgccgcggaggagcccgcgactacgccaccttccgggatgctagctcggaggatgacgctaccatcgtgcacctggcgcgcatggtggaggcgtacgacgcggctcgtatcgacttccatcagatggtgcgccgtgggatggtcgagaacaacatgaagatcctggagctgcgtcaagagaacctgcagctcaagaaggacctagacgcggtggaggcgcagctgcatcagctcaagatcgcccagggagaggtctgccgccccaagcgccgccgtgtctgccgcagccagaagatcaccgcccgcaagagcacctccaggcccgagcttgttcgtcagtccctggcgtggacttgcttcgtcgagacccctcgtgccgagcccgcgcccgtggttccccaggagggggaagcctccggtgttggtagcacggaggatgcgctgttgctcaccttccgtcctggcccgtcgcagcggagaagtgctaacaccggtgatggcaaccaacctgaaggcagcaaccaccaccaccagggcagcccacctccacctcctcctccgcctccaccaccaccaccagacaccaacgccattctcacccaaatcctcgcccagcaggccaacatgatgactgctttcctccaccacctccaaaatccgccacaacataatgctccaccaccacccccacaacactctaaactcgccgagttcctccgcatccgcccacctaccttctctagctccaacaaccccgtggacgcgttggattggttgcatgccgtggggaaaaagctagacactgtgcagtgcagcgatgaggagaaagtcatcttcgccgcccaccagctgcagggacccgcatctctatggtgggaccatttccaggctacgcagccagaagggcaacctattacttgggcccgtttcaccgccgctttccggagaacccatgtgcccgccggagtcgtggcccttaagaaaagagaattccgagagttgaagcaaggcaaccgctccgtgatggagtatttgcatgagttcaacaacctggcccgttacgccccggaggatgtgcgggaagatgaggagaagcaagagaagttcttggcaggaatggaccctgagctgtccgtccgtctagtctccggggactatccggatttccaacgtctagtggacaagagcatccgcttggaagccaagcacaaggaactggagtcgcacaagcgccgcttggcgaatttccgcaatcaacagggtgctaaccaaagggtccgctacaccaatccctatccagggggatcctcctcgcagcagcaacaacagcagcagcaacctcgctccgtgcctcgacctcaattcgtggtgcgcgtcccacagccgcagcagcagcagaatcaacaagggactcgtgcgccccgtcctcctacgccaactgtgcagcctggtcaaggccgcagggacgctcaaggtccgcagcgtctgtgcttcaactgcttcgagcccgggcactttgcggataaatgcccaaagccgaggcgtcagcaaggccaagcgcctccccgctccaacaacggtgggaaggatgtcattcggggtcgggtgaaccacgtgacggccgaggacgtgctgacaactccagacgtcatcgttggtacgttcctcattcattccatccctgctaccattctgttcgactctggagcatcccactcgtttatatctgtgccattcgtggggagaaatcagttgggggtagaaaggcttaggaaccctctgctcatcaccacccctgaaggggttatgacagcaaagtattatagtcctgccgtccctatagaaattcaggggattccttttccctcggatctgattctgctagacaccaagaacttggatgtgatccttgggatgaattggttggctcaattccaaggagtagtggattgtgcgagacgcactgtcactctgtaccgagggccggaacaaccggttgttttctttgcacccccaacctctgtcagtagttcagaacttcatcagataggactgtcagaaatccccatcgtcagagagttcggagacgtgtttccggaagaactacccggtatgccgcccaaacgagagattgagttccggatagatcttgctccaggaaccactcctctgtacaagcgaccctaccgtatggcagcaaatgaactggccgaagtcaagaaacagttggaagagttgaaagaaaaggggtatatacgtccgagtacttccccctggggtgctcctgtgatttttgtggagaagaaagacaagacgaagaggatgtgcgttgactacagagctctcaatgaagtcaccatcaaaaacaagtaccctcttccccggatcgatgatctgttcgatcagcttaaaggtgccactgtattatccaagattgatcttcgttccggatatcaccaattacgtattcgtgaagaagatattccgaagaccgcattcaccacgcgatacggactgtatgaattcacggtgatgtcattcggtttaaccaatgcacctgccttcttcatgaacttaatgaacaaagtgttcatggaatacttggataagtttgttgtggttttcgttgatgacattctgatatactcacaatccgaggaagaccatcagcaccatctccgtctggtgttgggaaagttgcgggaacatcaattgtatgccaaacttagcaagtgtgagttctggttgtccgaagtcaaattcttagggcacgtgatatctgctaaaggagttgctgtggaccccgaaacagtgaccgccgtcactgattggaagcaacccaagacagtcactcaagtccacagtttcttaggtttggcaggatactaccggaggttcatcgagaacttctccaaaatcgctcgacccatgacacagttgttgaagaaagaagagaaatttgtgtggagcccgcaatgcgagaaggcgttcaaaactctcaaagaaaagctggtttcctcgccagtgttaatcttgccggatactcgcaaggatttcatggtgtattgtgatgcttcgcgccaaggattggggtgcgtgctcatgcaggatggtcatgtggtggcctatgcctcacgccagctacggcctcatgaaggcaactaccctacccgtgatttggagttagctgcggtggttcatgctctaaaaatctggctgcactatctcattgggaatcgctgtgaaatatatactgatcataagagtttgaaatacatcttcactcagtccgacctgaatcttcggcaaaggagatggttagaactcatcaaggattatgatgtgggaattcactatcatcctggtaaggccaacgtggtcgccgacgctctaagtcgaaaaagccattgcaacactcttaacgtccgtggcattccactcgaacttagtcaacagatggaagccctgaacctaagcatagttggtcgcggattcttggctgcgttggaagccaagcctaccttgctcgatcaaatccgcgaggctcagaagaacgatccggacatgcatggactcctcaagaatatgaaacagggtaaagccgctggtttcacagaggatgaacacggaaccctatggaacggaaatcgagtatgcgttccagataacagagaacttaaacagctgatactacaggaagctcacgaaagtccttattccatccaccctggcagtacgaagatgtacttagacttgaaggagaaatactggtgggttagtatgaagcgggaaattgcagagttcgtggccctttgtgatgtgtgccagcgtgtcaaggcagagcaccaacgaccggccggacttctacaacctctccaagtacctgaatggaaatgggatgaaattgggatggatttcatcaccggacttccaaagacccaaggtggatatgattctatatgggtagttgtggatcgattaaccaaggtagctcgatttattcctgtgaagaccacctatggagggaacaaactagccgagctctacttcgctaggatcgtgagtctccatggcgttcccaagaaaatcgtatctgataggggaagccaattcacctctcacttttggaagaagcttcaagaagagctgggtacccggttaaacttcagcaccgcataccacccgcagacagatgggcagaccgagcgtctaaatcagatcctagaagatatgcttcgcgcgtgtgtcctggatttcgggaagacctgggataagagtctcccctatgccgagttctcctacaataacagctatcaagccagcatacaaatggcaccttatgaagcgttgtatgggcgcaaatgccggacaccgctcttgtgggatcaagttggggaaagccaagtgttcgggactgatatcctgagagaagctgaagctaaagtcagaaccattcgggataatctaaaggtggcacagtcccggcagaaaagttatgcagataaccgtcgccgtgacctggaattcgcagtggacgattttgtataccttcgggtcacgccattgcggggtgtacacaggtttcggacaaaagggaagctcgcacctcggtatgtgggtcctttccgtatcgttgcccgacgcggagaagtcgcttaccaattggagctgcccgcctccttgggcaacgtgcacgatgtgttccatgtgtcgcaactcaagaaatgccttcgagtgccatccgagcaggccgactcagagcaaattgaagttcgcgaagacttgacctacgtggagaggccagtgaaaatcctggacaccatggagcgcaggaccaggaaccaggtaatccgtttttgcaaggtccagtggagcaaccacgtcgaagaagaagctacctgggagcgtgaagacgagctgaaggcagcccatcccgatctcttcgccagttcttccgaatctcggggtcgagattccgtttaa

SEQ ID NO: 14216 - DNA, 5394 bp, Oryza sativa
  Clone ID: TFbOSC401354j.C1.o21.fg
atggacatctccagggcaaatgaaggctacacgagctgcggcccggtagtcgagatgtcatggcacagggccggtgtcctgctgctaggggctcagtcctgcctgcctatcccggaggttccggccgtaggtgggattgggtcggtactcttgtctatggctaggatgggttggaaactatgtcacgtcttccgtctgtataccgtggtgatggccggcagcgtcacccgtcgtggtttggacatgactggcttcgtcttggagctgcggggcatgtgcgtggtcctggggtatccacatggagtggactaccaggccaggccgcttccggagcaggagggtgacgatgcagagccccacgctggttgggaggtcactgcagtgatcctctctggctctcccgagcggacttcgctggcagtcaccgcgggtggagattccttccccgccgcttgccagagcgccgctctcctcgccatcggcactcttcaccagcgctacccggacgagttgcagcactcgccctaccgctaccaccctcgccgcggaggagcccgcgactacgccaccttccgggatgctagctcagaggatgacgctaccatcgtgcacctggcgcgcatggtggaggcgtacgacgcggctcgtatcgacttccatcagatggtgcgccgtgggatggtcgagaacaacatgaagatcctggagctgcgtcaagagaacctgcagctcaagaaggacctagacgcggtggaggcgcagctgcatcagctcaagatcgcccagggagaggtctgccgccccaagcgccgccgtgtctgccgcagccagaagatcaccgcccgcaagagcacctccaggcccgagcttgttcgtcagtccctggcgtggacttgcttcgtcgagatccctcgtgccgagcccgcgcccgtggttccccaggagggggaagcctccggcgttggtagcacggaggatgcgctgttgctcaccttccgtcctggcccgtcgcagcggagaagtgctaacaccggtgatggcaaccaacctgaaggcagcaaccaccaccaccagggcagcccacctccacctcctcctccgcctccaccaccaccaccagacaccaacgccattctcacccaaatcctcgcccagcaggccaacatgatgactgctttcctccaccacctccaaaatccgccacaacataatgctccaccaccacccccacaacactctaaactcgccgagttcctccgcatccgcccacctaccttctctagctccaacaaccccgtggacgcgttggattggttgcatgccgtggggaaaaagctagacactgtgcagtgcagcgatgaggagaaagtcatcttcgccgcccaccagctgcagggacccgcatctctatggtgggaccatttccaggctacgcagccagaagggcaacctattacttgggcccgtttcaccgccgctttccggagaacccatgtgcccgccggagtcgtggcccttaagaaaagagaattccgagagttgaagcaaggcaaccgctccgtgatggagtatttgcatgagttcaacaacttggcccgttacgccccggaggatgtgcgggaagatgaggagaagcaagagaagttcttggcaggaatggaccctgagctgtccgtccgtctagtctccggggactatccggatttccaacggggatcctcctcgcagcagcaacaacagcagcagcaacctcgctccgcgcctcgacctcaattcgtggtgcgcgtcccacagccgcagcagcagcagaatcaacaagggactcgtgcgccccgtcctcctacgccaactgtgcagcctggtcaaggccgtagggacgctcaaggtccgcagcgtctgtgcttcaactgcttcgagcccgggcactttgcggataaatgcccaaagccgaggcgtcagcaaggccaagcgcctccccgctccaaccacggtgggaaggatgtcattcggggtcgggtgaaccacgtgacggccgaggacgtgctgacaactccagacgtcatcgttggtacgttcctcattcattccatccctgctaccattctgttcgactctggagcatcccactcgtttatatctgtgccattcgtggggagaaatcagttgggggtagaaaggcttaggaaccctctgctcatcaccacccctggaggggttatgacagcaaagtattatagtcctgccgtccctatagaaattcaggggattccttttccctcggatctgattctgctagacaccaagaacttggatgtgatccttgggatgaattggttggctcaattccaaggagtagtggattgtgcgagacgcactgtcactctgtaccgagggccggaacaaccggttgttttctttgcacccccaacctctgtcagtagttcagaacttcatcagataggactgtcagaaatccccatcgtcagagagttcggagacgtgtttccggaagaactacccggtatgccgcccaaacgagagattgagttccggatagatcttgctccaggaaccactcctctgtacaagcgaccctaccgtatggcagcaaatgaactggccgaagtcaagaaacagttggaagagttgaaagaaaaggggtatatacgtccgagtacttccccctggggtgctcctgtgatttttgtggagaagaaagacaagacgaagaggatgtgcgttgactacagagctctcaatgaagtcaccatcaaaaacaagtaccctcttccccggatcgatgatctgttcgatcagcttaaaggtgccactgtattctccatgattgatcttcgttccggatatcaccaattacgtattcgtgaagaagatattccgaagaccgcattcaccacgcgatacggactgtatgaattcacggtgatgtcatttggtttaaccaatgcacctgccttcttcatgaacttaatgaacaaagtgttcatggaatacttggataagtttgttgtggttttcattgatgacattctgatatactcacaatccgaggaagaccatcagcaccatctccgtctggtgttgggaaagttgcgggaacatcaattgtatgccaaacttagcaagtgtgagttctggttgtccgaagtcaaattcttagggcacgtgatatctgctaaaggagttgctgtggaccccgaaacagtgaccgccgtcactgattggaagcaacccaagacagtcactcaagtccgcagtttcttaggtttggcaggatactaccggaggttcatcgagaacttctccaaaatcgctcgacccatgacacagttgttgaagaaagaagagaaatttgtgtggagcccgcaatgcgagaaggcgttcaaaactctcaaagaaaagctggtttcctcgccagtgttaatcttgccggatactcgcaaggatttcatggtgtattgtgatgcttcgcgccaaggattggggtgcgtgctcatgcaggatggtcatgtggtggcctatgcctcacgccagctacggcctcatgaaggcaactaccctacccatgatttggagttagctgcggtggttcatgctctaaaaatctggcggcactatctcattgggaatcgttgtgaaatatatactgatcataagagtttgaaatacatcttcactcagtccgacctgaatcttcggcaaaggagatggttagaactcatcaaggattatgatgtgggaattcactatcatcctggtaaggccaacgtggtcgccgacgctctaagtcgaaaaagccattgcaacactcttaacgtccgtggcattccactcgaacttagtcaacagatggaagccctgaacctaagcatagttggtcgcggattcttggctgcgttggaagccaagcctaccttgctcgatcaaatccgcgaggctcagaagaacgatccggacatgcatggactcctcaagaatatgaaacagggtaaagccgctggtttcacagaggatgaacacggaaccctatggaacggaaatcgagtatgcgttccagataacagagaacttaaacagctgatactacaggaagctcacgaaagtccttattccatccaccctggcagtacgaagatgtacttagacttgaaggagaaatactggtgggttagtatgaagcgggaaattgcagagttcgtggccctttgtgatgtgtgccagcgtgtcaaggcagagcaccaacgaccggccggacttctccaacctctccaagtacctgaatggaaatgggatgaaattgggatggatttcatcaccggacttccaaagacccaaggtggatatgattctatatgggtagttgtggatcgattaaccaaggtagctcgatttattcctgtgaagaccacctatggagggaacaaactagccgagctctacttcgctaggatcgtgagtctccatggcgttcccaagaaaatcgtatctgataggggaagccaattcacctctcacttttggaagaagcttcaagaagagctgggtacccggttaaacttcagcaccgcataccacccgcagacagatgggcagaccgagcgtctaaatcagatcctagaagatatgcttcgcgcgtgtgtcctggatttcgggaagacctgggataagagtctcccctatgccgagttctcctacaataacagctatcaagccagcatacaaatggcaccttatgaagcgttgtatgggcgcaaatgccggacaccgctcttgtgggatcaagttggggaaagccaagtgttcgggactgatatcctgagagaagctgaagctaaagtcagaaccattcgggataatctaaaggtggcacagtcccggcagaaaagttatgcagataaccgtcgccgtgacctggaattcgcagtggacgattttgtataccttcgggtcacgccattgcggggtgtacacaggtttcggacaaaagggaagctcgcacctcggtatgtgggtcctttccgtatcgttgcccgacgcagagaagtcgcttaccaattggagctgcccgcctccttgggcaacgtgcacgatgtgctccatgtgtcgcaactcaagaaatgccttcgagtgccatccgagcaagccgactcagagcaaattgaagttcgcgaagacttgacctacgtggagaggccagtgaaaatcctggacaccatggagcgcaggaccaggaaccgggtaatccatttttgcaaggtccagtggagcaaccacgtcgaagaagaagctacctgggagcgtgaagacgagctgaaggcagcccatcccgatctcttcgccagttcttctgaatctcggggtcgagattccttttaa

SEQ ID NO: 14217 - DNA, 5590 bp, Oryza sativa
  Clone ID: TFbOSC401478j.C1.o79.np
atggacgaagtcgggggtcgatggacatctctaggacaaatgaaggctacacgagctgcggcccggtagtcgagatgtcatggcacagggccggtgtcctgctgctaggggcttagttctgcctacctgtcccgggggttccggccgtaggtggagttgggtcgatgtacacctctgatcagagtataatctattcgaatagccgcgcccccggttatgggcaagccgagcaatgtacccaaatggccagcagcatcaaccgtcgtggtctggacctgactggcttcgttttggagctgcggggcatgtgcgttgtcctggggtatccgcatggagtggactaccaaggcaagcagctcccggagcaggagggtgacgatgcagagccccacgctgcttgggaggttactgcagtgatcctcactggctcacccgagaggacttcgttggcagtcaccgcgggtggagattccttctccgttgcttgccagaacgccgcactcctcgccatcggcactcttcaccagcgctacccggacgagttgcagcactcgccctaccgctaccaccctcgtcgcggaggagcccgtgactacgccaccttccgggatgctagcttggaggatgacgctaccatcgtgcacctggcgcgcatggtggaggcgtacgacgcggcccgtatcgacttccatcagatggtgcgtcgcgggttggtcgagaacaacatgaagatcctggagctgcgtcaggagaatctgcagctaaagatggacctagacacagtggatgcgcagctgcgtcagctcaagatcgcccagggagaggtctgtcgccccaagcgtcgccgcgtctgccgcagcctgaagatcaccgcccgcaagagtacctccaggcccgagcttgttcgtcagtccctggcgtggacctgcttcgtcgagacccctcgtgccgagtccgcccccgtggttcctcaggaggagggagcctccggcgttggcagcacggaggatgcgctgctgctcaccttccgtcctggctcgttgcagctgtagacgagcagttagtaggcttgcgtatggtgacaaccaggagaagtgctgctaccggtgaatgcagtcaccccgaaggcagcaaccacaacaaccatggcagcccacctccacctccttctccgcctccaccaccaccaccagacaccaacgccattctcacccaaatcctcgcctagcaggccaacatgatggctgctttcctccaccacatccaaaatccgccacaacataatgctccaccaccgcccccacaacactctaaactcgccgagttcctccgcatccgtccgcctaccttctctagctccaataaccccgtggatgcgttggattggttgcatgccgtggggaaaaagttagacaccgtgcagtgcagcgacgaggagaaagtcatcttcggcgcccaccaactgcaggggccagcatctctatggtgggaccatttccaggctacgcagccagaggggcagcctattacttgggcccgcttcaccgccgctttccggagaacccatgtgcctgccggagtcatggcccttaagaaaagggaattccgagagttgaagcaaggcaaccgctccgtgatggagtatttgcatgagtttaacaacctggcccggtacgccccggaggatgtacgggaagatgaggagaagcaagagaagttcttggcaggaatggaccctgagctgtccgtgcgtctggtctccggggactatccggatttccagcgtttggttgacaagagcatccgcttggaagccaagcacaaggaactggagtcgcacaagcgtcgcctggcgaatttccgcaatcaacagggggctaaccaaagggtccgctacaccaatccctatccagggtgatcgtcctcgcagcagcaacagcagcagcaacctcgctccgtgccccgacctcaattcgtggtgcgcgtcccacagccgcagcaacagcagagtcagcaagggactcgtgcgccccgtcctcctacgctagccgtgcagcctggtcaagtccgcagggacgttcaaggtcagcagcgtctgtgcttcaactgcttcgagcctgggcactttgcggataaatgcccaaagccgcggcgccagcaaggccaagcgcctccccgctccaacaacggtggtaaggatgtcattcggggtcgggtgaaccacgtgactgccgaggatgtgctgacgactccagacgtcatcgtgggtacgttcctcattcattccatccctgctaccattttgttcgactctggagcttcccactcgtttatatctatgccattcgtggggagaaatcagttgggggtagaaaggcttaggaaccctctgctcatcaccacccctggaggggttatgacagcaaagtaatatagccctgccgttcctatagaaattcagggaattccttttccctcggatctgattcttctagacaccaagaacttggatgtgatccttgggatgaattggttggctcaattccaaggagtagtggattgtgcaagacgcactgtcactctgtaccgagggccggaacaaccggttgttttctttgcacccccaacctctgtcggtagttcagaacttcatcagataggaatgtcagaaatccccatcgtcagagagttcggagacatgtttccggaagaactaccaggtatgccgccgaaacgagagattgagttccggatagatcttgctccaggaaccactccccagtacaagcgaccctaccgtatggcgtcaaatgaactggccgaagtcaagaaacagttgggagagttgaaagaaaaggggtatatacggccgagtacttccccctggggtgctcctgtgatttttgtggagaagaaagacatgacgaagaggatgtgcgttgacaacagagctctcaatgaagttactatcaaaaacaagtacccacttccccggatcgatgatctgttcgatcagcttaaaggtgccactgtattctccaagattgatcttcgttccggatatcaccaattgcgtattcgtgaagaagatatcccgaagaccgcattcaccacgcgatacggactgtatgaattcacggtgatgtcattcggtttaaccaatgctcctgccttcttcatgaacttaatgaacaaagtgttcatggaatacttggataagtttgttgtggttttcattgacgacattctggtgtactcacaatcagaggaagaccatcagcagcatctccgtctggtgttgggaaagttgcgggaacaccaattgtatgccaagctcagcaagtgtgagttctggttgtccgaagtcaagttcttagggcacatgatatctgctaaaggagttgctgtggatcccgaaacggtgaccgccgtcactgattggaagcaacccaagacagtcactcaggttcgcagctttttgggtttggcagaatactaccgaagattcatcaagaacttctccaaaatcgctcgacccatgacacagttgctgaagaaagaagaaaaatttgtgtggagcccgcaatgcgagaaggcattccaaactctcaaggaaaagctggtttcctcgccagtgttaatcttaccggatactcgcaaggacttcctggtgtactgtgacgcttcgcgccaaggattggggtgtgtgctcatgcaggaaggccacatggtagcctatgcctcccagcagcttcggccccatgaaggcaactaccctacccatgatttggagttggccgctgtggttcatgctctaaagatctggcgacactatctcattgggaatcgctgtgaaatatatactgatcataagagtttgaaatacatcttcactcagtcggatctgaatcttcggcagaggagatggttagaactcatcaaggattaggatgtgggaattcactatcatcctggtaagacaaacgtggtcgccgacgctctaagtcgaaaaagccgttgcaacactcttggcgtccgtggcattccaccaaaacttcatcaacagatggaagccctgaacctaagcatagttggtcgtggattcttggctacgctggaagccaagcctaccttgctcgatcaaatccgcgaggctcagaagaatgatccagatatgcatgggatcctcaagaatatgaaacagggtaaagccgctggtttcacagaggatgaacacggaaccctatggaacggaaatcgggtatgcgttccagacgacagggaacttaaacagttgatacttcaggaagctcacgaaagtccctattccatccatcctggcagcacgaagatgtacttggacttgaaagaaaaatattggtgggttagtatgaagcgggaaattgcagagttcgtggccctttatgatgtgtgccagcgtgtcaaggcagagcaccaacgaccggccggacttctccaacctctccaagtactagaatggaaatgggatgaaattgggatggatttcatcaccggacttccaaaaacccagggcggttatgattctatatgggtagtcgtggaccgactaaccaaggtagctcggttcattcccgtgaagaccacctatggagggaacaaactagctgaactttacttcgctaggatcgtgagtctccatggcgttcctaagaaaattgtatctgataggggaagccaattcacctctcacttctggaagaagctccaagaagagttgggtacccgattaaatttcagcaccgcgtatcacccgcagacagatggacagaccgagtgtctaaatcagatcctagaagatatgctccgtgcctgtattctagattttgggaagacctgggataagagtctcccctatgccgagttctcctacaataacagctaccaagccagcatacaaatggcaccctatgaagcgttgtatggccgcaaatgccggacaccgctattgtaggaccaagttggggaaagccaagtgttcgggactgatatcctgagagaagctgaagcgaaggtcagaaccattcgggataatctaaaggtggcacagtcccgacaggagagctatgcagataaccgacgccgtaacctggaatttgcagtggatgactttgtgtaccttagggtcacaccattgcggggtgtacacaggttccagacgaaagggaagctcgcatctcggtttgtgggtcctttccgtatcattgctcgacgcggagaagtcgcttaccagttggagctgcccgcctccttgggcaacgtgcatgatgtgttccatgtgtcgcaactcaagaaatgtcttcgagtgctatccgagcaggccgattcagagcaaattgaagttcgcgaaaacttgacctacatggagaggccagtgaaaatcctggacaccatggagcgcaggaccaggaaccgggtaatccgtttttgcaaggtccaatggagcaaccacgccgaggaagaagctacttgggagcgtgaaaacgagttgaaggcagcccatcccgatctcttcgccagttcttccgaatctcggggtcgagattccgtt

SEQ ID NO: 14218 - DNA, 1969 bp, Oryza sativa
  Clone ID: TFbOSC401486j.C1.o1.fg
atggccggcagcgtcacccgtcgtggtttggacatgactggcttcgtcctggagctgcggggcatgtgcgtggtcttggggtatccacatggagtggattaccaggccaggccgctcccggagcaggagggtgaggatgcagagcctcacgctgggtgggaggtcactgcagtgatcctctctggctctcccgagcggacttcgctggcagtcaccgcgggtggggattcttctcccgccgcttgccagaacgccgctctcctcgccatcggcaccctccaccagcgctacccggacgagttgcagcactcgccctatcgctaccaccctcgtcgcggaggagcccgcgacttcgccaccttccgagatgctagcttggaggatgacgctaccgtcgtgcatctggcacgcatggtggaggcatacgacgcggctcgtatcgacttccatcagatggtgcgtcgcgggatggttgagaacaacctgaagatcctggagctgcgtcaggagaacctgcagctcaagaaggacctcgacgcattggaggcgcagctgcaccagctcaagatcgcccagggagaggacagccgccccaagcgtcgccgcgtctgccgcagccagaagatcaccgcccggaagagcacctccaggcccgagcttgttcgtcagtccctggcgtggacttgcttcgtcgagacccctcgtgccgagcctgcgcccgtggttccccaggagggggaagcctccggcgttggtagcacggaggatgcgctgttgctcaccttccgccctggcccgtcgcagcggagaaatgttagcaccggtgaaggcaaccaacccgaaggcagcaaccccaacccccaaggcaatccacctccaccaccaccaccagacaccaacgccattctcacccaaatcctcgcccagcaagccaacatgatgaccgctttcctccaccacctccaaaatccgccacaacagaatgctccaccaccacctccacaacactctaagctcgccgagttcctccgcatccgcccacccaccttctctagctccaacaatcccgtggatgcgttggattggttgcatgccgtggggaagaagctggacactgtgcagtgcagtgatgaagagaaagtcatcttcgccgcccatcagctgcaggggcccgcatctctatggtgggaccatttccaggctacgcagccagaggggcaaccgattacttgggcccgcttcaccgccgctttccggagaacccatgtgcccgccggagtcgtggctcttaagaagagggagttccgggagttgaagcaaggcaaccgctccgtgatggagtatttgcacgagttcaacagtctggcccggtacgctccggaggatgtgcgggaagatgaggagaagcaagagaagttcttggcgggaatggaccctgagctgtccgttcgcctagtctctggggactatccggacttccaacgtctggtggacaagagcatccgcttggaggccaagcacaaggagctggagacgcacaagcgccgcttggcgaacttccgcaatcagcagggcgctaaccagagggtccgctacaccaatccctatccagggggatcctcctcgcagcagcaacaacagcagcagcaacctcgctccgcgcctcgacctcaattcgtggtgcgcgtcccacagccgcagcagcagcagagtcagcaagggactcgtgtagcccgtcctcctacgccagttgtgcagcccgttcaaggccgcagggacgctcaaggtcagcagcgtttgtgcttcaactgcttcgagcccgggcactttgcggataaatgcccaaagccaaggcgtcagcaaggccaagcgcctccccgctccaacaacggtggcaaggacgtcattcggggtcgtgtgaaccacgtgacggccgaggacgtgctgacaactccagacgtcatcgttg

SEQ ID NO: 14219 - DNA, 5415 bp, Oryza sativa
  Clone ID: TFbOSC401664j.C1.o29.fg
atggatgaagtcgggggtcgatggacattctccagggcaaatgaaggctacacgagctgcggcccgatggccggcagcgttacccgtcgtggtttgcacatgactggcttcgtcttggagctgcgaggcatgtgcgtggtcttggggtatccacatggagtggattaccaggccaggccgctcccggagcaggagggtgaggatgtagagcctcacgctggttgggaggtcactgcagtgatcctctccggctctcccgagcggacttcgctggcagtcaccgcgggtggagattccttccccgccgcttgccagaacgccgctctcctcgccatcggcacccttcaccagcgctacccggacgagttgcagcactcgccctaccgctaccacccccgtcgcggaggagccagcgaccacgccaccttccgagacgccagctcggaggatgacgctaccgtcgtgcatctggcacgcatggtggaggcgtacgacgcggctcgtatcgacttccaccagatggtgcgccgtggcatggtggagaacaacatgaagatcctggagctgcggcaggagaacctgcagctcaagaaggacctcgacgcagtggaggcgcagctgcaccagctcaagatcgcccagggagagatctgccgccccaagcgtcgccgcgtctgccgcagccagaagatcaccgcccgcaagagcacctccaggcccgagcttgttcgtcagtccctggcgtggacttgcttcgtcgagacccctcgtgccgagcctgcgcccgtggttccccaggagggggaggcctccggcgttggtagctcggagggtgcgctgttgctcaccttccgccctggcccgtcgcagcgctctccttctctgtttgctggttctgtgtggggttttcagatggtgacgaccaggagaaatgttaacaccggtgaaggcaaccaacccgaaggcagcaaccccaacccccaaggcaacccacctccaccaccaccaccagacaccaacgccattctcacccaaatcctcgcccagcaagccaacatgatgaatgctttcctccaccacctccaaaacccgccacaacagaatgctccaccaccacctccccaacactccaaactcgccgaattcctccgcatccgtccacccaccttctctagctccaacaaccctgtggatgcgttggattggttgcatgccgtggggaagaagctggacacggtgcagtgcagtggtgaagagaaagtcatcttcgccgcccatcagctgcaggggcccgcatctctctggtgggaccatttccaggctgcgcagcccgaggggcagccgattacttgggctcgcttcaccgccgctttccggagaacccatgtgcccgctggagtcgtggctcttaagaagagggaattccgggagttgaagcaaggcaaccgctccgtgatggagtatttgcatgagttcaacaatctagcccgttacgctccggaggatgtgcgggaagatgaggagaaacaagagaagttcctggcaggaatggaccctgagctgtccgttcgtctagtctctggggactatcctgattttcaacgtttggtggataagagcatccgcttggaagctaagcacaaggagctggagtcgcacaagcgccgcttggcgaacttccgcaatcagcagggtgctaaccagagggtccgctacaccaatccctatccagggggatcctcctcgcagcagcagcagcagcagcagcaacctcgcccagcgccccgacctcaattcgtggtgcgcgtcccacagccgcagcagcagcagaatcaacaagggactcgtgcgccccgtcctcctacgccagctgtgcagcccgttcaaagccgcagggacgcttcaggtccgcagcgtctgtgcttcaactgcttcgagcccgggcactttgcggataaatgcccaaagccaaggcgtcagcaaggccaagcgcctccccgctccaacaacggtggccaggacgtcatccgtggtcgtgtgaatcacgtgacggccgaggacgtgctgacaactcccgacgtcatcgttggtacgttcctcgtccattccatccctgctacaattttgttcgactctggagcttcccactcgtttatatctgtgccattcgtggggaaaaatcagttgggggtagaaaggcttagaaaccctctgctcatcaccacccctggaggggttatgacagcaaagtattatagccctgccgtccctatagaaattcaggggattccttttccctcggatctgattctgctagacaccaagaacttggatgtgattcttgggatgaattggttggcacaattccaaggagtagtggattgcgcgagacgcactgtcactctgtaccgaggaccagaacaaccggttgttttctttgcacctccaacctctgtcagaagttcagaactgcaccagataggtctgtcagaaatccccatagtcagagagttcggagacgtgtttccggaagaactacctggtatgccgcccaagcgagagattgagttccgaatagatcttgctccaggaaccactcctctgtacaagcgaccctaccgtatggcagcaaatgaactggccgaagtaaagaaacagttggaagagttgaaagaaaaggggtacatacgtccgagtacttccccatggggtgctcctgtgatttttgtagaaaagaaagacaagacgaaaaggatgtgtgtcgactacagagctctcaatgaagtcaccatcaaaaacaagtaccctcttccccggatcgatgatctgttcgaccagcttaaaggtgccactgtattctccaagattgatcttcgttccggatatcaccaattacgtattcgtgaagaagatattccgaagaccgccttcactacgcgatatggactgtatgaattcacggtgatgtcgttcggtttgaccaatgcacctgccttcttcatgaacttgatgaataaagtgttcatggaatacttggataagtttgttgtggttttcattgatgacattctgatatactcacaatcagaggaagaccatcagcaccatctccgtctggtgttgggaaagttgcgggaacatcaattgtatgccaagcttagcaagtgtgagttctggttgtccgaagtcaaattcttagggcacgtgatatctgctaaaggagttgttgtggatcccgaaacagtgaccgccgtcaccgattggaagcaacccaagacagtcactcagattcgcagtttcttaggtttggcaggatactaccggagattcatcgagaacttctccaaaattgctcgacccatgacacagttgttgaagaaagaagagaagtttgtgtggagcccgcaatgcgaaaaggcgttccaaactctcaaagaaaagctggtttcctcgccagtgttaatcttgccggatactcgcaaggatttcatggtgtattgtgatgcttcgcgccaaggattggggtgcgtgctcatgcaggacggtcatgtggtagcctatgcctcacgccaactacgacctcatgaaggcaactaccctacacatgacttggagttagcagcggtggttcatgctctaaaaatctggcggcactatctcattgggaaccgctgtgaaatatatactgatcataagagtttgaaatacatcttcactcagtcagatctgaaccttcggcaaaggagatggttagaactcatcaaagattatgatgtgggaatacactatcatcctggtaaggccaacgtggttgccgacgctctaagtcgaaagagccattgcaacaatcttaacgcccgtagcattccgcccgagcttagtcaacagatggaagccctgaacctaaacatagttggtcgtggatttttggccgcgttggaagccaagcccaccttgctcgatcaaatccgcgaggctcagaagaatgatccggacatgcatggactcctcaagaatatgaaacagggtaaagccgctggtttcacagaggatgaacacggaaccttatggaacggaaagcgggtatgcgttccagatagcagagaacttaaacagctgatacttcaggaagctcacgaaagtccttattccattcacccgggcagtaccaagatgtacttagacttgaaggagaaatactggtgggtcagcatgaagcgggaaattgcagagtttgtggctctatgtgatgtgtgccagcgtgtcaaggcagaacaccaacgaccggccggacttctccaacctctccaagtgccggaatggaaatgggatgaaattgggatggatttcatcaccggacttccaaaaacccaaggcggatatgattctatatgggtagttgtggatcgattaacaaaggtagctcgatttattcctgtgaagaccacttatggagggaacaaactagcggagctctacttcgctaggatcgtgagtctccatggcgttcccaagaaaatcgtatctgataggggaagccaattcacctctcacttttggaagaagctccaagaagagctgggtactcgattgaatttcagcaccgcctatcacccgcagacagatggacagaccgagcgtctgaatcagattctagaagatatgctccgcgcatgtgtcctagatttcgggaagacttgggataagagtctcccctatgccgagttctcctacaataacagctaccaagccaacatacaaatggcaccctatgaagcgttgtacgggcgcaaatgccggacaccgctattgtgggaccaagttggagaaagccaagtgttcgggactgatatcctgagagaagctgaagctaaagtcagaatcattcgggataatctaaaggtggcacagtcccggcagaaaagttatgcagataaccgtcgccgtgatctggaattcgcagtggatgactttgtgtatcttcgggtcacgccattgcgaggggtgcacaggtttcagacaaaagggaagctcgcacctcggtatgtgggtcccttccgtatcatcgctcgacgcggagaagttgcttaccagctggagttgcccgcctccttgggcaacgtgcatgatgtgttccatgtgtcgcaactcaagaaatgtcttcgagtgccatccgagcaggccgactcagagcaaattgaagttcgcgaagatttgacctatgtggagaagccagtgaaaatcctggacaccatggagcgcaggaccaggaaccgagtaatccgtttttgcaaggtccagtggagcaaccacgccgaagaagaagctacttgggagcgcgaagacgagctgaaggcagcccatcccgatctcttcgccagttcttccgaatctcggggtcgagattccgtttaa

SEQ ID NO: 14220 - DNA, 5415 bp, Oryza sativa
  Clone ID: TFbOSC401716j.C1.o49.fg
atggatgaagtcgggggtcgatggacattctccagggcaaatgaaggctacacgagctgcggcccgatggccggcagcgttacccgtcgtggtttggacatgactggcttcgtcttggagctgcggggcatgtgcgtggtcttggggtatccacatggagtggattaccaggccaggccgctcccggagcaggagggtgaggatgcagagcctcacgctggttgggaggtcactgcagtgatcctctccggctctcctgagtggacttcgctggcagtcactgcgggtggagattccttccccgccgcttgccagaacgccgctctcctcgccatcggcactcttcaccagcgctacccggacgagttgcagcactcgccctaccgctaccacccccgtcgcggaggagccagcgaccacgccaccttccgagacgccagctcggaggatgacgctaccgtcgtgcatctggcacgcatggtggaggcgtacgacgcggctcgtatcgacttccatcagatggtgcgtcgtggcatggtggagaacaacctgaagatcctggagctgcgccaagagaatctgcagctcaagaaggacctcgacgcgttggaggcgcagctgcatcagctcaaggtcgcccagggagagatctgccgccccaagcgtcgccgcgtctgccgcagccagaagatcaccgcccgcaagagcacctccaggcccgagcttgttcgtcagtccctggcgtggacttgcttcgtcgagacccctcgtgccgagcctgcgcccgtggttccccaggagggggaagcctccggcgttggtagctcggagggtgcgctgttgctcaccttccgccctggcccgtcgcagcgctctccttctctgtttgctggttctgtgtggggttttcagatggtgtcgaccaggagaaatgttaacaccggagaaggcaaccaacccgaaggcagcaaccccaacccccaaggcaacccacctccaccaccaccaccaccagacaccaacgccattctcacccaaatcctcgcccagcaagccaacatgatgaatgctttcctccaccacctccaaaatctgccacagcagaatgctcccccaccacctccccaacactccaaactcgccgaattcctccgcatccgtccacccaccttctctagctccaacaaccctgtggatgcgttggattggttgcatgccgtggggaagaagctagacacggtgcagtgcagcgacgaagagaaagtcatcttcgccgcccaccagctgcaggggcccgcatctctatggtgggaccacttccaggctacgcagccagaggggcaaccgattacttgggctcgcttcaccgccgctttccgaagaacccatgtgcccgctggagtcgtggctcttaagaaaagggaattccgggagttgaagcaaggcaaccgctccgtgatggagtatttgcatgagttcaacaatctagcccgttatgccccggaggatgtgcgggaagatgaggagaagcaagagaagttcttggcaggaatggaccctgagctgtctgttcgtctagtctctggggactacccggattttcaacggctggtggacaagagcatccgcttggaagccaagcacaaggaactggagtcgcacaagcgccgcttggcgaatttccgcaatcagcagggtgctaaccagagggtccgctacaccaatccctacccagggggatcctcctcgcaacagcagcagcagcagcaacctcgctccgcgccccgacctcaattcgtggtgcgcgtcccacagcagcaacagcagcagaatcagcaagggactcgtgcgccacgtcctcctacgccaactgtgcagcctgttcaaggtcgcagggacgctcaaggtcagcagcgtctgtgcttcaactgtttcgagcctgggcactttgcggataaatgcccaaagccaaggcgtcagcaaggccaagcgcctccccgctccaacaacggtggcaaggacgtcatccgtggtcgcgtgaatcacgtgacggccgaggacgtgctgacaactccagacgtcatcgttggtacgttcctcgttcattccatccctgctacaattttgttcgactctggagcctcccactcgtttatatctgtgccattcgtggggaaaaatcagttgggggtagaaaggcttagaaaccctctgctcatcaccacccctggaggggttatgacagcaaagtattatagccctgccgttcctatagaaattcagggaattccttttccctcggatctgattctgttagacacaaagaacttggatgtgattcttgggatgaattggttggcacaattccaaggagtagtggattgcgcgaggcgcactgtcactctgtaccgaggaccggaacagccggttgttttctttgcacctccaacctctgtcagaagttcagaactgcatcaggtaggtctgtcagaaatccccatagtcagagagttcggagacgtgtttccggaagaactacctggtatgccgcccaagcgagagattgagttccggatagatcttgctccaggaaccactcctctgtacaagcgaccctaccgtatggcagcaaatgagctagccgaagttaagaaacagttggaagaattgaaagaaaaggggtatatacgtccgagtacttccccatggggtgctcctgtgatttttgtagagaagaaagacaaaacgaaaaggatgtgcgttgactacagagctctcaatgaagtcaccatcaaaaacaagtaccctcttccccggatcgatgatctgttcgatcagcttaaaggtgccaccgtattctccaagattgatcttcgttccggatatcaccaactacgtattcgtgaagaagatattccgaagaccgcattcactacgcgatatggactgtatgaattcacggtgatgtcgttcggtttgaccaatgctcctgccttcttcatgaacttaatgaataaagtgttcatggaatacttggacaagtttgttgtggtttttatcgatgacattctgatatactcacaatcagaagaagaccatcagcaccatctccgtctggtgttgggaaagttgcgggaacatcaattgtatgccaagcttagcaagtgtgagttctggttgtccgaagtcaaattcttggggcacgtgatatctgctaaaggagttgctgtggatcccgaaacagtgaccgccgtcaccgattggaagcaacccaagacagtcactcagattcgcagtttcttgggtttggcaggatactatcggagattcatcgagaacttctccaaaatcgctcgacccatgacacagttgttgaagaaagaagagaagttcgtgtggagcccgcaatgcgagaaggcgttccaaactctcaaagaaaagctggtttcctcgccagtgttaatcttgccggatactcgcaaggatttcatggtgtactgtgatgcttcgcgccaaggattggggtgcgtgctcatgcaggacggtcatgtggtagcctatgcttcacgccagctacgacctcatgaaggcaactaccctacacatgacttggagttagcagcggtggttcatgctctaaaaatctggcggcactatctcattgggaaccgctgtgaaatatatactgatcacaagagcttgaaatacatcttcactcagtcagatctgaaccttcggcaaaggagatggttagaactcatcaaggattatgatgtgggaatacactatcatcctggtaaggccaacgtggttgccgacgctctaagtcgaaagagccattgcaacactctcaacgtccgaggcattccgcccgagcttaatcaacagatggaagccctgaacctaagcatagttggtcgcggattcttggccgcgttagaagcaaagcccaccttgctcgatcaaatccgcgaggctcagaagaatgatccggacatgcatggactcctcaagaatatgaaacaaggtaaagccgctggtttcacagaggatgaacacggaactctatggaacggaaagcgggtatgcgttccagatagcagagaacttaaacagctgatacttcgggaagctcacgaaagtccttattccattcacccgggcagtaccaagatgtacttagacttgaaggagaaatactggtgggtcagcatgaagcgggaaatcgcagagtttgtggctctatgtgatgtgtgccagcgtgtcaaggcagaacaccagcgaccggccggactcctccaacctctccaagtgccagaatggaaatgggatgaaattgggatggatttcatcaccggacttccaaaaacccaaggtggatatgattctatatgggtaatagtggatcgattaaccaaggtggctcgattcattcctgtgaagaccacctatggagggaataaactagcggagctctacttcgctaggatcgtgagtctccacggtgttcccaagaaaatcgtgtctgataggggaagccaattcacctctcacttttggaagaagctccaagaagagctgggtactcgattgaatttcagcaccgcatatcacccgcagacagatggacagaccgagcgtctgaatcagattctagaagatatgctccgcgcatgtgtcctagatttcgggaagacttgggataagagtctcccctatgccgagttctcctacaataacagctatcaagccagcatacaaatggcaccttatgaagcgttgtacgggcgcaaatgccggacaccgctattgtgggaccaagttggagaaagccaagtgttcgggactgacatcctaagagaagccgaagctaaagtcagaatcattcgggaaaatctaaaggtggcacagtcccggcagaaaagttatgcagataaccgtcgccgtgatctggaattcgcagtggatgattttgtgtatcttcgggtcacgccattgcgaggtgtgcacaggtttcagacaaaagggaagctcgcacctcggtatgtgggtcccttccgtatcactgctcgacgcggagaagttgcttaccagctggagttgcccgcctccttgggcaacgtgcatgatgtgttccatgtgtcgcaactcaagaaatgtcttcgagtgccatccgagcaggccgactcagagcaaattgaagttcgcgaagacttgacctatgtggagaggccagtgaaaatcctggacaccatggagcgcaggaccaggaaccgggtaatccgtttttgcaaggttcagtggagcaaccacgccgaagaagaagctacttgggagcgcgaagacgagctgaaggcagcccatcccggtctcttcgccagttcttccgaatctcggggtcgagattccgtttaa

SEQ ID NO: 14221 - DNA, 4779 bp, Oryza sativa
  Clone ID: TFbOSC401831j.C1.o2.fg
atgtcatggcacagggccggtgtcctgctgctaggggctcagtcctgcctgcctgtcccgggggttccggccgtaggtgggattgggtcggtactcttgtctatggctaggatgggttggaaactatgtcacgtcttccgtctgtataccgtggtgatggccggcagcgtcacccgtcgtggtttggacatgactggcttcgtcttggagctgcggggtatgtgcgtggtcttggggtatccacatggagtggactaccaggccaggccgcttccagagcaggagggtgaggatgcagagccccacgctggttgggaggttactgcagtgatcctctctggctctcccgagcggacttcgctggcagtcaccgcgggcggagattccttccccgccgcttgccaaaacgccgctctcctcgccatcggcactcttcaccagcgctacccggacgagttgcagcactcgccctaccgctaccaccctcgtcgcggaggagcccgcgactacgccaccttccgagatgctggctcggaggatgacgctcccatcgtgcacctggcgcgcatggtggaggcgtacgacgcggctcgtatcgatttccatcagatggtgcgccgtgggatggtcgagaacaacatgaagatcctggagctgcgtcaggagaacctgcagctcaagaaggacctagacgcagtggaggcgcagctgcatcagctcaagatcgcccagggagaggactgccgtcccaagcgccgccgtgtctgccgcagccagaagatcaccgcccgcaagagcacctccaggcccgagcttgttcgtcagtccctggcgtggacctgcttcgtcgagacccctcgtgccgagcccgcgcccgtggttccccaggagggggaagcctccggcgttggtagcacggaggatgcgttgttgctcaccttccgtcctgggccgtcgcagcgcgatgaggagaaagtcatcttcgccgcccaccagctgcaagggcccgcatctctatggtgggaccacttccaagctacgcagccagaggggcaacctatcacttgggctcgcttcaccgccgctttccggaggacccatgtgcccgctggagtcgtggctcttaagaagagggagttccgagagttgaagcaaggcaaccgctccgtgatggagtatttgcatgagttcaacaatctggcccgttatgccccagaggatgtgcgggaagatgaggagaagcaagagaagttcttggcaggaatggaccctgagctgtccgtccgtctagtctccggggactatccggatttccaacgtctggtggacaagagcatccgcttggaagccaagcacaaggaactggagtcgcacaagcgccgcttggcgaacttccgcaatcaacagggtgctaaccaaagggtccgctacaccaatccctacccagggggatcctcctcgcagccgcagcaacagcatcaacaacctcgctccgcgcctcgacctcaattcgtgcctggacaaggccgcagggacgcttcaggtccgcagcgtctgtgcttcaactgcttcgagcccgggcactttgcggataaatgcccaaagccgaggcgtcagcaaggccaagcgcctccccgctccaacaatggtgggaaggatgtcattcggggtcgtgtgaaccacgtgacggccgaggacgtgctgacaactccagacgtcatcgttgacaccaagaacttggatgtgatccttgggatgaattggttggctcaattccaaggagtagtggattgcgcgagacgcactgtcactctgtaccgagggccggaacaaccggttgtcttctttgcacccccaacctctgtcaaaagttcagaacttcatgagataggactgtcagaaatccccatagtcagagagttcggagacgtgtttccggaagaactacctggtatgccgcccaagcgagagattgagttccggatagatcttgctccaggaaccactcctctgtacaagcgaccctaccgtatggcagcaaatgaactggccgaagttaagaaacagttggaagagttgaaagaaaaggggtatatacgtccgagtacttctccctggggtgctcctgtgatttttgtagagaagaaagacaagacgaagaggatgtgcgttgactacagagctctcaatgaagtcaccatcaagaacaagtatcctcttccccggatcgatgatctattcgatcaactcaaaggtgccactgtattctccaagatcgatcttcgttctggatatcaccaattacgtattcgtgaagaagatattccgaagaccgcattcaccacgcgatacggactgtatgaattcacggtgatgtcgttcggtttaaccaatgcacctgccttcttcatcaacttaatgaacaaagtgttcatggaatacttggataagtttgttgtggttttcattgatgacattctgatatactcacaatcagaggaagaccatcagcaccatctccgcctggtgttgggaaagttgcgggaacatcaattgtatgccaagcttagcaagtgtgagttctggttgaccgaagtcaaattcttagggcatgtgatatctgctaaaggagttgctgtggaccccgaagcagtgaccgccgtcaccgattggaagcaacccaagacagtcacccaaattcgcagtttcttaggtttggcaggatactaccagaggttcatcgagaacttctccaaaatcgctcgacccatgacacaattgttgaagaaagaagagaaatttgtgtggagcccgcaatgcgagaaggcattccaaactctcaaggaaaagctggtttcctcgccggtgttaatcttgccggatacccgcaaggatttcatggtgtactgtgatgcttcgcgccaaggattggggtgcgtgctcatgcaggatggtcatgtagtggcctatgcctcccgccagctacgggctcatgagggcaactaccctacccatgatttggagttagcagcggtggttcatgctctaaaaatctggcggcactatctcattgggaatcgctgtgaaatatatactgatcataagagtttgaaatacatcttcacccagtcagatctgaatcttcggcaaaggagatggttagaactcatcaaggattatgatgtgggaattcactatcatcctggtaaggccaacgtggttgccgacgctctaagtcgaaaaagccattgccacgctcttaacgtccgtggcattccacccgaacttaatcaacagatggaagccctgaacctaagcatagttagtcgcggatttttggctgcgttggaagccaagcccaccttgctcgatcaaatccgcgaggctcagaagaatgatccggacatgcatggactcctcaagaatatgaaacagggtaaagccgctggtttcacagaggatgaacacggaaccttatggaacggaaatcgggaagctcacgaaagtccctattccattcacccgggcagtacgaagatgtacttagacttgaaggagaaatactggtgggttagcatgaagcgggaaattgcagagttcgtggccctatgtgatgtgtgccagcgtgtcaaggcagagcaccaacgaccggccggacttctccaacctctccaagtaccagaatggaaatgggatgaaattgggatggatttcatcaccggacttccaaaaacccaaggtggatatgattctatatgggtagttgtggatcgattaaccaaggtagctcgatttattcctgtgaagaccacctatggagggaacaaactagccgagctctacttcgctaggatcgtgagtctccatggcgttcccaagaaaatcgtatctgataggggaagccaattcacctctcacttttggaagaagctccaagaagagctgggtacccgattaaatttcagcaccgcgtatcacccgcagacagatggacagaccgagcgtctaaatcagatcctagaagatatgcttcgcgcatgtgttctagatttcgggaagacctgggataagagtctcccctatgccgagttctcctacaacaacagctaccaagccagcatacaaatggcaccttatgaagcgttgtatgggcgcaagtgccggacaccactattgtgggaccaagttggagaaagccaagtgttcgggactgatatcctgagagaagctgaagctaaagtcagaatcattcgggataatctaaaggtggcacagtcccggcagaaaagttatgcagataaccgtcgctgtgacctggaattcgcagtgggtgactttgtgtatcttcgagtcacgccattgcgaggtgtacacaggtttcagacaaagggaaagctcgcacctcggtatgtgggtcctttccgtatcattgcccggcgcggagaagtcgcttaccagctggagctgcccgcctccttgggcaacgtgcacgatgtgtttcatgcgtcgcaactcaagaaatgtctccgagtgccatccgagcaggccgactcagagcaaattgaagttcgcgaagacttgacctacgtggagaggccagtgaaaatcctggacaccatggagcgcaggaccaggaaccgggtaatccgtttttgcaaggtccagtggagcaaccacgccgaagaagaagctacctgggagcgtgaagatgagctgaaggcagcccatcccgatctcttcgccagtccctccgaatctcggggtcgagattccgtttaa

SEQ ID NO: 14222 - DNA, 3288 bp, Oryza sativa
  Clone ID: TFbOSC401832j.C1.o10.fg
atggtgatggccggcagcgtcacccgtcgtggtttggacatgactggcttcgtcttggagctgcggggcatgtgcgtggtcctggggtatccacatggagtggactaccaggccaggccgcttccggatcaggagggtgacgacgcggagccccacgctggttgggaggtcaccgcagtgatcctctctggctctcccgagcggacttcgctggcagtcaccgcgggtggagactccttccccgccgcttgccagaacgccgctctcctcgccatcggcacccttcaccagcgctacccggacgagttgcagcactcgccctaccgctaccaccctcgtcgcggaggagcctgcgactacgccaccttccgggatgctagctcggaggatgacgctaccatcgtgcacctggcgcgcatggtggaggcgtacgacgcggctcgtatcgacttccatcagatggtgcgtcgcgggatggtcaagagcaatctgatgatcctggagctgcgtcaggagaacctgcagctcaagaagaacctcgacgcagtggaggcgcagctgcatcagctcaagatcacccagggagagatctgccgccccaagcgtcgccgtgtctgccgcagccagaagatcaccgcccgcaagagcacctccaggcccgagcttgttcgtcagtccctggcgtggacttgcttcgtcgagacccctcgtgccgagcctgcgcccgtggttccccaggagggggaagccttcggcgttggtagcacggaggctccttctctgtttgctggttctgtgtggggttttcagatggtgacgaccaggagaaacgctgctaccggtgatggcaatcaacctgaaggcagcaaccacaaccaccaaggcaacccacctccacctcctcctcctccgccaccaccaccaccagacaccaacgccattctcacccaaatcctcgcccagcaagccaacatgatgaatgctttcctccaccacctccaaaatccgccacaacagaatgctccaccaccacctccccaacactctaaactcgccgagttcctccgcatccgcccacctaccttctctagctccaacaaccccgtggatgcgttggattggttgcatgccgtggggaagaagttagacacggtgcagtgcagcgatgaggagaaagtcgtcttcgccgcccaccagctgcagggacccgcatctctatggtgggaccatttccaggctacgcagccagaggggcaacctattacttgggctcgcttcaccgccgctttccgaaggacccatgtgcccgctggagtcgtggcacttaagaaaagagaattccgagagttgaagcaaggcaaccgctccgtgatggagtatttgcacgagttcaacaacttggcccgttacgccccagaggatgtgcgggaagatgaggagaagcaagagaagttcttggcaggaatggaccctgagctgtccgtccgtctagtctctggggattatccggattttcaacgactggtggacaagagcatccgcttggaagccaagcacaaggaactggagtcgcacaagcgccgcttggcaaatttccgcaatcagcagggtgctaaccagagggtccgctacaccaatccctatccagggggatcctcctcgcagcagcaacaacagcagcagcaacctcgctccgcgcctcgacctcaattcgtgtctggtcaaggccgcagggacgcttcaggtccgcagcgtctgtgcttcaactgcttcgagcccgggcactttgcggataaatgcccaaagccaaggcgtcagcaaggccaagcgcctccccgctccaacaacggcgggaaggatgtcattcggggtcgtgtgaatcacgtgacggccgaggacgtgctgacaactccggacgtcatcgttggtacgttcctcgtgcattccatccctgctaccattttgttcgactctggagcttcccactcgtttatatctgtgccgttcgtggggagaaatcagttgggggtagaaaggcttagaaaccctctgctcatcaccacccctggaggggttatgacagcaaagtattatagccctgccgtccctatagaaattcaggggattccttttccctcggatctgattctgctagacaccaagaatttggatgtgattcttgggatgaattggttggctcaattccaaggagtagtggattgcgcgagacgcactgttactctgtaccgagggccggaacaaccagttgttttctttgcacccccaaccaaggtagctcgatttattcctgtgaagaccacctatggagggaacaaactagcggagctctacttcgctaggatcgtgagtctccatggcgttcccaagaaaatcgtatctgataggggaagccaattcacctctcacttttggaagaagctccaagaagagctgggtactcgattaaatttcagcaccgcctatcacccgcagacagatgggcagaccgagcgtctaaatcagatcctagaagacatgcttcgtgcatgtgtactagatttcgggaagacctgggataagagtctcccctatgccgagttctcctacaataacagctatcaagccagcatacaaatggcaccttatgaagcgttgtacgggcgcaaatggcggacaccgctattgtgggaccaagttggagaaagccaagtgttcgggactgatatcctgagagaagctgaagctaaagtcagaatcattcgggataatctaaaggtggcacagtcccggcagaaaagttatgcagataaccgtcgccgtgacttggaattcgcagtggatgactttgtgtaccttcgggtcacgccattgcgaggtgtacacaggtttcagacgaaagggaagctcgcacctcggtatgtgggtcctttccgtatcgttgctcgacgcggagaagtcgcttaccagttggagctgcccgcctccttgggcaacgtgcatgatgtgttccatgtgtcgcaactcaagaaatgccttcgagtgccatccgagcaggccgactcagagcaaattgaagttcgtgaagatttgacctacgtggagaggccagtgaaaatcctggacaccatggagcgcaggaccaggaaccgggtaatccgtttttgcaaggtccagtggagcaatcacgccgaagaagaagctacttgggagcgtgaagacgagctgaaggcagcccatcccggtctcttcgccagttcttccgaatctcggggtcgagattccgtttaa

SEQ ID NO: 14223 - DNA, 2427 bp, Oryza sativa
  Clone ID: TFbOSC401838j.C1.o1.fg
atggtgacgaccaggagaaatgcggttaccggtgatggcaaccaacccgaaggcagcaaccacaaccaccaaggcaacccacctccacctcctcctcctcctccaccaccaccaccagacaccaacgccattctcacccaaatcctcgcccagcaggccaacatgatgactgctttcctccaccacctccaaaatccgccacaacagaatgccccaccaccacctccccaacactctaaactcgccgagttcctccgcatccgcccacctaccttctctagctccaacaaccccgtggatgcgttggattggttgcatgccgtggggaaaaagctagacactgtgcagtgcagcgatgaggagaaagtcatcttcgccgcccatcagctgcagggacccgcatctctatggtgggaccatttccaggctacgcagccagagggacagcctattacttgggctcgcttcaccgccgcttttcggaggacccatgtgcccgctggagtcgtggcccttaagaaaagggaattccgagagttgaagcaaggcaaccgctccgtgatggagtatttgcatgagttcaacaacctggcccgttacgctccggaggatgtgcgggaagatgaggagaagcaagagaagttcctggcaggaatggaccccgagctgtccgtccgtctagtctctggggattatccggatttccaacgtctggtggacaagagcatccgcttggaagccaagcacaaggaactggagtcgcacaagcgccgcttggcgaatttccgcaaccaacagggtgctaaccaaagggtccgctacaccaatccctatccagggggatcctcctcgcagcagcaacagcagcagcagcaacctcgctccgcgcctcgacctcaattcgtggtgcgcgtcccacagccgcagcaacagcagaatcaacaagggactcgtgcgccccgtcctcctacgcaaactgtgcagcctggtcaaggccgcagggacgctcaaggtcagcagcgtctgtgcttcaactgcttcgagcccgggcactttgcggataaatgcccgaagccaaggcgtcagcaaggccaagcgcctccccgccccaacaacggtgggaaggatgtcattcggggtcgtgtgaaccacgtgatggccgaggacgtgctgacaactccagacgtcatcgttgtgaccgccgtcaccgattggaagcaacccaagacagttactcaagtccgcagtttcttaggtttggcaggatactaccggagcgtgtcaaggcagagcaccaacgaccggccggacttctccaacctctccaagtaccagaatggaaatgggatgaaattgggatggatttcatcaccggacttccaaaaacccaaggtagctcgatttattcctgtgaagaccacctatggagggaacaagctagccgagctctacttcgctaggatcgcgggcccgcccgccaccctcgctgacaggtggggtccacctgtcatcccctacctcgcgccgctcccgccgcccgcccgtgccctagcgccgccgccgccgccgaatccgccgcatcccgccgtccccgcgcgccataaagagggggaaatcactccccgcgattccctctccctttccccccgtttttccctctctctctccctcggattcgctcggatttactcccgcaatcctcgccggcgcaatcaatggcggccgagatttccgcggccgattccttcctctccggccgccctctctccctcccgacgctatataatcgttcctcgtgcttcgctcctccgtttccgccactcgccgctcactctccccgtcggattcgtgcccgcgccgtcttcctctctctccgccgtcgccgccgagctccggttcgccgtcgtcgtcgctccggacctcctcccgactcggcgtcacctccttcggcttcgccgcgtcctcgtcgacctcgtccgctcctccgtttcggtcgccgactgtcggagcgccgccgtcctcgtcgatccgaaccgcgccgccgccttcctccgctccgggttgtcgtttccgccgtcatcgtcgacccggggtgagccgaggaccgttgtttcacttcccccttccctcccctctctcggccgccgctccgtcgcgccggaggtcgccgccggcgaccatcggggcgcgggcgcgccgcctcccgtcggccgtgccggcgaggccgccttcgggcgcgccccgcggctgccaggtgggcccggccgtcagccgcccgcgcccgcgggtgcggctgacgcgtgggacccacggcgccggtcggcggcagccgcgtgcacccggtccaccgtggaccgagaggctggcgcgtgggccccactcccgtggacccggtccgcgcgccctctctcccggctgacgcaataa

SEQ ID NO: 14224 - DNA, 3735 bp, Oryza sativa
  Clone ID: TFbOSC401845j.C1.o3.gm
atggttatgccgatggtgacgaccaggagaagtgctgccaccggtgatggcaaccaacccgaaggcagcaaccaccaccaccagggcagcccacctccacctccaccaccaccaccagacaccaacgccattctcacccaaatcctcgcccagcaggccaacatgatgactgctttcctccaccacctccaaaatccgccacaacataatgctccaccaccacctccccaacactctaaactcgccgagttcctccgcatccgcccacctaccttctctagctccaacaaccccgtggatgcgttggattggttgcatgtcgtggggaaaaagctagacactgtgcagtgcagcgatgaggagaaagtcatcttcgccgcccaccagctgcaggggcccgcatctttatggtgggaccatttccaggctacgcagccagaggggcaacctattacttgggctcgcttcaccgccgctttccggagaacccatgtgcccgccggagtcatggcccttaagaaaagggaattccgagagttgaagcaaggcaaccgctccgtgatggagtatttgcatgagttcaacaacctggcccgttacgccccggaggatgtgcgggaagatgaggagaagcaagagaagttcttggcaggaatggaccctgagctgtccgtccgtctagtctccggggactatccggatttccaacgtctggtggacaagagcatccgcttggaagccaagcacaaggaactggagtcgcacaagcgccgcttggcaaatttccgcaatcaacagggtgctaaccaaagggtccgctacaccaatccctatccagggggatcctcctcgcagcagcaacaacagcagcagcaacctcgctccgcgcctcgacctcaattcgtggtgcgcgtcccacagccgcagcagcagcagaatcaacaagggactcgtgcgccccgtcctcctacgccaactgtgcagcctggtcaaggccgcagggacgctcaaggtccgcagcgtctgtgcttcaactgcttcgagcccgggcactttgcggataaatgcccaaagccgaggcgtcagcaaggccaagcgcctccccgctccaacaacggtgggaaggatgtcattcggggtcgggtgaaccacgtgacggccgaggacgtgctgacaactccagacgtcatcgttggtacgttcctcattcattccatccctgctaccattctgttcgactctggagcttcccactcgtttatatctgtgccattcgtggggagaaatcagttgggggtagaaaggcttaggaaccctctgctcatcaccacccctggaggggttatgacagcaaagtattatagccctgccgtccccatagaaattcaggggattccttttccctcggatctgattctgctagacaccaagaacttggatataggactgttagaaatccccatcgtcagagagttcggagacgtgtttccggaagaactacccgaggaagaccatcagcaccatctccgtctggtattgggaaagttgcgggaacatcaattgtatgccaaacttagcaagtgtgagttctggttgtccgaagtcaaattcttagggcacgtgatatctgctaaaggagttgctgtggaccccgaaacagtgaccgccgtcactgattggaagcaacccaagacagtcactcaagtccgcagtttcttaggtttggcaggatactaccggaggttcatcgagaacttctccaaaatcgctcgacccatgacacagttgttgaagaaagaagagaaatttgtgtggaggccgcaatgcgagaaggcgttcaaaactctcaaagaaaggctggatggtcatgtggtggcctatgcctcacgccagctacggcctcatgaaggcaactaccctacccatgatttggagttagctgcggtggttcatgctctaaaaatctggcggcactatctcattgggaatcgctgtgaaatatatactgatcataagagtttgaaatacatcttcactcagtcggacctgaatcttcggcaaaggagatggttagaactcatcaaggattacgatgtgggaattcactatcatcctggtaaggccaacgtggtcgctgacgccctaagtcgaaagagccattgcaacactcttaacgtccgcggcattccacccgaacttaatcaacagatggaagccctgaacctaagcatagttggtcgcggattcttggctgcgttggaagccaagcctaccttgctcgatcgaatccgcgaggctcagaagaacgatccggacatgcatggactcctcaagaatatgaaacagggtaaagccgctggtttcacagaggatgaacacggaaccctatggaacggaaatcgagtatgcgttccagataacagagaacttaaacagctgatacttcaggaagcccacgaaagtccttattccatccaccctggcagtacgaagatgtacttagacttgaaggagaaatactggtgggttagtatgaagcgggaaattgcagagttcgtggccctttgtgatgtgtgccagcgtgtcaaggcagagcaccaacgaccggccggacttctccaacctctccaagtacctgaatggaaatgggatgaaattgggatggattttatcaccggacttccaaagacccaaggtggatatgattctatatgggtagtggtggatcgattaaccaaggtagctcgattcattcctgtgaagaccacctatggagggaacaaactagccgagctctacttcgctaggatcgtgagtctccatggcgttcccaagaaaatcgtatctgataggggaagccaattcacctctcacttttggaagaagctccaagaagagctgggtacccgattaaacttcagcaccgcataccacccgcagacagatgggcagaccgagcgtctaaatcagatcctagaagatatgcttcgcgcatgtgtcctggatttcgggaagacctgggataagagtctcccctatgccgagttctcctacaataacagctatcaagccagcatacaaatggcaccttatgaagcgttgtatgggcgcaaatgccggacaccgctcttgtgggatcaagttggggaaagccaagtgttcgggactgatatcttgagagaagctgaagctaaagtcagaaccattcgggataatctaaaggtggcacagtcccggcagaaaagttatgcagataaccgtcgccgtaacctggaattcgcagtggacgattttgtgtaccttcgggtcacgccattgcggggtgtacacaggtttcagacaaaagggaagctcgcacctcggtatgtgggtcctttccgtatcgttgcccgacgcggagaagtcgcttaccaattggagctgcccgcctccttgggcaacgtgcatgatgtgttccatgtgtcgcaactcaagaaatgccttcgagtgccatccgagcaggccgactcagagcaaattgaagttcgcgaagacttgacctacgtggagaggccagtgaaaatcctggacaccatggagcgcaggaccaggaaccgggtaatccgtttttgcaaggtccagtggagcaaccacgccgaagaagaagctacctgggagcgtgaaaacgagctgaaggcagcccatcctgatctcttcgccagttcttccgaatctcggggtcgagattccgtttaa

SEQ ID NO: 14225 - DNA, 5406 bp, Oryza sativa
  Clone ID: TFbOSC401848j.C1.o1.fg
atgtcatggcacagggccggtgtcctgctgctaggggctcagtcctgcctgcctgtcccgggggttccggccgtaggtgggattgggtcggtactcttgtctatggctaggatgggttggaaactatgtcacgtcttccgtccgtataccgtggtgatggccggcagcatcagccgtcgtggtctggacctgactggtttcgtcttggagctgcggggcatgtgcgttgtcctggggtatccgcatggagtggactaccagggcaggccgctcccggagcaggagggtgacgacgcagagccccacgctgcttgggaggtcactacagtgatcctcactggctcacccgagaggacttcgttggcagtcaccgcgggtggagattctttctccgccgcttgccagaacgccgctctcctcgccatcggcactcttcaccagcgctacccggacgagttgcagcactcgccctaccgctaccaccctcgtcgcggaggagcccgcgactacgccaccttccgggatgctagctcggaggatgacgctaccatcatgcacctggcgcgcatggtggaggcgtacgacgcggctcgtatcgacttccatcagatggtgcgccgtgggatggtcgagaacaacatgaagatcctggaactgcgtcaggagaatctgcagctgaagaaggacctagacacagtggaggcgcagctgcatcagctcaagatcgcccagggagaggtctgtcgccccaagcgccgccgcgtctgccgcagccagaagatcaccgcccgcaagagcacctccaggcccgagcttgttcgtcagtccctggcgtggacctgcttcgtggagacccctcgtgccgagcccgcgcctgtggttccccaggagggggaagccttcggcgttggtagcacggaggatgcgctgttgctcaccttccgtcctggcccgtcgcagcggagaagtgctaataccggtgatggcaaccaacctgagggcagcaaccacaacaaccatggcagcccacctccacctcctcctccgcctccaccaccaccaccagacaccaacgccattctcacccaaatcctcgcccagcaggccaacatgatggctgctttcctccaccacatccaaaatccgccacaacataatgctccaccaccacccccacaacactctaaactcgccgagttcctccgcatccgtccaccaaccttctctagctccaataaccccgtggatgcgttggattggttgcatgccgtggggaaaaagctagacactgtgcagtgcagcgatgaggagaaagctacgcagccagaggggcagcctattacttgggcccgcttcaccgccgctttccggaggacccatgtgcccgccggagtcatggcccttaagaaaagggaattccgagagttgaagcaaggcaaccgctccgtgatggagtatttgcatgagttcaacaacctggcccggtacgccccggaggatgtacgggaagatgaggaaaagcaggagaagttcttggcaggaatggaccctgagttgtccgtgcgtctagtctccggtgactatccggatttccaacgtctggtggacaagagcatccgcttggaagccaagcacaaggaactggagtcgcacaagcgccgcttggcaaatttccgcaatcaacagggtgctaaccaaagggtccgctacaccaatccctatccagggggatcgtcctcgcagcagcaacagcagcaacaacctcgctccgcaccccgacctcaattcatggtgcgcgtcccacagccgcagcaacagcagagtcaacaagggactcgtgcgccccgtcctcctatgccagccgtgcagcctggtcaaggccgcagggacgttcaaggtccgcagcgtctatgcttcaactgcttcgagcccgggcactttgcggataaatgcccgaagccgaggcgccagcaaggccaagcgcctccccgctccaacaacggtggtaaggatgtcattcggggtcgtgtgaaccacgtgacggccgaggacgtgctgacaactccagacgtcatcgttggtacgttcctcattcattccatccctgctaccattttgttcgactctggagcttcccactcgtttatatctgtgccattcgtggggagaaatcagttgggggtagaaaggcttaggaaccctctgctcatcaccacccctggaggggttatgacagcaaagtattatagtcctgccgtccctatagaaattcaggggattccttttccctcggatctgattcttctagacaccaagaacttggatgtgatccttgggatgaattggttggctcaattccaaggagtagtggattgtgcaagacgcactgtcactctgtaccgagagccggaacaaccggttgttttctttgcacccccaacctctgtcagtagtttagaactttatcagataggactgtcagaaatccccatcgtcagggagttcggagatgtgtttccggaagaactacccggtatgccgcccaagcgagagattgagttccggatagatcttgctccaggaaccactcctctgtacaagcgaccctaccgtatggcagcaaatgaactggccgaagttaagaaacagttggaagagttgaaagaaaaggggtatatacgtccgagtacttccccctggggtgctcctgtgatttttgtggagaagaaagacaagacgaagaggatgtgcgttgactacagagctctcaatgaagtcaccatcaaaaacaagtaccctcttccccggatcgatgatctgttcgatcagcttaaaggtgccactgtattctccaagattgatcttcgttccggatatcaccaattacgtattcgtgaagaagatattcctaagaccgcattcaccacgcgatacggactgtatgaattcacggtaatgtcgttcggtttaaccaatgcacctgccttcttcatgaacttaatgaacaaagtgttcatggaatacttggataggtttgttgtggtgttcattgatgacattctggtgtactcacaatcagaggaagaccatcagcaccatctccgtctggtgttgggaaagttgcgggaacatcaattgtatgccaaacttagcaagtgtgagttctggttgtctgaagtcaaattcttagggcacgtgatatctgctaaaggagttgctgtggaccccgaaacagtgaccgctgtcactgattggaagcaacccaagacagtcactcaaattcgcagtttcttaggtttggcgggatactaccggaggttcatcgagaacttctccaaaatcgctcgacccatgacacagttgttgaagaaagaagagaaatttgtgtggagcccgcaatgcgagaaggcgttccaaactctcaaagaaaagctggtttcctcgccggtgttaatcttgccggatactcgcaaggacttcatggtgtattgtgacgcttcgcgccaaggattggggtgcgtgctcatgcaggacggtcatgtggtggcctatgcctcacgccagctacggcctcatgaaggcaactaccctacccatgatttggagttagccgcggtggttcatgctctaaaaatctggcggcactatctcattgggaatcgctgtgaaatatatactgatcataagagtttgaaatacatcttcacccagtcggatctgaatcttcggcagaggagatggttagaactcatcaaggattatgatgtgggaattcactatcatcctggtaaggccaacgtggtcgccgacgctctaagtcgaaaaagccattacaacactcttgacgtccgtggcattccacccgaacttagtcaacagatggaagccctgaacctaagcatagttggtcgtggattcttggctacgctggaagccaagcccaccttgctcgatcaaatccgcgaggctcagaagaacgacccagacatgcatggactcctcaagaatatgaaacagggtaaagccgctggtttcacagaggatgaacatggaaccctatggaacggaaatcggatatgcgttccagataacagagaacttaaacagctgatacttcaggaagctcatgaaagtccttattccatccaccctggcagtatgaagatgtacttagacttgaaggagaaatactggtgggttagtatgaagcgggaaattgcagagttcgtggccctttgtgatgtgtgccagcgtgtcaaggcagagcaccaacgaccggccggacttctccaacctctccaagtaccagaatggaaatgggatgaaattgggatggatttcatcaccggacttccaaaaacccaaggtggatatgattctatatgggtagttgtggatcgattaaccaaggtagctcgatttattcctgtgaagaccacctatggaggaaacaaactagccgagctctacttcgctaggattgtgagtctccatggcgttcctaagaaaatcgtatctgataggggaagccaattcacctctcacttttggaagaagctccaagaagagctgggtacccgattaaatttcagcaccgcgtatcacccgcagacggatggacagaccgagcgtctaaatcagatcctagaagatatgcttcgcgcatgtgtcctagatttcgggaagacctgggataagagtctcccctatgccgagttctcctacaataacagctaccaagccagtatacaaatggcaccttatgaagcgttgtatgggcgcaaatgccggacaccgctcttgtgggaccaagttggggaaagtcaagtgttcaggactgatatcctgagagaagctgaagcgaaggtcagaaccattcgggataatctaaaggtggcacagtcccggcagaaaagttatgcagataaccgtcgccgtaacctggaattcgcagtggacgattttgtgtaccttcgggtcacgccattgcgaggtgtacacaggtttcagacaaaagggaagctcgcacctcggttcatgggtcctttccgtatcattgctcggcgcggagaagtcgcttaccagttggagctgcccgcctccttgggcaacgtgcatgatgtgttccatgtgtcgcaactcaagaaatgtcttcgagtgccatccgagcaggccgactcagagcaaattgaagttcgcgaagacttgacctacgtggagaggccagtgaaaatcctggacaccatggagcgcaggaccaggaaccgggtaatccgtttttgcaaggtccaatggagcaaccacgccgaggaagaagctacctgggagcgtgaagacgagctgaaagcagcccatcccgatctcttcgcaagttcttccgaatctcggggtcgagattccgtttaa

SEQ ID NO: 14226 - DNA, 5412 bp, Oryza sativa
  Clone ID: TFbOSC401855j.C1.o4.fg
atggatgaagtcgggggtcgatggacattctccagggcaaatgaaggctacacgagctgcggcccgatggccggcagcgttacccgtcgtggtttggacatgactggcttcgtcttggagttgcggggcatgtgcgtggttttgggatatccacatggagtggattaccaggccaggccgctcccggagcaggagggtgaggatgcagagcctcacgctggttgggaggtcactgcagtgatcctctccggctctcccgagcggacttcgctggcagtcaccgcgggtggggactccttccccgccgcttgccagaacgccgctctcctcgccatcggcactcttcaccagcgctacccggacgagttgcagcactcgccctaccgctaccaccctcgtcgcggaggagcccgcgacttcgccaccttccgagacgccagctcggaggatgacgctaccgtcgtgcatctggcacgcatggtggaggcgtacgacgcggctcgtatcgacttccaccagatggtgcgtcgtggcatggtggagaacaacatgaagatcctggagctgcgtcaggagaatctgcagctcaagaaggacctcgacgcgttggagacgcagcttcatcagctcaagatcgcccagggagagatcagccgtcccaagcgtcgccgcgtctgccgcagccagaagatcaccgcccgcaagagcacctccaggcccgagcttgttcgtcagtccctggcgtggacctgcttcgtcgagacccctcgtgccgagcctgcgcccgtggttccccaggagggggaagcctccggcgttggtagctcggagggtgcgctgttgctcaccttccgtcctggcccgtcgcagtgctctccttctctgtttgctggttctgtgtggggtttccagatggtgacgaccaggagaaatgttaacaccggtgaaggcaaccaacccgagggcagcaaccccaacccccaaggcaatccacctccaccaccaccaccagacaccaacgccattctcacccaaatcctcgcccaacaagccaacatgatgaatgctttcctccaccacctccaaaatccgccacaacagaatgctccaccaccacctccccaacactctaaactcgccgagttcctccgcatccgcccacctaccttctccagctccaacaaccccgtggatgcgttggattggttgcatgccgtggggaagaagttagacacggtgcagtgcagtgatgaggagaaagtcatcttcgccgcccaccagctgcaggggcccgcatctctatggtgggaccatttccaggccacgcagccagaagggcaacctattacttggactcgcttcaccgccgctttccggaaaacccatgtgcccgccggagtcgtggctcttaagaaaagggaattccgggagttgaagcaaggcaaccgctccgtgatggagtatttgcatgagttcaacaatctagcccgttatgccccggaggatgtgcgggaagatgaggagaagcaagagaagttcttggcaggaatggaccccgagctgtccgttcgtctagtctctggggactatccggatttccaacgtctggtggacaagagcatccgcttggaggccaagcacaaggaactggagtcgcacaagcgccgcttggcgaatttccgcaatcagcagggtgctaaccagagggtccgctacaccaatccctacccagggggatcctcctcgcagcagcagcaacagcagcaacctcgctcagcgccccgacctcaattcgtggtgcgcgtcccacagcagcaacagcagcagaatcagcaagggactcgtgcaccccgtcctcctacgccagctgtgcagcccgttcaaggccgcagggacgctcaaggtccgcagcgtctgtgcttcaactgcttcgagcccggacactttgcggataaatgcccaaagccaaggcgtcagcaaggccaagcgcctccccgctccaacaacggtggcaaggacgtcatccgtggtcgtgtgaatcacgtgacggccgaggacgtgctgacaactccagacgtcatcgttggtacgttcctcgtccaatccatccctgctactattttgttcgactctggagcttcccactcgtttatatctgtgccattcgtggggagaaatcagttgggggtagaaaggcttagaaaccctctgctcatcaccacccctggaggggttatgacagcaaagtattatagccctgccgttcctatagaaattcaggggattccttttccctcggatctgattctgctagacacaaagaacttggatgtgatccttgggatgaattggttggctcaattccaaggagtagtggattgcgcgaggcgcactgtcactctgtaccgagggccagaacaaccggttgttttctttgcacctccaaccgctgtcagaagttcagaacttcatcagatagaactgtcagaaatccccatagtcagagagttcggagatgtgtttccggaagaactacctggtatgccgcccaagcgagagattgagttccggatagatcttgctccaggaaccactcctctgtacaagcgaccctaccgtatggcagcaaatgaactggccgaagtaaagaaacagttggaagagttgaaagaaaaggggtacatacgtccgagtacttccccatggggtgctcctgtgatttttgtagagaagaaagacaagacgaagaggatgtgcgtcgactacagagctctcaatgaagtcaccatcaaaatcaagtaccctcttccccggatcgatgatctgttcgatcagcttaaaggtgccaccgtattctccaagattgatcttcgttccggatatcaccaattacgtattcgtgaagaagatattccgaagaccgcattcactacgcgatatggactgtatgaattcacggtgatgtcgttcggcttaaccaatgctcctgccttcttcatgaacttgatgaacaaagtgttcatggaatacttggataagttcgttgtggttttcattgatgacattctgatatactcacaatcagaggaagaccatcagcaccatctccgtctggtgttgggaaagttgcgggaacatcaattgtatgccaagcttagcaagtgtgagttctggttgtccgaagtcaaattcttggggcacgtgatatctgctaaaggagttgctgtggaccccgaaacagtgaccgccgtcaccgattggaagcaacccaagacagtcactcagattcgcagtttcttgggtttggcaggatactatcggagattcatcgagaacttctccaaaatcgctcgacccatgacacagttgttgaagaaagaagagaagtttgtgtggagcccgcaatgcgagaaggcgttccaaactctcaaggaaaagctggtttcctcgccagtgttaatcttgccggatactcgcaaggagttcatggtgtattgtgatgcttcgcgccaaggattggggtgcgtgctcatgcaggacggtcatgtggtagcctatgcctcacgtcagctacgacctcatgaaggcaactaccctacgcatgacttggagttagcagcggtggttcatgctctaaaaatctggcggcactatctcattgggaaccgctgtgaaatatatactgatcataagagtttgaaatacatcttcacccagtcggatctgaatcttcggcaaaggagatggttagaactcatcaaggattatgatgtgggaattcactatcaccctggtaaggccaatgtggttgccgacgctctaagtcgaaagagccactgcaacactctcaatgtccgaggcattccacccgagcttaatcaacagatggaagccctgaacctaagcatagttggtcgcggattcttggctgcgttagaagccaagcccaccttgctcgatcaaatccgcgaggctcagaagaatgatccggacatgcatggactcctcaagaatatgaaacagggtaaagccgctggtttcacagaggatgaacacggaaccttatggaacggaaagcgggtatgcgttccagatagcagagaacttaaacagctgatacttcaggaagctcacgaaagtccttattccattcacccgggcagtaccaagatgtacttagacttgaaggagaaatactggtgggtcagcatgaagcgggaaattgcagagtttgtggccctatgtgatgtgtgccagcgtgtcaaggcagaacaccaacgaccggccggacttctccaacctctccaagtgccggaatggaaatgggatgaaattgggatggatttcatcaccggccttccaaaaacccaaggtgggtatgattctatatgggtaatagtggatcgattaaccaaggtagctcgatttattcctgtgaagaccacctatggagggaacaaactagcggagctctacttcgctaggatcgtgagtctccatggcattcccaagaaaatcgtatctgataggggaagccaattcacctctcacttttggaagaagctccaagaagagctgggtactcgattgaattttagcaccgcctatcacccgcagacagatggacagaccgagcgtctaaatcagatcctagaagatatgctccgcgcatgtgtactagatttcgggaagacttgggataagagtctcccctatgccgagttctcctacaataacagctaccaagccagcatacaaatggcaccctatgaagcgttgtacgggcgcaaatgccggacaccgctattgtgggaccaagttggagaaagccaagtgttcgggactgatatcctgagagaagctgaagctaaagtcagaatcattcgggataatctaaaggtggcacagtctcggcagaaaagttatgcagataaccgtcgccgtgatctggaattcgcagtggatgactttgtgtaccttcgggtcacgccattgcgaggtgtgcacaggtttcagacaaaagggaagctcgcacctcggtatgtgggtcccttccgtatcatcgctcgacgcggagaagttgcttaccagctggagttgcccgcctccttgggtaacgtgcatgatgtgttccatgtgtcgcaactcaagaaatgtcttcgagtgccatccgagcaggccgactcagagcaaattgaagttcgcgaagacctgacgtatgtggagaagccagtgaaaatcctggacaccatggagcgcaggaccaggaaccgggtaatccgtttttgcaaggtccagtggagcaaccacgccgaagaagaagctacttgggagcgcgaagacgagctgaaggcagcccatcccgatctcttcgccagttcttccgaatctcggggtcgagattccgtttaa

SEQ ID NO: 14227 - DNA, 4113 bp, Oryza sativa
  Clone ID: TFbOSC401859j.C1.o2.fg
atgggttgggaactatgtcatgtcctccgtccgtatgccgtggtgatggccgccaacctcaaccgtcgtggtctggatctgactggctttgctttggagctgcggggcatgtgcgttgtcctgggatatccgcatggagtggactaccagggcaagaggcttccggagcaggatggtgacgatgcggagccccgcgccgcttgggaggtcactgcgatgatcctcaccggctcccctaagaggacttcgctggccgtcaccgcgggtagggactccttccccgccacctgccagaacgctgcactcctcgccatcggcactcttcaccagcgctacccggacgagttgcagcactcgccctaccgctactaccctcgtcgtggaggagcccgcgactacgccaccttccaggatgctagctcggaggatgacgctaccatcatgcatctggcgcgcatggtagaggcgtacgacgcggcccgtatcgacttctaccgcatggcgcgccgtggcctggtcgagaacaacatgaagatcctggagctgcgtcaagagaatctgcagttgaaggacttggacgctatggaggcgcagctgtgtcagctcaagattgctcagggggagatctgccgccccaagcgccgccgcaatccgccgcaacacaatgctccaccaccgccaccaccacccccacagcactccaagcttgccgagttcctccgcattcgcccacctaccttctctagctccaataaccacgtggatgccttggattggttgcatgccgttgggaaaaagttggacaccgtccagtgcaatgataaggagaaagttatcttcgtaacccatcagctgcaggggcccgcatcgctatggtgggaccatttccaggctacgcagccagaaggacagccaatcacctgggcccgcttcaccgccgctttccagaggacccatgtgccagctggggtcgtagcccttaagaagagggaatttcgggagttgaagcaaggcaaccgctctgttatggagtatttgcatgagttcaacaacttggcccggtatgccccggaggatgttcgtaaagatgaagaaaaacaggagaagtttctggcagggatggaccctgaactttctgtgcgtctggtctctggggactatcccgatttccagcgcctggtggacaagagcattcgcctggaagccaagcacaaggaactggagtcgcacaagcgtcgcttggcgaatttccgtaatcaacagggggctaaccaaaggatccgctacaccaatccctatctagggggatcctcctcacagcagcagcagcagcagcctcgccccgtgccacgccctcagtatgtggttcgtgtcccacagccgcagcagcaacggcagaatcaacaagggaaccgtgcaccccgacctcctgcaccggctatgcagcctggtcaaggtcgcaaggatgctcaaggccagcagcgtctgtgcttcaactgtttcgagcctgggcatttcgccgataaatgcccaaagccgaggcgtcagcaaggcccagcgccaaagccgaggcgtcagccgaggcgtcagcaaggcccagcgccacccggccccaacaacggtggtaaggatgccacccggggtcgtgtgaatcacgttactgcggaggatgtcctgacaactccagatgtcatcctcgatacgttcttcattcattccatccccgctaccattttgttggactctggagcttcccactcatttatatctgtgcaattcgtggggagaaatcaactaagggtagcaaagcttaggagctctctgctcatcaccacccctggaggggctatgacagcaaagtattatagcccgaccatacctatagagatccagggaatttcttttccctcggatctgatccttcttgacaccaaggacttggatgtgatcctcgggaagaattggcctgatcaaccggttgtcttctttgcgcacccaactcccaccggcaactcagtacttcatcagctgggactgtcagaaatacccgttgccagcaagttcagtgatgtgtttccggaagagctacccggtatgccaccaaagcgggagattgagttcaggatagatcttgctccaggaaccactcccatgtacaagcgaccctaccgtatggcagcgaatgaactggccgaagtaaagaagcagttggaagggttgaaagagaaggggtacatacggccgagcacttctccctggggtgctcccgtgatttttgtagaaaagaaagacaagacaaagaggatgtgcgttgactaccgagctctcaatgaagtcactatcaaaaacaagtaccctcttccccggatcgatgatctattcgatcaactcaaaggtgcctctgtcttttccaagattgaccttcgttccgggtatcatcaattgcgtatccgtgaagaagatatccctaagactgccttcaccacgcggtatggattgtatgaattcacggtgatgtcattcggcttgaccaacgctcctgccttcttcatgaatctaatgaacaaggtgtttatggagtatttggataagttcgttgtggtctttattgatgacatactggtgtactcacagtccgagaaagaacatcagcagcatctccgtctggtattgggaaagcttcgagaacatcagttgtatgccaagctcagcaagtgtgaattctggttgtccgaagtcaagttcttagggcatgtaatatctgctaaaggagtcgctgtggctcccgagacagtaacagctgtcaccgattggaagcaacccaagacggtcacccaggtccacagtttcttgggtttagcagggtactatcggaggttcatcgagaatttctccaaaattgccaggcccatgacgcagttgcggaaggaagaaaaatttgtgtggagtccgcagtgtgagagagcatttcaaactctcaaggaaaagttggtttcctcaccagtgttaatcttacctgatacccgcaaggatttcctggtgtactgtgaagcttcacgccaaggattggggtgtgtgttaatgcaagaaggtcatgtggtagcttatgcttcacgccagctacgaccccatgaaggcaactatcctacccatgatttggaattggccgcggtgagaagatggttagagctcatcaaagactatgatgtgggaatccattatcaccctggcaaggccaacgtggtggccgacgcgctgagtcggaaaggccactgcaacgctctttgtgtccgcggcattccaccggaacttaatcaacagttggaagccctgaacctaagtgtcgttagccatggattcctggctgcactagaagcaaagcccaccttgcttgatcacatacgcaaggctcagaagaatgatccggatatacaggagatcctcaagaatatgaagcagggtaaagccactggcttcacggaagatgaacacggaaccttatggaatggaaatcgtgtatgcgttccggacaacaaggaacttaaacagttgatacttcaggaagctcttatgctccgtgcctgtgttctggattttgggaggacctgggacaagagtctcccctatgctgaattctcctacaataacagctaccaggccagcatacaaatggcaccctatgaagcgttgtatggacgcaaatgccggactccgctgttgtgggaccaagttggagaaagccaagtgttcgggactgatatcctgagagaagctgaggctaaagtcagaaccattcgggataacttaaaagtggcccagtctcggcagaaaatggatgattttgtgtatcttcgggtcacgccacagcggggagtgcacaggtttcagacaaaagggaagcttgcacctaggtatgtgggacctttccgcatcatcgctcgacgcggagaagtcgcttaccagttggagctgcctacatccttgggcaatgtgcacgatgtgttccacgtgtcgcagctcaagaaatgccttcgagtgccatccgagcaagccgattcagagcagattgatgttcgagaagcctgtgaagattctggacacaatggagcgtag

SEQ ID NO: 14228 - DNA, 5271 bp, Oryza sativa
  Clone ID: TFbOSC402412j.C1.o1.fg
atggacatctccagggcaaatgaaggctacacgagctgcggcccggtagtcgagatgtcatggcacagggccggtgtcctgctgctaggggctcagtcctgcctgcctatcccggaggttccggccgtaggtgggattgggtcggtactcttgtctatggctaggatgggttggaaactatgtcacgtcttccgtctgtataccgtggtgatggccggcagcgtcacccgtcgtggtttggacatgactggcttcgtcttggagctgcggggcatgtgcgtggtcctggggtatccacatggagtggactaccaggccaggccgcttccggagcaggagggtgacgatgcagagccccacgctggttgggaggtcactgcagtgatcctctctggctctcccgagcggacttcgctggcagtcaccgcgggtggagattccttccccgccgcttgccagagcgccgctctcctcgccatcggcactcttcaccagcgctacccggacgagttgcagcactcgccctaccgctaccaccctcgccgcggaggagcccgcgactacgccaccttccgggatgctagctcagaggatgacgctaccatcgtgcacctggcgcgcatggtggaggcgtacgacgcggctcgtatcgacttccatcagatggtgcgccgtgggatggtcgagaacaacatgaagatcctggagctgcgtcaagagaacctgcagctcaagaaggacctagacgcggtggaggcgcagctgcatcagctcaagatcgcccagggagaggtctgccgccccaagcgccgccgtgtctgccgcagccagaagatcaccgcccgcaagagcacctccaggcccgagcttgttcgtcagtccctggcgtggacttgcttcgtcgagatccctcgtgccgagcccgcgcccgtggttccccaggagggggaagcctccggcgttggtagcacggaggatgcgctgttgctcaccttccgtcctggcccgtcgcagcggagaagtgctaacaccggtgatggcaaccaacctgaaggcagcaaccaccaccaccagggcagcccacctccacctcctcctccgcctccaccaccaccaccagacaccaacgccattctcacccaaatcctcgcccagcaggccaacatgatgactgctttcctccaccacctccaaaatccgccacaacataatgctccaccaccacccccacaacactctaaactcgccgagttcctccgcatccgcccacctaccttctctagctccaacaaccccgtggacgcgttggattggttgcatgccgtggggaaaaagctagacactgtgcagtgcagcgatgaggagaaagtcatcttcgccgcccaccagctgcagggacccgcatctctatggtgggaccatttccaggctacgcagccagaagggcaacctattacttgggcccgtttcaccgccgctttccggagaacccatgtgcccgccggagtcgtggcccttaagaaaagagaattccgagagttgaagcaaggcaaccgctccgtgatggagtatttgcatgagttcaacaacttggcccgttacgccccggaggatgtgcgggaagatgaggagaagcaagagaagttcttggcaggaatggaccctgagctgtccgtccgtctagtctccggggactatccggatttccaacggggatcctcctcgcagcagcaacaacagcagcagcaacctcgctccgcgcctcgacctcaattcgtggtgcgcgtcccacagccgcagcagcagcagaatcaacaagggactcgtgcgccccgtcctcctacgccaactgtgcagcctggtcaaggccgtagggacgctcaaggtccgcagcgtctgtgcttcaactgcttcgagcccgggcactttgcggataaatgcccaaagccgaggcgtcagcaaggccaagcgcctccccgctccaaccacggtgggaaggatgtcattcggggtcgggtgaaccacgtgacggccgaggacgtgctgacaactccagacgtcatcgttggtacgttcctcattcattccatccctgctaccattctgttcgactctggagcatcccactcgtttatatctgtgccattcgtggggagaaatcagttgggggtagaaaggcttaggaaccctctgctcatcaccacccctggaggggttatgacagcaaagtattatagtcctgccgtccctatagaaattcaggggattccttttccctcggatctgattctgctagacaccaagaacttggatgtgatccttgggatgaattggttggctcaattccaaggagtagtggattgtgcgagacgcactgtcactctgtaccgagggccggaacaaccggttgttttctttgcacccccaacctctgtcagtagttcagaacttcatcagataggactgtcagaaatccccatcgtcagagagttcggagacgtgtttccggaagaactacccggtatgccgcccaaacgagagattgagttccggatagatcttgctccaggaaccactcctctgtacaagcgaccctaccgtatggcagcaaatgaactggccgaagtcaagaaacagttggaagagttgaaagaaaaggggtatatacgtccgagtacttccccctggggtgctcctgtgatttttgtggagaagaaagacaagacgaagaggatgtgcgttgactacagagctctcaatgaagtcaccatcaaaaacaagtaccctcttccccggatcgatgatctgttcgatcagcttaaaggtgccactgtattctccatgattgatcttcgttccggatatcaccaattacgtattcgtgaagaagatattccgaagaccgcattcaccacgcgatacggactgtatgaattcacggtgatgtcatttggtttaaccaatgcacctgccttcttcatgaacttaatgaacaaagtgttcatggaatacttggataagtttgttgtggttttcattgatgacattctgatatactcacaatccgaggaagaccatcagcaccatctccgtctggtgttgggaaagttgcgggaacatcaattgtatgccaaacttagcaagtgtgagttctggttgtccgaagtcaaattcttagggcacgtgatatctgctaaaggagttgctgtggaccccgaaacagtgaccgccgtcactgattggaagcaacccaagacagtcactcaagtccgcagtttcttaggtttggcaggatactaccggaggttcatcgagaacttctccaaaatcgctcgacccatgacacagttgttgaagaaagaagagaaatttgtgtggagcccgcaatgcgagaaggcgttcaaaactctcaaagaaaagctggtttcctcgccagtgttaatcttgccggatactcgcaaggatttcatggtgtattgtgatgcttcgcgccaaggattggggtgcgtgctcatgcaggatggtcatgtggtggcctatgcctcacgccagctacggcctcatgaaggcaactaccctacccatgatttggagttagctgcggtggttcatgctctaaaaatctggcggcactatctcattgggaatcgttgtgaaatatatactgatcataagagtttgaaatacatcttcactcagtccgacctgaatcttcggcaaaggagatggttagaactcatcaaggattatgatgtgggaattcactatcatcctggtaaggccaacgtggtcgccgacgctctaagtcgaaaaagccattgcaacactcttaacgtccgtggcattccactcgaacttagtcaacagatggaagccctgaacctaagcatagttggtcgcggattcttggctgcgttggaagccaagcctaccttgctcgatcaaatccgcgaggctcagaagaacgatccggacatgcatggactcctcaagaatatgaaacagggtaaagccgctggtttcacagaggatgaacacggaaccctatggaacggaaatcgagtatgcgttccagataacagagaacttaaacagctgatactacaggaagctcacgaaagtccttattccatccaccctggcagtacgaagatgtacttagacttgaaggagaaatactggtgggttagtatgaagcgggaaattgcagagttcgtggccctttgtgatgtgtgccagcgtgtcaaggcagagcaccaacgaccggccggacttctccaacctctccaagtacctgaatggaaatgggatgaaattgggatggatttcatcaccggacttccaaagacccaaggtggatatgattctatatgggtagttgtggatcgattaaccaaggtagctcgatttattcctgtgaagaccacctatggagggaacaaactagccgagctctacttcgctaggatcgtgagtctccatggcgttcccaagaaaatcgtatctgataggggaagccaattcacctctcacttttggaagaagcttcaagaagagctgggtacccggttaaacttcagctccgcataccacccgcagacagatgggcagaccgagcgtctaaatcagatcctagaagatatgcttcgcgcgtgtgtcctggatttcgggaagacctgggataagagtctcccctatgccgagttctcctacaataacagctatcaagccagcatacaaatggcaccttataagcgttgtatgggcgcaaatccgaacacgctcttgtggatcaagttggggaaagccaagtgttcggtggacgattttgtataccttcgggtcacgccattgcggggtgtacacaggtttcggacaaaagggaagctcgcacctcggtatgtgggtcctttccgtatcgttgcccgacgcagagaagtcgcttaccaattggagctgcccgcctccttgggcaacgtgcacgatgtgctccatgtgtcgcaactcaagaaatgccttcgagtgccatccgagcaagccgactcagagcaaattgaagttcgcgaagacttgacctacgtggagaggccagtgaaaatcctggacaccatggagcgcaggaccaggaaccgggtaatccatttttgcaaggtccagtggagcaaccacgtcgaagaagaagctacctgggagcgtgaagacgagctgaaggcagcccatcccgatctcttcaccagttcttctgaatctcggagtcgagattccttttaa

SEQ ID NO: 14229 - DNA, 5550 bp, Oryza sativa
  Clone ID: TFbOSC402669j.C1.o3.fg
atggaggtggatgaagtcgggggtcgatggacattctccagggcaaatgaaggctacaygagctgcggcccggtagtcgagatgtcatggcacagggccggtgtcctgctgctaggggctcagtcctgtctgcctgtcccggggrttccgrccgtaggcgggattgggtcggtactcttgtctatggctaggatgggttggaaactatgtcacgtcttccgtctgtataccgtggtgatggccggcagcgtcacccgtcgtggtttggacatgactggcttcgtcttggagctgcgaggcatgtgcgtggtcttggggtatccacatggagtggactaccaggccaggccgcttccggatcaggagggtgatgacgcggagccccacgctggttgggaggtcactgcagtgatcctctctggctctcccgagcggacttcgctggcagtcaccgcgggtggagattccttccccgccgcttgccagaacgccgctctcctcgccatcggcactcttcaccagcgctacccggacgagttgcagcactcgccctaccgctaccaccctcgtcgcggaggagcctgcgaccacgccaccttccgggatgctagctcggaggatgacgctaccatcgtgcacctggcgcgcatggtggaggcgtacgacgcggctcgtatcgacttccaccagatggtgcgccgcgggatggttgagaacaacatgaagatcctggagctgcgtcaggagaacctgcagctcaagaaggacctagacacggtggaggcgcagctgcatcagcttaagatcgcccagggagaggtctgccgccccaagcgtcgccgcatctgccgcagccagaagatcaccgcccgcaagagcacctccaggcccgagcttgttcgtcagtccctggcgtggacctgcttcgtcgagacccctcgtgccgagcccgcgcccgtggttccccaggagggggaagcctccggcgttggtagcacggagggtgcgctgttgctcaccttccgccctggcccgtcgcagcggagaaatgctaacaccggtgatggcaaccaacctgaaggcagcaaccacaaccaccaaggcaacccacctccacctcctcctccgcctccgccaccaccaccagacaccaacgccattctcacccaaatcctcgcccagcaagccaacatgatgactgctttcctccaccacctccaaaatccgccacaacagaatgctccaccaccacctccccaacactctaaactcgccgagttcctccgcatccgtccacctaccttctctagctccaacaaccccgtggatgcgttggattggttgcatgccgtggggaaaaagctagacacggtgcagtgcagcgacgaggagaaagtcatcttcgccgcccaccaactgcaggggcccgcatctctctggtgggaccacttccaggctacgcagccagagggacagcctattacttgggcccgcttcaccgccgctttccggagaacccatgtgcccgccggagtcgtggccctcaagaaaagggaattccgagagttgaagcaaggcaaccgctccgtgatggagtatttgcatgagttcaacaatctggcccgttacgctccggaggatgtgcgggaagatgaggagaagcaagagaagttcctggcaggaatggaccccgagctgtccgtccgtctagtctcgggggactatccggattttcaacgactggtggacaagagcatccgcttggaagccaagcacaaggagctggagtcgcacaagcgccgcttggcgaatttccgcaatcaacagggtgctaaccaaagggtccgctacaccaatccctatccggggggatcctcctcgcagcagcaacaacagcagcagcaacctcgctccgcgcctcgacctcaattcgtggtgcgcgtcccacagccgcagcagcagcagaatcaacaagggactcgtgcgccccgtcctcccacgccaactgtgcagcctggtcaaggccgcagggacgctcaaggtcagcagcgtctgtgcttcaactgcttcgagcccgggcactttgcggataaatgcccgaagccaaggcgtcagcaaggccaagcgcctccccgctccaacaacggcgggaaggatgtcattcggggtcgtgtgaatcacgtgacggccgaggacgtgctgacaactccagacgtcatcgttggtacgttcctcgttcattccatccctgctaccattttgttcgactctggagcttcccactcgtttatatctgtgccattcgtggggagaaatcagttgggggtagaaaggcttaggaaccctctgctcatcaccacccctggaggggttatgacagcaaagtattatagtcctgccgtcccgatagaaattcaggggattccttttccctcggatctgattctgctagacaccaagaatttggatgtgattcttgggatgaattggttggctcaattccaaggagtagtggattgcgcgagacgcactgtcactctgtaccgagggccggaacaaccggttgttttctttgcacccccaacctctgtcagaagttcagaactgcatcagatagaactgtcagaaatccccatcgtcagggagttcggagatgtgtttccggaagaactacccggtatgccgcccaagcgagagattgagttccggatagatcttgctccaggaaccactcctctgcacaagcgaccctaccgtatggcagcaaatgaactggccgaagtaaagaaacagttggaagtgttgaaagaaaaggggtatatacgtccgagtacttccccatggggtgctcctgtgatttttgtagagaagaaagacaagacgaagaggatgtgcgtcgactacagagctctcaatgaagtcaccatcaaaaacaagtaccctcttccccggatcgatgatctgttcgatcagcttaaaggtgccactgtattctccaagattgatcttcgttccggatatcaccaattacgtattcgtaaagaagatattccgaagaccgcattcaccacgcgatacgggctgtatgaattcacggtgatgtcattcggtctaaccaatgcacctgctttcttcatgaacttaatgaacaaagtgttcatggaatacttggataagtttgttgtggttttcattgatgacattctgatatactcacaatcagaggaagaccatcagcaccatctccgtctggtgttgggaaagttgcgggaacatcaattgtatgccaagcttagcaagtgtgagttctggttgtccgaagtcaaattcttggggcacgtgatatctgctaaaggagttgctgtggaccccgaaacagtgaccgccgtcaccgattggaagcaacccaagacagttactcaagtccgtagtttcttaggtttggcaggatactaccggagattcatcgagaacttctccaaaatcgctcgacccatgacacagttgttgaagaaagaagagaaatttgtgtggagcccgcaatgcgagaaggcgtttcaaactctcaaggaaaagctggtttcctcgccagtgttaatcttgccggatactcgcaaggacttcatggtgtattgtgacgcgtcgcgccaaggactggggtgcgtgctcatgcaggacggtcatgtggtagcctatgcctcatgtcagctacgacctcatgaaggcaactaccctacccatgatttggagttagccgcggtggttcatgctctaaaaatctggcggcactatcacattgggaatcgctgtgaaatatataccgaccataagagtttgaagtacatcttcacccagtcggatctgaatcttcggcaaaggagatggttagaactcatcaaggactatgatgtgggaattcactatcatcctggtaaggccaacgtggttgctgacgctctaagtcgaaagagccattgcaacactcttaacgtccgtggcattccacctgaacttagtcaacagatggaagccctgaacctaagcatagttggtcgtgggttcttggctgcgttagaagccaagcctaccttgctcgatcaaatccgcgaggctcagaagaatgatccggacatgcatggactcctcaagaatatgaaacagggtaaagccactggtttcacagaggatgaacacggaaccctatggaacggaaagcgggtatgcgttccagataacagagaacttaaacagctgatacttcaggaagctcacgaaagtccttattccattcacccgggcagtacaaagatgtacttagacttgaaggagaaatactggtgggttagcatgaagcgggaaattgcagagtttgtggccctatgtgatgtgtgccagcgtgtcaaggcagagcaccaacgaccggccggacttctccaacctctccaagtaccagaatggaaatgggatgaaattgggatggatttcatcaccggacttccaaaaacccaaggcggatatgattctatatgggtagttgtggatcgattaaccaaggtagctcgatttattcctgtaaagaccacctatggagggaacaagctagccgagctctacttcgctaggatcgtgagtctccatggcgttcccaagaaaatcgtatctgataggggaagccaattcacctcgcacttttggaagaagctccaagaagagctgggtactcgattgaatttcagcaccgcctatcacccgcagacagatggacagaccgaacgtctaaatcagatcctagaagatatgctccgcgcatgtgtactagatttcgggaagacctgggataagagtctcccctatgccgagttctcctacaataacagttatcaagccagcatacaaatggcaccttatgaagcgttgtacgggcgcaaatgccggacaccgctcttgtgggaccaagttggagaaagccaagtgttcgggactgatatcctgagagaagctgaagctaaagtcagaatcattcgggataatctaaaggtggcacagtcccggcagaaaagttatgcagataaccgtcgccgtgacctggaattcgcagtgggtgattttgtataccttcgggtcacgctattgcgaggtgtacacaggtttcagacaaaagggaagctcgcacctcggtatgtgggtcctttccgtatcaatgctcggcgcggagaagtcgcttaccagttggagctgcccgcctccttgggcaacgtgcatgatgtgttccatgtgtcgcaactcaagaaatgccttcgagtgccatccgagcaggccgactcagagcagattgaagttcgcgaagatttgacctacgtggagaggccaatgaaaatcctggacaccatggagcgcaggaccaggaaccgggtaatccgtttttgcaaggtccagtggagcaaccacgcagaagaagaagctacttgggagcgtgaagacgagctgaaggcagcccatcccgatctcttcgccagttcttccgaatctcggggtcgagattccgtttaa

SEQ ID NO: 14230 - DNA, 5304 bp, Oryza sativa
  Clone ID: TFbOSC404680j.C1.o3.gm
atggtgacgaccaggagaaccgctgtcaccggtgatggcaatcaacccgaaggcagcaaccccaaccaccaaggcaacccacctccgcctcctcctccgcctccaccaccaccaccagacaccaacgccattctcacccagatcctcgcccagcaggccaacatgatgaccgctttcctccaccacctccaaaatccgccacaacagaatgctccaccaccacctccccaacactctaaactcgccgaattcctccgcatccgtccacccaccttctctagctccaacaaccccgtggacgcgttggattggttgcatgccgtggggaagaagctggacactgtgcagtgcagtgatgaagagaaagtcatcttcgccgcccaccagctgcaggggcccgcatctctatggtgggaccatttccaggctacgcagccagaggggcagccgattacttgggcccgcttcaccgccgctttccggagaacccatgtgcccgccggagtcgtggctcttaagaagagggagttccgagagttgaagcaaggcaaccgctccgtgatggagtatttgcatgagttcaacaacctggcccggtacgctccggaggatgtgcgggaagatgaggagaagcaggagaagttcttggcaggaatggaccccgagctgtctgtccgcctagtctctggggactatccggattttcaacgattggtggacaagagcatccgcttggaagccaagcacaaggagctggagtcgcacaagcgccgcttggcgaacttccgcaatcagcagggtgctaaccaaagggtccgctacaccaatccctacccagggggatcctcctcacagcagccgcagcagcaacaacctcgctccgcgcctcgacctcaattcgtggtgcgcgtcccacagccgcagcagcagcagaatcaacaagggactcgtgcgccccgtcctcccacgccagctgtgcagcctggtcaaggccgcagggacgctcaaggtcagcagcgtctgtgcttcaactgcttcgagcccgggcactttgcggataaatgcccgaagccaagacgtcagcaaggccaagcgcctccccgccccaacaacggtggcaaggacgtcattcggggtcgtgtgaaccacgtgacggccgaggacgtgctgacaactccagacgtcatcgttgggctgtcagaaatccccatagtcagagagttcggagacgtgtttccggaagaactacccggtatgccgcccaagcgagagattgagttccgaatagatcttgctccaggaaccactcctttgcacaagcgaccctatcgtatggcagcaaatgaactggccgaagtaaagaaacagttggaagagttgaaagaaaaggggtatatacgtccgagtacttccccatggggtgctcctgtgatttttgtggagaagaaagacaagacgaagaggatgtgcgtcgactacagagctctcaatgaagtcaccatcaagaacaagtatcctcttccccggatcgatgatctgttcgatcaacttaaaggtgccactgtattctccaagattgatcttcgttccggatatcaccaattacgtatccgtgaggaagatattccgaagaccgcattcaccacgcgatacgggttgtatgaattcacggtgatgtcgttcggtctaaccaatgcgcctgccttcttcatgaacttaatgaacaaagtgttcatggaatacttggataagtttgttgtggttttcattgatgacattctgatatactcacaatcagaggaagaccatcagcaccatctccgtctggtgttgggaaagttgcgggaacatcaattgtatgccaaacttagcaagtgtgagttctggttgtccgaagtcaaattcttagggcacgtgatatctgctaaaggagttgctgtggaccctgaaacagtgaccgccgtcaccgattggaagcaacccaagacagttactcaagtccgcagtttcttaggtttggcaggatactaccggaggttcatcgagaacttctccaaaatcgctcgacccatgacgcagttgttgaagaaagaagagaaatttgtgtggagcccgcaatgcgagaaggcgttccaaactctcaaagaaaagctggacggtcatgtggtagcctatgcctcacgccaactacgacctcatgaaggcaactaccctacacatgacttggagttagcagcggtggttcatgctctaaaaatctggcggcactatctcattggcaatcgctgtgaaatatatactgatcataagagtttgaaatacatcttcacccagtcagatctgaatcttcggcaaaggagatggttagaactcatcaaggattatgatgtgggaattcactatcatcctggtaaggccaacgtggttgccgacgctctaagtcggaagagccattgcaacactcttaacgtccgtggcatcccacccgagcttagtcaacagatggaagccctgaacctaagcatagttggtcgtggattcttggctgcgttggaagccaagcctaccctgctcgatcaaatccgcgaggctcaaaagaatgatccagacatgcatggactcctcaagaatatgaaacagggtaaagccgctggtttcacggaggatgaacacggaaccctatggaacggaaagcggagtttgtggccctatgtgatgtgtgccagcgtgtcaaggcagaacaccaacgaccggccggtcttctccaacctctccaagtaccagaatggaaatgggatgaaattgggatggatttcatcaccggacttccaaaaacccaaggtggatatgattccatatggcaccgcgtatcacccgcagacagatggacagaccgagcgtctcaatcagatcctcgaagatatgcttcgcgcatgtgtcctagatttcgggaagacttgggataagagtctcccctatgccgagttctcctacaataacagctaccaagccagcatacaaatggcaccgtatgaagcattgtatgggcgcaagtgccggacaccgctattgtgggaccaagttggagaaagccaagtgttcgggactgatatcctgagagaagctgaagctaaagccgactcagagcaaattgaagttcgcgaagatttgacctacgtggagaggccaatgaaaatcctggacaccatggagcgcaggaccaggaaccgggcgggcccgcccgccactctcgctgacgggtgggacccacctgtcatctccttcctcgcgccgcgcccgccgcccgcccgtgccctagcgccgccgccgccgcggattccgccgcatcccgccgtccccgcgcgcattaaagagggggaaatcactccccgtgattccctctcccgtttccccctcttttccctctctctctccctcggattcgttcgatttgaatcccgcaatcgtcgccggcgtcttcaatggcggccgagatctccgcggccgattcctccctctccggccgcgttctccccctcccgttgctatatattcgttccccgagctccgctcttccgtttccgccgctcgccgctcgctctcgccgtcggattcgtgctcgcgccgtgcacctctctctccgccgtcgccgtcgacctccggttcgccgccgacgtcgctccgggcttcctcccgactcggcgtcacctccatcggcttcgccgcgttgtcgccgaccccgtccgccccttcgcctcgcccgccgaccgccggagctccgtcgtcctcgccgtcccgaaccgcgccgccgccttcctccgcttcggccgccgtttccgtcgtcgttgtagtcccggggtgagccgtggactgccgttcgctttcccccttcccttctccctctcgggtgccgctccgccgcgccgttggtcgccggcggcgaccatcggggcgcgggtgcgccgcctcccgtcggccgtgccggcgaggccgccttcggggcgcgccccgcggctgccaggtgggcccggccgtcagccgcccgcgcccgcgggtgcggctgacgcgtgggacccacggcgccgaccgccgccagccgcgtgctcccggtccaccgtggaccgagaggctgacgcgtgggccccacctcccgtggacccgatggctgatcgcgatgaggaacagatactgtacgatacaatcgcggagggaagcagccagtattggaacgaagaagaggggaacaaggatccaaaccagtacttgaacgaggaagggaatgtggagagggatgcggaggggaaccaggaggggaacgtgcagagggatgcggaggggaacgaggaggaagaggctagtggaagacaaacacgagggaaaggggtgattccttggaagattggattcaaggaggacatccacacgtacaggagtcggatgaggagcaagagagataccgaggcgaagattgcagatcttgagtacagggtatcgagctacgagctcagcatgcaagaggaggtggcaagccgcgcctcaacggggcaggtaggatcacagagcatggacgccatgcaaacattggacgaaaccacctgcctcgttgatgatatcactcagcggacaccatgtgagctgtatattcccttcaagaacttatcaataaaggtggcgtcgggcatggccatcccaatggacccatcggggacttaccactgcaggctgattccagcaggatactccaaggtcgaagttgagttggtggaaggcgctacatcatcctccctgggcgacaagcggcgtcttgtgcaccatctcctccggctccgccatctcctcctcaggctcctacaccgactcctccgcaggcttctacaccgactcctccgcaagctcctcgtccggcttcttccaagtcaagggcccccgaagctccaccacctgcccccacaggcaacaaagaaggcaaaagttgacactgcaaaaaacaaggacctagggtacgattgcacgcaagaggagcttgacgcttatgtggcattagaagtcaggagacaattgaagcctcgaagtccagaaaagaagattcctatagttccaagtgtcaggaacttcttcaggggtatgtctgcacctgccaaagaggccataaagctatcggactatgagcgaacacttaagaaagcatcttctgaaaagtccaaaccagtccctcagcttggagagcaaccaaaccaggagatcgagccgttggtgacggtgaagattttggaatacaagaatttattaatgacaccgggctaa

SEQ ID NO: 14231 - DNA, 5376 bp, Oryza sativa
  Clone ID: TFbOSC404798j.C1.o16.fg
atggatgaagtcgggggtcgatggacattctccagggcaaatgaaggctacacgagctgcggcccgatggccggtagcgtcacccgtcgtggtttggacatgactggcttcgtcttggagctgcggggcatgtgcgtggtcttagggtacccacatggagtggactaccaggccaggccgcttccggatcaggagggagacgacgcggagccccacgctggttgggaggtcactgctgtgatcctctctggctctcccgagcggacttcgctggcagtcaccgcgggtggagattccttccccgccgcttgccagaacgccgctctcctcgccatcggcactcttcaccagcgctacccggacgagttgcagcactcgccctaccgctaccaccctcgccgcggaggagcctgcgactacgccaccttccgggatgctagctcggaggatgacgctaccatcgtgcacctagcgcgcatggtggaggcgtacgacgcggctcgtatcgacttccatcagatggtgcgccgcgggatggtcgagaacaacatgaagatcctggagctgcgtcaagagaacctgcagctcaagaaggacctcgacgcggtggaggcgcagctgcatcagctcaagatcgcccagggagagatctgccgccccaagcgtcgccgcgtctgccgcagccagaagatcaccgcccgcaagagcacctccaggcccgagcttgttcgtcagtccctggcgtggacttgcttcgtcgagacccctcgtgccgagcccgcgcccgtggttccccaggagggggaagcctccggtgttggtagcacggaggtcgtgtggggcatggttatgccgatggtgacgaccaggagaaatgctgttaccggtgatggcaaccaacccgaaggcagcaaccacaaccaccaaggcaatccacctccacctcctcctccgcctccaccaccaccaccagacaccaacgccattctcacccaaatcctcgcccagcaagccaacatgatgaccgctttcctccaccacctccaaaatccgccacaacagaatgctccaccaccacctccccaacactctaaactcgccgagttcctccgcatccgcccacctaccttctctagttccaacaatcccgtggatgcgttggattggttgcatgccgtggggaaaaagctagacacggtgcagtgcagcgatgaggagaaagtcgtcttcgccgcccatcagctgcaggggcccgcatctctctggtgggaccatttccaggctacgcaaccagaggggcaacctattacttgggctcgcttcaccgccgctttccggagaacccatgtgcccgctggagtcgtggcacttaagaaaagagaattccgagagttgaagcaaggcaaccgctccgtgatggagtatttgcatgagttcaataatctggcccgttacgctccggaggatgtgcgggaagatgaggagaagcaagagaagttcttggcaggaatggaccccgagctgtccgtccgtctagtctctggggactatccggattttcaacgtctggtggacaagagcatccgcttggaagccaagcacaaggaactggagtcacacaagcgccgcttggcgaatttccgcaatcaacagggtgctaaccagagggtccgctacaccaatccctatccagggggatcctcctcgcagcagcaacaacagcagcagcaacctcgctccgcgcctcgacctcaattcgtggtgcgcatcccacagccgcagcagcagcagaatcagcaagggactcgtgcgccccgtcctcctacgccaactgtgcagtctggtcaaggccgcagggacgctcaaggtcagcagcgtctgtgcttcaactgcttcgagcccgggcactttgcggataaatgcccgaagccaaggcgtcagcaaggccaagcgcctccccgctccaacaacggcgggaaggatgtcattcggggtcgtgtgaatcacgtgacggccgaggacgtgctgacaactccagacgtcatcgttggtacgttcctcgttcattccatccctgctacaattttgttcgactctggagcttcccactcgtttatatctgtgccattcgtggggagaaatcagttgggggtagaaaggcttaggaaccctctgctcatcaccacccctggaggggttatgacagcaaagtattatagtcctgccgtccctatagaaattcaggggattcctttttcctcggatctgattctgctagacaccaagaatttggatgtgatccttgggatgaattggttggctcaattccaaggagtagtggattgcgcgagacgcactgtcactctgtaccgagggccggaacaaccggttgttttctttgcacccccaacctctgtcagaagttcaggacttcatcagataggactgtcagaaattcccatcgtcagagagttcggagacgtgtttccggaagaactacctggtatgccgcctaagcgagagattgagttccggatagatcttgctccaggaaccactcctctgtacaagcgaccgtaccgtatggcagcaaatgaactggccgaagtaaagagacagttggaagagctgaaagaaaaggggtacatacgtccgagtacttccccatggggtgctcctgtgatttttgtagagaagaaagacaagacgaagaggatgtgcgtcgactacagagctctcaatgaggtcaccatcaaaaacaagtaccctcttccccggatagatgatctgttcgatcagcttaaaggtgccactgtattctccaagattgatcttcgttccggatatcaccaattacgtattcgtgaagaagatattccgaagaccgcattcaccacgcgatacggactgtatgaattcacggtgatgtcgttcggtttgaccaatgcacctgccttcttcatgaacttaatgaacaaagtgttcatggaatacttggataagtttgttgtggttttcattgatgacattctgatatactcacaatcagaggaagaccatcagcaccatctccgtctggtgttgggaaagttgcgggaacatcaattgtatgccaaacttagcaagtgtgagttctggttgtccgaagtcaaattcttagggcacgtgatatctgctaaaggagttgctgtggaccccgaaacagtgaccgccgtcaccgattggaagcaacccaagacagtcactcaagtccgcagtttcttaggtttggcaggatactatcggagattcatcgagaacttctccaaaatcgctcgacccatgacacagttgttgaagaaagaagagaaatttgtgtggagcccgcaatgcgagaaggcgtttcaaactctcaaagaaaagctggtttcctcgccggtgttaatcttgccggatactcgcaaggatttcatggtgtattgtgacgcttcgcgccaaggattggggtgcatgctcatgcaggacggtcatgtggtagcctatgcctcacgtcagctacgacctcatgaaggcaactaccctacacatgacttggagttagccgcggtggttcatgctctaaaaatctggcggcactatctcattgggaatcgctgtgaaatatataccgatcataagagtttgaaatacatcttcacccagtcggatctgaatcttcggcaaaggagatggttagaactcatcaaggactatgatgtgggaattcactatcatcctggtaaggccaacgtggttgccgacgctctaagtcgaaagagccattgcaacactcttaacgtccgtggcattccacccgaacttagtcaacagatggaagccctgaacctaagcatagttggtcgtggattcttggctgcgttggaagccaagcctatcttgctcgatcaaatccgcgaggctcagaagaacgatccggacatgcatggactcctcaagaatatgaaacagggtaaagccgctggtttcacagaggatgaacacggaaccctatggaacggaaagcgggtatgcgttccacataacagagaacttaaacagctgatacttcaggaagctcacgaaagtccttattccatccaccctggcagtacaaagatgtacttagacttgaaggagaaatactggtgggttagcatgaagcgggagattgcagagtttgtggccctatgtgatgtgtgccagcgtgtcaaagcagagcaccagcgaccggccggacttctccaacctctccaagtaccagaatggaaatgggatgaaattgggatggatttcatcaccggacttccaaaaacccaaggcggatatgattcaatatgggtagttgtggatcggttaaccaaggtagctcgattcattcctgtgaagaccacctatggagagaacaaactagcggagctctacttcgctaggatcgtgagtctccatggcgttcccaagaaaatcgtatctgataggggaagccaattcacctctcacttttggaagaaactccaagaagagctgggtacccgattaaatttcagcaccgcataccacccgcagacagatgggcagaccgagcgtctaaatcagatcctagaagatatgcttcgcgcatgtgtcctagatttcgggaagacctgggataagagtctcccctatgccgagttctcctacaataacagttatcaagccagcatacaaatggcaccttatgaagcgttgtacgggcgcaaatgccggacaccgctattgtgggaccaagttggagaaagccaagtgttcgggactgatatcctgagagaagctgaagctaaagtcagaatcattcgggataatctaaaggtggcacagtcccggcagaaaagttatgcagataaccgtcgccgtgacctggaattcgcagtggatgattttgtgtatcttcgggtcacgccattgcgaggtgtacacaggtttcagacgaaagagaagctcgcacctcggtatgtgggtcctttccgtatcgttgctcgacgcggagaagtcgcttaccagttggagctgcccgcctccttgggcaacgtgcatgatgtgttccatgtgtcgcaactcaagaaatgcctccgagttccatccgagcaggccgactcagagcaaattgaagttcgcgaagatttgacctacgtggagaggccagtgaaaatcctggacaccatggagcgcaggaccaggaaccgggtaatccgtttttgcaaggtccagtggagcaaccacgccgaagaagaagctacttgggagcgtgaagacgagctgaaggcagcccatcccgatctcttcgccagttcttccgaatctcggggtcgagattccgtttaa

SEQ ID NO: 14232 - DNA, 1218 bp, Oryza sativa
  Clone ID: TFbOSC405314j.C1.o2.fg
atgatgaccgctttcctccaccacctccaaaatccgccacaacagaatgctccaccaccacctccccaacactctaaactcgccgagttcctccgcatccgcccacctaccttctccagctccaacaaccccgtggatgctttggattggttgcatgccgtggggaagaagttagacacggtgcagtgcagcgatgaggagaaagtcgtcttcgccgcccaccagctgcggggacccgcatctctatggtgggaccatttccaggctacgcagccaggggagcaacctattacttgggctcgcttcaccgccgctttccggagaacccatgtgcccgctggagtcgtggctcttaagaaaagggaattccgagagttgaagcaaggcaaccgctccgtgatggagtatttgcacgagttcaacaacttggcccgttacgccccagaggatgtgcgggaagatgaggagaagcaagagaagttcctggcaggaatggaccccgagctgtccgtccgcctagtctctggggactatccggattttcaacgattggtggacaagagcatccgcttggaagccaagcacaaggagctggaatcgcacaagcgccgcttggcgaatttccgcaatcaacagggtgctaaccagagggttcgctacaccaatccctatccagggggatcctcctcgcagcagcaacaacagcagcagcaacctcgctccgcgcctcgacctcaattcgtggtgcgcgtcccacagccgcagcagcagcagaatcagcaagggactcgtgcgccccgtcctcttacgccaacggtgcagcctggtcaaggccgcagggacgcttcaggtccgcagcgtctgtgcttcaactgcttcgagcccgggcactttgcggataaatgcccaaagccaaggcgtcagcaaggccaagcgcctccccgctccaacaacggcgggaaggatgtcattcggggtcgtgtgaatcacgtgacggccgaggacgtgctgacaactccggacgtcatcgttgagaagaaagacaagacgaagaggatgtgcgtcgactacagagctctcaatgaagtcaccatcaagaacaagtaccctcttccccggatcgatgatctgttcgaccaactcaaaggaagaccatcaacaccatctccgtctggtgttgggaaagttgcgggaacatcaattgtatgccaagcttag

SEQ ID NO: 14233 - DNA, 2130 bp, Oryza sativa
  Clone ID: TFbOSC405532j.C1.o2.fg
atgtcatggcacagggccggtgtcctgctgctaggggctcagtcctgcctgcctgtcccgggggttccggccatggccggcagcgtcacccgtcgcggtttggacatgactggtttcgtcttggagctgcggggcatgtgcgttgtcctggggtatccacatggagtggactaccagggcaggccgcttccggagcaggagggtgacgatggagagccccacgctgcttgggaggtcactgcagtgatcctcgctggctctcccgagcggacttcgctggcagtcaccgcgggtggagattctttccccgccgctagccagagcgccgctctcctcgccatcggcactcttcaccagcgctacccggacgagttgcagcactcgccctaccgctaccaccctcgccgcggaggagcccgcgactacgccaccttccgggatgctagctcggaggatgacgctaccatcgtgcacctggcgcgcatggtggaggcgtacgacgcggctcgtatcgacttccatcagatggtgcgccgtgggatggtcgagaacaacttgaagatcctggagctgcgtcaggagaacctgcagctcaagaaggacctagacgcggtggaggcgcagctgcatcagctcaagatcgcccagggagaggtctgccgccccaagcgtcgccgcgtctgccgcagccagaagatcaccgcccgcaagagcacctccaggcccgagcttgttcgtcagtccctggcgtggacttgcttcgtcgagacccctcgtgccgagcctgcgcccgtggttccccaggagggggaagcctccggcgttggtagcacggaggatgcgctgttgctcaccttccgtcctggcccgtcgcagcggaggagtgctaacaccggtgatggcaaccagcctgaaggaagcaaccaccaccaccagggcagcccacctccacctcctcctccgcctccaccaccaccaccagataccaacgccattctcacccaaatcctcgcccagcaggccaacatgatgactgctttcctccaccacctccaaaatccgccacaacataatgctccaccaccacccccacaacactctaaactcgccgagttcctccgcatccgcccacctaccttctctagctccaataaccccgtggatgcgttggattggttgcatgccgtggggaaaaagctagacactgtgcagtgcagcgatgaggagaaagtcatcttcgccgcccaccagctgcaggggcccgcatctctatggtgggaccatttccaggctacgcagccagaggggcaacctattacatgggcccgtttcaccgccgctttccggagaacccatgtgcccgccggagtcgtggcccttaagaaaagggaattccgagagttgaagcaaggcaaccgctccgtgatggagtatttgcatgagttcaacaacctggcccgttacgccccggaggatgtgcgggaagatgaggagaagcaagagaagttcttggcaggaatggaccctgagctgtccgtccgtctagtctccggggactatccggatttccaacgtctggtggacaaaagcatccgcttggaagccaagcacaaggaactggagtcgcacaagcgccgcttggcgaatttccgcaatcaacagggtgctaaccaaaggatccgctacaccaatccctatccagggggatcttcctcgcagcagcaacaacagcagcagcaacctcgcttcgcgcctcgacctcaattcgtggtgcgcgtcccacagccgcagcagcagcagaatcaacaagggactcgtgcgccccgtcctcctacgccaactgtgcaacctggtcaaggccgcagggacgctcaaggtccgcaacgtctgtgcttcaactgcttcgagcccgggcactttgcggataaatgcccaaagctgaggcgtcagcaaggccaagcgccttcccgctccaacaacggtgagaaggatgtcatttggggtcgggtgaaccacgtgacagccgaggacgtgctgacaactccagacgtcatcgtcgggagttcggagacgtgtttccggaagaactacccggtatgccgcccaaacgagagattgagttccggatag

SEQ ID NO: 14234 - DNA, 5430 bp, Oryza sativa
  Clone ID: TFbOSC405754j.C1.o5.fg
atggatgaagtcgggggtcgatggacattctccagggcaaatgaaggctacacgagctgcggcccgatggccggcagcgtcacccgtcgtggtttggacatgactggcttcgtcttggagctgcggggcatgtgcgtggtcttggggtatccacatggagtggattaccaggccaggccgctcccggagcaggagggtgaggatgcagagcctcacgctggttgggaggtcactgcagtgatcctctccggctctcccgagcggacttcgctggcagtcaccgcgggtggggattccttccccgccgcttgccagaacgccgctctcctcgccatcggcacccttcaccagcgctacccggacgagttgcagcactcgccctaccgctaccaccctcgtcgcggaggagcccgcgactacgccaccttccgagacgccagctcggaggatgacgctaccgtcgtgcatctggcacgcatggtggaggcgtacgacgcggctcgtatcgacttccaccagatggtgcgccgtggcatggtcgagaacaacctgaagatcttggagctgcgtcaggagaatctgcagctcaagaaggacctcgacgcgttggaggcgcagctgcatcagctcaagatcgcccagggagaggacagccgccccaagcgtcgccgcgtctgtcgcagccagaagatcaccgcccgcaagagcacctccaggcccgagcttgttcgtcagtccctggcgtggacctgcttcgtcgagacccctcgtgccgagcctgcgcccgtggttccccaggagggggaagcctccggcgttggtagctcggagggtgcgctgttgctcaccttccgtcctggcccgtcgcagcgctctccttctctgtttgctggttctgtgtggggttttcagatggtgacgaccaggagaaatgttaacaccggtgaaggcaaccaacccgaaggcagcaaccccaaccaccaaggcaatccacctccacctccacctccgcctccaccaccaccaccagacaccaacgccattctcacccaaatcctcgcccaacaagccaacatgatgaatgctttcctccaccacctccaaaacccgccacaacagaatgctccaccaccccctccccaacactccaaactcgccgaattcctccgtatccgcccacccaccttctctagctccaacaatcccgtggatgcgttggactggttgcatgccgtggggaagaagctagacacggtgcagtgcagtgatgaggagaaagtcgtcttcgccgcccatcagctgcagggacccgcatctctatggtgggaccatttccaggctgcgcagccagaggggcagccgattacttgggctcgcttcaccgccgctttccggagaacccatgtgcccgctggagtcgtggctcttaagaaaagggaattccgggagttgaagcaaggcaaccgctccgtgatggagtatttgcatgagttcaacaatctagcccgttatgccccggaggatgtgcgggaagatgaggagaagcaggagaagttcttggcgggaatggaccctgagctgtccgtccgtctagtctctggggactatcctgattttcaacgactggtggacaagagcatccgcttggaagccaagcacaaggagctggaatcgcacaagcgccgcttggcgaatttccgcagtcagcagggtgctaaccagagggtccgctacaccaatccctatccagggggatcctcctcgcagcagcagcagcagcagcaacctcgcccagcgcctcgacctcaattcgtggtgcgcgtcccacagccgcagcagcaacagaatcagcaagggactcgtgcgccccgtcctcctacgccagctgtgcagcctggtcaaggccgcagggacgctcaaggtcagcagcgtctgtgcttcaactgcttcgagcccgggcactttgcggataaatgcccgaagccaaggcgtcagcaaggccaagcgcctccccgctccaacaacggcgggaaggatgtcattcggggccgtgtgaatcatgtgacggccgaggacgtgctgacaactccagacgtcatcgttggtacgttcctcgttcattccatccctgctaccattttgttcgactctggagcttcccactcgtttatatctgtgccattcgtggggagaaatcagttgggggtagaaaggcttagaaaccctctgctcatcaccacccctggcggggttatgacagcaaagtattatagccctgccgtccctatagaaattcaggggattccttttccctcggatctgattcttctagacaccaagaatttggatgtgatccttgggatggattggttggctcaattccaaggagtagtggattgcgcgaggcgcactgtcactctgtaccgagggccagaacaaccggttgttttctttgcacctccaacctctgtcagaagttcagaacttcatcagataggtctgtcagaaatccccatcgtcagagagttcggagacgtgtttccggaagaactacctggtatgccgcccaagcgagagattgagttccggatagatcttgttccaggaaccactcctctgcacaagcgaccctaccgtatggcagcaaatgaactggccgaagttaagaaacagttggaagagttgaaagaaaaggggtatatacgtccgagtacttccccatggggtgctcctgtgattttcgtagagaagaaagacaagacgaagaggatgtgcgtcgactacagagctctcaatgaagtcaccatcaaaaacaagtaccctcttccccggatcgatgatctgttcgatcagcttaaaggtgccactgtattctccaagattgatcttcgttccggatatcaccaattacgtattcgtgaagaagatattccgaagaccgcattcactacgcgatatggactgtatgaattcacggtgatgtcgttcggcttaaccaatgctcctgccttcttcatgaacttaatgaacaaagtgttcatggaatacttggataagttcgttgtggttttcatcgatgacattctgatatactcacaatcagaggaagaccatcagcaccatctccgtctggtgttgggaaagttgcgggaacatcaattgtatgccaagcttagcaagtgtgagttctggttgtccgaagtcaaattcttggggcacgtgatatctgctaaaggagttgctgtggaccccgaaacagtgaccgccgtcaccgattggaagcaacccaagacagtcactcagattcgcagtttcttaggtttggcaggatattaccggagattcattgagaacttctccaaaatcgctcgacccatgacacagttgttgaagaaagaagagaaatttgtgtggagcccgcaatgcgagaaggcgtttcaaactctcaaagaaaagctggtttcctcgccagtattaatcttgccggatactcgcaaggatttcatggtgtattgtgatgcttcgcgccaaggattggggtgcgtgctcatgcaggacggtcatgtggtagcctatgcctcacgtcagctacgacctcatgaaggcaactaccctacacatgacttggagttagccgcagtagttcatgctctaaaaatctggcggcactatctcattgggaatcgctgcgaaatatatactgatcataagagtttgaaatacatcttcactcagtcggacctgaatcttcggcaaaggagatggttagaactcatcaaggattatgatgtgggaattcactatcatcctggtaaggctaacgtggttgccgacgctctaagtcgaaaaggccattgcaacgctctcaacgtccgtagcattccgcccgagcttaatcaacagatggaagccctgaacctaagcatagttggtcgcggattcttggctgcgttggaagccaagcccaccttgctcgatcaaatccgcgaggctcagaagaatgatccggacatgcatggactcctcaagaatatgaaacaaggtaaagccgcaggtttcacagaggatgaacacggaaccttatggaacggaaagcgggtatgcgttccagatagcagagaacttaaacagctgatacttcaggaagctcacgaaagtccttattccattcacccgggcagtaccaagatgtacttagacttgaaggagaaatactggtgggtcagcatgaagcgggaaattgcagagtttgtggctctatgtgatgtgtgccagcgtgtcaaggcagaacaccagcgaccggccggacttctccaacctctccaagtgccggagtggaaatgggatgaaattgggatggatttcatcaccggacttccaaaaacccaaggtgggtatgattctatatgggtaatagtggatcgattaaccaaggtagctcgattcattcctgtgaagaccacctatggagggaataaactagcggagctctacttcgctaggatcgtgagtctccatggcgttcccaagaaaatcgtatctgataggggaagccaattcacctctcacttttggaagaagctccaagaagagcttggtacccgactaaatttcagcaccgcatatcacccgcagacagatggacagaccgaacgtctaaatcagatcctagaagatatgctccgcgcatgtgtcctagatttcgggaagacctgggataagagtctcccctatgccgagttctcctacaataacagctatcaagccagcatacaaatggcaccatatgaagcgttgtacgggcgcaaatgccggacaccactattgtgggaccaagttggggaaagccaagtgttcgggactgatatcctgagagaagctgaagctaaagtcagaatcattcgggataatctaaaggtggcacagtctcggcagaaaagttatgcagataaccgtcgccgtgatctggaattcgcagtggatgactttgtgtatcttcgggtcacgccattgcgaggggtgcacaggtttcggacaaaagggaagctcgcacctcggtatgtgggtccctttcgtatcactgctcgacgcggagaagtcgcctaccagctggagttgcccgcctccttgggcaacgtgcatgatgtgttccatgtgtcgcaactcaagaaatgtcttcgagtgccatccgagcaggccgactcagagcaaattgaagttcgcgaagacttgacctacgtggagaggccagtaaaaatcctggacgccatggagcgcagaaccaggaaccgggtaatccgtttttgcaaggtccagtggagcaaccacgccgaagaagaagctacttgggagcgcgaagacgagctgaaggcagcccatcccgatctcttcgccagttcttccgaatctcggggtcgagattccgtttaa

SEQ ID NO: 14235 - DNA, 5274 bp, Oryza sativa
  Clone ID: TFbOSC408104j.C1.o1.fg
atggatgaagtcgggggtcgatggacattctccagggcaaatgaaggctacacgagctgcggcccgatggccggcagcgtcacccgtcgtggtttggacatgattggcttcgtcttggagctgcggggcatgtgcgtggtcttggggtatccacatggagtggattaccaggccaggccgctcccggagcaggagggtgaggatgcagagcctcacgctggttgggaggtcactgtagtgatcctctccggctctcccgagcggacttcgctggcagtcaccgcgggcggagactccttccccgccgcttgccagaacgccgctctcctcgccatcggcacccttcaccagcgctacccggacgagttgcagcactcgccctaccgctaccaccctcgtcgcggaggagcccgcgacttcgccaccttccgagatgctagctcggaggatgacgccaccgtcgtgcatctggcacgcatggtggaggcatacgacgcagctcgtattgacttccatcagatggtgcgtcgtggcatggtggagaacaacatgaagatcctggagctgcggcaggagaacctgcagctcaagaaggacctcgacgcgttggaggcgcagctgcatcagctcaagatcgcccagggagaggacagccgtcccaagcgtcgccgcgtctgccgcagccagaagatcaccgcccgcaagagcacctccaggcccgagcttgttcgtcagtccctggcgtggacctgcttcgtcgagacccctcgtgccgagcctgcgcccgtggttccccaggagggggaagcctccggcgttggtagctcggaggctccttctctgtttgctggttctgtgtggggttttcagatggtgacgaccaggagaaatgttaacaccggtgaaggcaaccaacccgagggcagcaaccccaacccccaaggcaacccacctccaccaccaccaccagacaccaacgccattctcacccaaatcctcgcccaacaagccaacatgatgaatgctttcctccaccacctccagaatccacctcaacagaatgctccaccaccccctccccaacactctaaactcgccgagttcctccgcatccgcccacctaccttttctagctccaacaaccccgtggatgcgttggattggttgcatgccgtggggaaaaagctagacacggtgcagtgcagcgatgaggagaaagtcgtcttcgccgcccatcagctgcagggacccgcatctctctggtgggaccacttccaggctacgcagccagagggacaaccgattacttgggctcgcttcaccgccgctttccggagaacccatgtgcccgccggagtcgtggctctcaagaagagggaattccgagagttgaagcaaggcaaccgctccgtgatggagtatttgcacgagttcaacaatctggcccggtacgcccctgaggatgtgcgggaagatgaggagaagcaagagaagttcttggcaggaatggaccctgagctgtccgtccgtctagtctctggggactatcctgattttcaacgactggtggacaagagcatccgcttggaagccaagcacaaggagctggaatcgcacaagcgccgcttggcgaatttccgcaatcaacagggtgctaaccagagggttcgctacaccaatccctacccagggggatcctcctcgcagcaacagcagcagcaaccccgcccagcgccccgacctcaattcgtggtgcgcgtcccacagccgcagcagcaacagaatcaacaagggactcgtgcgccccgtcctcctacgccagctgggcagcccgttcaaggccgcagggacgcttcaggtccgcagcgtctgtgcttcaactgcttcgagcccgggcactttgcggacaaatgcccgaagccaaggcgtcagcaaggccaagcgcctccccgccccaacaacggtggccagggcgtcatccgtggtcgtgtgaatcacgtgacggccgaggacgtgctgacaactcccgacgtcatcgttggtacgttcctcgttcattccatccctgctacaattttgttcgactctggagcttcccactcgtttatatctgtgccattcgtggggagaaatcagttgggggtagaaaggcttagaaaccctctgctcatcaccacccctggaggggttatgacagcaaagtattatagccctgccgtccctatagaaattcaggggattccttttccctcggatctgattctgctagataccaagaacttggatgtgatccttgggatgaattggttggcccaattccaaggggtagtggattgcgcgaggcgcactgtcactctgtaccgaggaccagaacaaccggttgttttctttgcacccccaacctctgtcagaagttcagaacttcatcagatagaactgtcagaaatccccgtagtcagagagttcggagacgtgtttccggaagaactacctggtatgccgcccaagcgagagattgagttccggatagatcttgctccaggaaccactcctctgtacaagcgaccctaccgtatggcagcaaatgaactggccgaagttaagaaacagttggaagagttgaaagaaaaggggtatatacgtccgagtacttccccatggggtgctcctgtgatttttgtggagaagaaagacaaaacgaagaggatgtgcgttgactacagagctctcaatgaagtcaccatcaaaaacaagtaccctcttccccggatcgatgatctgttcgatcaactcaaaggtgccactgtattctccaagattgatctccgttccggatatcaccaattacgtattcgtgaagaagatattccgaagaccgcattcaccacgcgatacgggctgtatgaattcacggtgatgtcgttcggcttaaccaatgctcctgccttcttcatgaacttgatgaacaaagtgttcatggaatacttggataagttcgttgtggttttcattgatgacattctgatatactcccaatcagaggaagaccatcagcaccatctccgtcaggtgttgggaaagttgcgggaacatcaattgtatgccaagcttagcaagtgtgagttctggttgtccgaagtcaaattcttagggcacgtgatatcttcaaaaggagttgctgtggatcccgaaacagtgaccgccgtcaccgattggaagcaacccaagacagttactcaagtccgcagtttcttaggtttggcaggatactatcggagattcatcgagaacttctccaagatcgcccgacccatgacacagttgttgaagaaagaagagaaatttgtgtggagcccgcaatgcgagaaggcgttccaaactctcaaagaaaagctggtttcctcgccagtgttaatcttgccggatactcgcaaggatttcatggtgtattgtgatgcttcgcgccaaggattggggtgcgtgctcatgcaggacggtcatgtggtagcctatgcctcacgccagctacgtcctcatgaaggcaactaccctacgcatgacttggaattagccgcagtggttcatgctctaaaaatctggcggcactatctcattgggaatcgctgtgaaatctatactgatcacaagagcttgaaatacatcttcacccagtcggatctgaatcttcggcaaaggagatggttagaactcatcaaggattatgatgtgggaatacactatcatcctggtaaggctaacgtggttgccgacgctctaagtcggaagagccattgcaatactctcaacgtccgaggcattccacccgagcttaatcaacagatggaagccctgaacctaaacatagttggtcgtggatgtttggccgcgttggaagccaagcccaccttgctcgatcaaatccgcgaggctcagaagaatgatccggacatgcatggactcctcaagaatatgaaacagggtaaagccgctggtttcacagaggatgaacacggaaccttatggaacggaaagcgggtatgcgttccagatagcagagaacttaaacagctgatacttcaggaagctcacgaaagtccttattccattcacccgggcagtaccaagatgtacttagacttgaaggagaaatactggtgggtcagcatgaagcgggaaattgcagagtttgtggctctatgtgatgtgtgccagcgtgtcaaggcagagcaccagcgaccggctggacttctccagcctctccaagtgccggaatggaaatgggatgaaattgggatggatttcatccccggccttccaaaaacccaaggtggatatgattctatatgggtaatagtggatcgattaaccaaggtagctcgattcattcctgtgaagaccacctatggagggaataaactagcggagctctacttcgctagggtcgtgagtctccatggcgttcccaagaaaatcgtatctgataggggaagccaattcacctctcacttttggaagaagctccaagaagagcttggtacccgactaaatttcagcaccgcgtatcacccgcagacagatggacagaccgagcgtctaaatcagatcttagaagatatgcttcgcgcatgtgtcctggacttcgggaagacttgggataagagtctcccctatgccgagttctcctacaataacagttatcaagccagcatacaaatggcaccttatgaagcgctgtatgggcgcaaatgccggacaccactcttgtgggaccaagctggagaaagccaagtgttcgggactgatatcctgagagaagctgaagctaaagtcagaatcattcgggataatctaaaggtggcacagtctcggcagaaaagttatgcagataaccgtcgccgtgatctggaattcgcagtggatgactttgtgtatcttcgggtcacgccattgcgaggtgtgcacaggtttcagacaaaagggaagctcgcgcctcggtatgtgggtcccttccgtatcatcgctcgacgcggagaagtcgcctaccagctggagttgcccgcctccttgggcaacgtgcatgatgtgttccatgtgtcgcaactcaagaaatgccttcgagtgccatccgagcaggccgactcagagcaaattgaagttcgcgaagatttaacgtatgtggagaagccagtgaaaatcctggacaccatggagcgcaggaccaggaaccgggtaatccgtttttgcaaggtccagtggagcaaccacgccgaataa

SEQ ID NO: 14236 - DNA, 2683 bp, Oryza sativa
  Clone ID: TFbOSC408351j.C1.o6.fg
tcaagtccagaccacgacggttgatgctgccggccatctacaaacaaaaacaaaagagaaaagcaacattttaaagcctggtcaaggccgcagagacgttcaaggtcagcagcgtctgtgcttcaactgcttcgagcccgggcactttgcggataaatgcccaaagccgaggcgccagcaaggccaagcgcctccccgccccaacaacggtggtaaggatgtcattcggggtcgtgtgaaccacgtgactgccgaggatgtgctgacaactccagacgtcatcgttggagtagtggattgcgcaagacgcactgtcactctgtaccgagggccggaacaaccggttgttttctttgcacccccaacctctgtcggcagttcagaacttcatcagataggactgtcagaaatccccatcgtcagtgagttcggagatgtgtttccggaagaactacccggtatgccgcccaagcgagagattgagttctggatagatcttgctccaggaaccactcctctgtacaagcgaccctaccgtatggcagcaaatgaactggccgaagtcaagaaacagttggaagagttaaaagaaaaggggtacatatggccgagcacttccccctggggtgctcctgtgatttttgtggagaagaaagacaagacaaagaggatgtgcgttgactacagagctctcaatgaagttactatcaaaaaacaacttaaaggtgccacggtattctccaagattgatcttcgctccggatatcaccaattgcgtatccgtgaagaagatatcccgaagaccgtattcaccacgcgttatggactgtatgaattcacggtgatgtcgttcgggctaaccaatgctcctgccttcttcatgaacttaatgaacaaagtgttcatggtatacttggataagtttgttgtggttttcattgacgacattctggtgtactcacaatcagaggaagaccatcagcaacatctccgtctggtgttgggaaagttgcgggaacatcaattgtatgccaagcttagcaagtgtgagttctggttgtccaaagtcaaattcttagggcacgtgatatctgctaaaggagttgctgtggaccccgaaacagtgaccgccgtcacagattggaagcaacccaagacagttacccaggttcgcaactttttgggtttggcaggatactaccggaggttcatcgagaacttctccaaaatcgctcgacccatgacacagttgttgaagaaagaagaaaaatttgtgtggagcccgcaatgcgagaaggcgttccaaactttcaaggaaaagctggtttccccgccagttttaatcttaccggatactcgcaaggacttcatggtgtactgtgatgcttcgcgccaaggattggggtgcgtgcttatgcaggaaggtcatgtggtagcctatgcctcatgtcagctatggcctcatgaaggcaactaccctacccatgatttggagttggccgctgtgggtaaagccgctggtttcacagaagatgaacacggaaccctatggaacggaaatcgggtatgcgttccgaacgacaaggaacttaaacagttgatacttcaggaagctcacgaaagtccctattccatccaccctggcagtacgaagatgtgcttagacttgaaagaaaaatattggtgggttagtataaagcgggaaattgcagagttcgtggccctttgtgatgtgtgccagcgtgtcaaggcagagcaccaacgaccggccggacttctccaacctctacaggtaccagaatggaaatgggttgaaattgggatgaatttcatcaccggacttccaaaaacccaaggctgttatgactctatatgggtagtcgtggaccgactaaccaaggtagctcggttcattcccgtgaagaccacctatggagggaacaaactagctgaactctacttcgctaggatcgtgagtctccatggcgttcctaagaaaattgtatctgataggggaagccaattcacctctcatttctggaagaagctccaagaagagttggattttgggaagacatgggataagagtctcccctacgccgagttctcctacaataacagctaccaagccagcatacagatggcacagtacgaagcgttgtatggccgcaaatgccggacaccactattgtgggaccaagtcggggaaagccaagtgttcgggaccgacatcttgagagaagctgaagcgaaggtcaggaccattcgggagaatctaaaggtagcccagtctcggcagaagagttatgcagacaaccgacgccgtgacctggaattcgcagtggatgactttgtgtttctccgggtcacgccgttgcgaggcgtacactggtttcagacgaaagggaagctcgcacctcggtttgtgggtcctttccgtatcattgctcgacgcggagaagtcgcttaccagttagagctgcccgcctccttgggcaacgtgcatgatgtgttccatgtgtcgcaactcaagaaatgccttcgagtgccgtccgagcaggccgactcagagaagattgaagttcgcgaagacttgacctacgtggagagaccagtgaaaatcctggacaccatggagcgcaggaccaggaaccaggtaatccgtttttgcaaggtccaatga

SEQ ID NO: 14237 - DNA, 4617 bp, Oryza sativa
  Clone ID: TFbOSC408405j.C1.o4.fg
atgtcatggcacagggccggtgtcctgctgctaggggttcagtcctgcctgcctgtcccgggggttccggccgtaggtgggattgggtcggtactcttgtctatggctaggatgggttggaaactatgtcacgtctttcgtctgtataccgtggtgatgttgacgaccaggagaagtgctgctaccggtgatggcaaccaacccgaaggcagcaaccaccaccaccagggcagcccacctccacctcctcctccgcctccaccaccaccaccagacaccaacgccattctcacccaaatcctcgcccagcaggccaacatgatgactgctttcctccaccacctccaaaattcgccacaacataatgctccaccaccacctccccaacactctaaactcgccgagttcctccgcatccgcccacctaccttctctagctccaacaaccccgtggatgcgttggattggttgcatgccgtggggaaaaagctagacactgtgcagtgcagcgatgaggagaaagctacgcagccagaggggcaacctattacttgggctcgcttcaccgccgctttccggagaacccatgtgcccgccggagtcatggcccttaagaaaagggaattccgagagttgaagcaaggcaaccgctccgtgatggagtatttgcatgagttcaacaacctggcccgttacgccccggaggatgtgcgggaagatgaggagaagcaagagaagttcttggcaggaatggaccctgagctgtccgtccgtctagtctccggggactatccggatttccaacgtctggtggacaagagcatccgcttggaagccaagcacaaggaactggagtcgcacaagcgccgcttggcgaatttccgcaatcaacagggtgctaaccaaagggtccgctacaccaatccctatccagggggatcctcctcgcagcagcaacaacagcagcagcaacctcgctccgcgcctcgacctcaattcgtggtgcgcgtcccacagccgcagcagcagcagaatcaacaagggactcgtgcgccccgtcctcctacgccaactgtgcagcctggtcaaggccgcagggacgctcaaggtccgcagcgtctgtgcttcaactgcttcgagcccgggcactttgcggataaatgcccaaagccgaggcgtcagcaaggccaagcgcctccccgctccaacaacggtgggaaggatgtcattcggggtcgggtgaaccacgtgacggccgaggacgtgctgacaactccagacgtcatcgttggtacgttcctcattcattccatccctgctaccattctgttcgactctggagcttcccactcgtttatatctgtgccattcgtggggagaaatcagttgggggtagaaaggcttaggaaccctctgctcatcaccacccctggaggggttatgacagcaaagtattatagccctgccgtccccatagaaattcaggggattccttttccctcggatctgattctgctagacaccaagaacttggatgtgatccttgggatgaattggttggctcaattccaaggagtagtggattgtgcgagacgcactgtcactctgtaccgagggccggaacaaccggttgttttctttgcacccccaacctctgtcagtagttccgaacttcatcagataggactgtcagaaatccccattgtcagagagttcggagacgtgtttccggaagaactacccggtatgccgcccaaacgacagattgagttccggatagatcttgctccaggaaccacacctctgtacaagcgaccctaccgtatggcagcaaatgaactggctgaagttaagaaacagttggaagagttgaaagaaaaggggtatatacgtccgagtacttccccctggggtgctcctgtgatttttgtggagaagaaagacaagacgaagaggatgtgcgttgactacagagctctcaatgaagtcaccatcaaaaacaagtaccctcttccccggatcgatgatctgttcgatcagcttaaaggtgccactgtattctccaagatcgatcttcgttccggatatcaccaattacgtattcgtgatgaagatattccgaagaccgcattcaccacgcgatacggactgtatgaattcacggtgatgtcgttcggtttaaccaatgcacctgcctttttcatgaacttaatgaacaaagtgttcatggaatacttggataagtttgttgtggttttcattgatgacattctggtatactcacaatcagaggaagaccatcagcaccatctccgtctggtattgggaaagttgcgggaacatcaattgtatgccaaacttagcaagtgtgagttctggttgtccgaagtcaaattcttagggcacgtgatatctgctaaaggagttgctgtggaccccgaaacagtgaccgccgtcattgattggaaacaacccaagatagtcactcaagtccgcagtttcttaggtttggcaggatactaccggaggttcatcgagaacttctccaaaatcgctcgacccatgacacagttgttgaagaaagaagagaaatttgtgtggagcccgcaatgcgagaaggcgttcaaaactctcaaagaatggctggtttcctcgccagtgttaatcttgccggatactcgcaaggacttcatggtgtattgtgacgcttcgcgccaaggattggggtgcgtgctcatgcaggatggtcatgtggtggcctatgcctcacgccagctacggcctcatgaaggcaactaccctacccatgatttggagttagctgcggtggttcatgctctaaaaatctggcggcactatctcattgggaatcgctgtgaaatatatactgatcataagagtttgaaatacatcttcactcagtcggacctgaatcttcggcaaaggagatggttagaactcatcaaggattacgatgtgggaattcactatcatcctggtaaggccaacgtggtcgctgacgccctaagtcgaaagagccattgcaacactcttaacgtccgcggcattccacccgaacttaatcaacagatggaagccctgaacctaagcatagttggtcgcggattcttggctgcgttggaagccaagcctaccttgctcgatcgaatccgcgaggctcagaagaacgatccggacatgcatggactcctcaagaatatgaaacagggtaaagccgctggtttcacagaggatgaacacggaaccctatggaacggaaatcgagtatgcgttccagataacagagaacttaaacagctgatacttcaggaagcccacgaaagtccttattccatccaccctggcagtacgaagatgtacttagacttgaaggagaaatactggtgggttagtatgaagcgggaaattgcagagttcgtggccctttgtgatgtgtgccagcgtgtcaaggcagagcaccaacgaccggccggacttctccaacctctccaagtacctgaatggaaatgggatgaaattgggatggattttatcaccggacttccaaagacccaaggtggatatgattctatatgggtagtggtggatcgattaaccaaggtagctcgattcattcctgtgaagaccacctatggagggaacaaactagccgagctctacttcgcaaggatcgtgagtctccatggcgttcccaagaaaatcgtatctgataggggaagccaattcacctctcacttttggaagaagctccaagaagagctgggtacccgattaaacttcagcaccgcataccacccgcagacagatgggcagaccgagcgtctaaatcagatcctagaagatatgcttcgcgcatgtgtcctggatttcgggaagacctgggataagagtctcccctatgccgagttctcctacaataacagctatcaagccagcatacaaatggcaccttatgaagcgttgtatgggcgcaaatgccggacaccgctcttgtgggatcaagttggggaaagccaagtattcgggactgatatcctgagagaagctgaagctaaagtcagaaccattcgggataatctaaaggtggcacagtcccggcagaaaagttatgcagataaccgtcgccgtaacctggaattcgcagtggacgattttgtgtaccttcgggtcacgccattgcggggtgtacacaggtttcagacaaaagggaagctcgcacctcggtatgtgggtcctttccgtatcgttgcccgacgcggagaagtcgcttaccaattggacctgcccgcctccttgggcaacgtgcatgatgtgttccatgtgtcgcaactcaagaaatgccttcgagtgccatctgcgcaggccgactcagagcaaattgaagttcgcgaagacttgacctacgtggagaggccagtgaaaatcctggacaccatggagcgcaggaccaggaaccgggtaatccgtttttgcaaggtccagtggagcaaccacgccgaagaagaagctacctgggagcgtgaagacgagctgaaggcagcccatcctgatctcttcgccagttcttccgaatctcggggtcgagattccgtttaa

SEQ ID NO: 14238 - DNA, 5142 bp, Oryza sativa
  Clone ID: TFbOSC409045j.C1.o3.fg
atgtcgtggcacagggccggtgtcctgctgctaggggctcagtcctgcctgcctgtcccgggggttccggccgtaggtgggattgggtcggtactcttgtctatggctaggatgggttggaaactatgtcatgtcttccgtccgtataccatggtgatggccggcagcgttagtcgtcgtggtctggacatgactggtttcgtcttggagctgcggggtatgtgcgttgtcctggggtatccgcatggagtggactaccagggcaggccgctcccggagcaggagggtgacgatgcagagccccacgctgcttgggagcgctacccggacgagctgcagcactcgccctaccgctaccaccctcgtcgcggaggagcccgcgactacgccaccttctgggatgctagctcagaggatgacgctaccatcatgcacctggcgcgcatggtggaggcgtacgacgcggctcgtatcgacttccatcagatggtgcgccgtgggatggtcgagaacgacctgaagatcctggagctgcgtcaggagaatctgcagctgaagaaggacctagacgcagtggaggcacagctgcatcagctcaagatcacccagggagaggtctgtcgccccaagcgtcgccgcgtctgccgcagccagaagatcaccgcccgcaagagcacctccaggcccgagcttgttcgtcagtccctggcgtggacttgcttcgtggagacccctcgtgccgagcccgcgcccgtggttcctcaggagggggaagcctccggcgtcggtagcacggaggatgcgctgttgctcaccttccgtcctggcccgtcgcagtggagaaatgctgccaccagtgatggcaaccaacctgaaggcagcaaccacaacaaccatggcagcccacctccacctcctccaccgcctccaccaccaccaccagacaccaacgccattctcacccaaatcctcgcccagcaggccaacatgatggctgctttcctccaccacatccaaaatccgccacaacataatgctccaccaccacccccacaacactctaaactcgccgagttcctacgcatccgtccacctaccttctctagctccaacaaccccgtggatgcgttggattggttgcatgccgtggggaaaaagctagacactgtgcagtgcagcgatgaggagaaagtcgtcttcgccgcccaccaactgcagggacccgcatctctatggtgggatcatttccaggctacgcagccagaggggcagcctattacttgggcccgcttcaccgccgccttccggaggacccatgtgcccgccggagtcatggcccttaagaaaagggagttccgagagttgaagcaaggcaaccgctccgtgatggagtatttgcatgagtttaacaacttggcccggtacgccccggaggatgtgcgggaagatgaggagaagcaagagaagttcttggcaggaatggacccggagctgtctgtccgtctagtctccggtgactatccggatttccaacgtctggtggaaaagagcatccgcttggaagccaagcacaaggaactggagtcgcacaagcgtcgcttggcgaatttccgcaaccaacagggtgctaaccaaaggatccgctacaccaatccctatccagggggatcttcctcgcagcagcagcaacctcgctccgcgcctcgacctcaattcgtggtgcgcgtcccacagccgcagcaacagcagagccagcaagggacccgtgcgccccgtcctcctacgccagccgcgcagtctggacaaggccgcagggacgttcaaggtccgcagcgtctgtgcttcaactgcttcgagcccgggcactttgcggataaatgcccgaagccgaggcgccagcaaggccaagcgcctccccgctccaacaacggtggtaaggatgtcattcggggtcgtgtgaaccacgtgacggccgaggacgtgctgacaactccagacgtcatcgttggtacgttcctcatccattccatccctgctaccattttgttcgactctggagcttcccacttgtttatatctgtgccattcgtggggagaaatcagttgggggtagaaaggcttaggaaccctctactcatcaccacccctggaggggttatgacagcaaagtattatagtcctgccgtccctatagaaattcaggggattccttttccctcggatctgattcttctagacaccaagaacttggatgtgatccttgggatgaattggttggctcaattccaaggagtagtggattgtgcaagacgcactgtcactctgtaccgagggccggaacaaccggttgttttctttgcacccccaacctctgtcagtagttcagaacttcatcagataggactgtcagaaatccccattgtcagagagttcggagacgtgtttccggaagaactacccggtatgccgcccaagcgagagattgagttccggatagatcttgctctaggaaccactcctctgtacaagcgaccctaccgtatggcagcaaatgaactggccgaagttaagaaacagttggaagagttgaaagaaaaggggtatatacgtccgagtacttcctcctggggtgctcctgtgatttttgtggagaagaaagacaagacgaagaggatgtgcgttcactacagagctctcaatgaagtcaccatcaaaaacaagtaccctcttccccggatcgatgatctgttcgatcagcttaaaggtgccacggtattctccaagattgatcttcgttctggatatcaccagttgcgcatccgtgaagaagatattccgaagaccgcattcaccacgcgatacggactgtatgaattcacggtgatgtcgttcggtttaaccaatgctcctgccttcttcatgaacttaatgaacaaagtgttcatggaatacttggataagtttgttgtggttttcattgatgacattctgaagcaacccaagacagtcactcaaattcgcagtttcttaggtttggcaggatactaccggaggttcatcgagaacttctccaaaatcgctcgacccatgacacagttgttgaagaaagaggagaaatttgtgtggagcccgcaatgcgagaaggcgttcaaaactctcaaagaaaagctggtttcctcgccagtgttaatcttgccggatactcgcaaggacttcatggtgtattgtgacgcttcgcgccaaggattggggtgcgtgctcatgcaggacggtcatgtggtggcctatgcctcacgccagctacggcctcatgaaggcaactaccctacccatgatttggagttagccgcggtggttcatgctctaaaaatctggcggcactatctcattgggaatcgctgtgaaatatatactgatcataagagtttgaaatacatcttcacccagtcggatctgaatcttcggcagaggagatggttagaactcatcaagaattatgatgtgggaattcactatcatcctggtaaggccaacgtggtcgccgacgctctaagtcgaaaaagccattgcaacactcttaacgtccgtggcattccacccgaacttaatcaacagatggaagccctgaatctaagcatagtgggtcgcggattcttggctgcgttggaagccaagcccaccttgctcgatcaaatccgcgaggctcagaagaacgatccggacatgcatggactcctcaagaatatgaaacagggtaaagccgctggtttcacagaggatgaacacggaaccctatggaacagaaatcgggtatgcgttccagataacagagaacttaaacagctgatacttcaggaagctcacgaaagtccttattccatccaccctggcagtacgaagatgtacttagacttgaaggagaaatactggtgggttagtatgaagcgggaaattgcagagttcgtggccctttgtgatgtgtgccagcgtgtcaaggcagagcaccaacgaccggccggacttctccaacctctccaagtaccagaatggaaatgggatgaaattgggatggatttcatcaccggacttccaaaaacccaaggtggatatgattctatatgggtagttgtggatcgattaaccaaggtagctcgatttattcctgtgaaggccacctatggagggaacaaactagccgagctctacttcgctaggatcgtgagtctccatggcgttcctaagaaaattgtatccgataggggaagccaattcacctctcacttttggaagaagctccaagaagagctgggtacccgattaaatttcagcaccgcgtatcacccgcagacagatggacagaccgagcgtctaaatcagatcctagaagatatgcttcgcgcatgtgtcctagatttcgggaagacctgggataagagtctcccctatgccgagttctcctacaataacagctaccaagccagcatacaaatggcaccttatgaagcgttgtatgggcgcaaatgccggacaccgctattgtgggaccaagttggggaaagccaagtgttcgggaccgatatcctgagagaagctgaagctaaagtcagaaccattcgggataatctaaaggtggcccggtctcggcagaagagttatgcagacaaccgacgccgtgacctagaattcgcagtggatgactttgtgtatcttcgggtcacgcccttgcgaggtgtacacaggtttcagacaaaggggaagctcgcacctcggtttgtgggtcctttccgtatcattgctcggcgcggagaagtcgcttaccagttggagctgcccgcctccttgggcaacgtgcatgatgtgttccatgtgtcgcaactcaagaaatgtcttcgagtgccatccgagcaggccgactcagagcaaattgaagttcgcgaagacttgacctacgtggagaggccagtgaaaatcctggacaccatggagcgaaggaccaggaaccgggtaatccgtttttgcaaggtccaatggagcaaccacgccgaggaagaagctacttgggagcgtgaagacgagctgaaggcagcccatcccgatctcttcgtcagttcttccgaatctcggggtcgagattccgtttaa

SEQ ID NO: 14239 - DNA, 1647 bp, Oryza sativa
  Clone ID: TFbOSC410295j.C1.o1.hg
atgatgactgctttcctccaccacctccaaaatccgccacaacagaatgctccaccaccacccccacaacactctaaactcgccgagttcctccgcatccgtccacctaccttctctagctccaacaaccccgtggatgtgttggattggttgcatgccgtggggaaaaagctagacaccgtgcagtgcagcgatgaggagaaagtcatcttcgccgcccaccaactgcaggggcccgcatttctatggtgggaccatttccaggctacgcagccagaggggcaacctattacttgggcccgtttcaccgccgctttccagagaacccatgtgcccgccggagtcgtggcccttaagaaaagagaattccgagagttgaagcaaggcaactgctccgtgatggagtatttgcatgagttcaacaacctggcccgttacgccccggaggatgtgcgggaagatgaggagaagcaagagaagttcttggcaggaatggaccctgagctgtccgtccgtctagtctccggggactatccggatttccaacgtctggtggacaagagcatccgcttggaagccaagcacaaggaactggagtcgcacaagcgccgcttggcgaatttccgcaatcaacagggtgctaaccaaagggtccgctacaccaatccctatccagggggatcctcctcgcagcagcaacaacagcagcagcaacctcgctccgcgcctcgacctcaattcgtggtgcgcgtcccacagccgcagcagcagcagaatcaacaagggactcgtgcgccccgtcctcctacgccagccgtgcagcctggtcaaggccgcagggacgctcaaggtcagcagcgtctgtgcttcaactgcttcgagcccgggcactttgcggataaatgcccaaagccgaggcgtcagcaaggccaagcgcctccccgctccaacaacggtgggaaggatgtcattcggggtcgtgtgaaccatgtgacggccgaggacgtgctgacaactccagacgtcatcgtcggtacgttcctcattcattccatccctgctaccattttgttcaactctggagcttcccactcgtttatatctgtgccattcgtggggagaaatcagttgggggtagaaaggcttaggaaccctctgctcatcaccacccctggaggggttatgacagcaaagtattatagccctgccgtccctatagaaattcaggggattccttttccctcggatctgattctgctagacaccaagaacttggatgtgatccttgggatgaattggttggctcaattccaaggagtagtggattgtgcaagacgcactgtcactctgtaccgagggccggaacaaccggttgttttctttgcacccccaacctctgtcagtagttcagaacttcatcagataggactgtcagaaatccccatcgtcagagagttcggagacgtgtttccggaagaactactcggtatgccgcccaagcgagagattgagttccggatagatcttgctccaggaaccactcctcggtacaagcgaccctaccgtatggcagcaaatgaactggctcaaaactgggattctacttgccactggctagctttgatcaggtcatcaaggtatatataa

SEQ ID NO: 14240 - DNA, 5118 bp, Oryza sativa
  Clone ID: TFbOSC411279j.C1.o18.fg
atgtcatggcacagggccggtgtcctgctgctgggggctcagtcctgcctgcctgtcccgggggttccggccgtaggtgggattgggtcggtactcttgtctatgcctaggatgggttggaaactatgtcacgtcttccgtctgtataccgtggtgatggccggcagcgtcacccgtcgtggtttggatatgactggcttcgtcttggagctgcggggcatgtgcgtggtcttggggtatccacatggagtggactaccaggccaggccgcttccggagcaggagggtgacgatgcagagccccacgctggttgggaggtcactgtagtgatcctctctggctctcccgagcggacttcgctggcagtcaccgcgggtggagattccttccccgccgcttgccagaacgccgctctcctcgccatcggcactcttcaccagcgctacccggacgagttgcagcactcgccctaccgctaccaccctcgtcgcggaggagcccgcgactacgccaccttccgggatgctagctcggaggatgacgctaccatcgtgcacctggcgcgcatggtggaggcgtacgacgcggctcgaatcgacttccatcagatggtgcgtcgcgggatggtcgagaacaacttgaagatcctggagctgcgtcaggagaacctgcagctcaagaaggacctagacgcggtggaggcgcagctgcatcagctcaagatcgcccagggagaggtctgccgccccaagcgtcgccgcgtctgccgcagccagaagatcaccgcccgcaagagcacctccaggcccgagcttgttcgtcagtccctggcgtggacttgcttcgtcgagacccctcgtgccgagcccgtgcccgtggttccccaggagggggaagcctccggcgttggtagcacggaggatgcgctgttgctcaccttccgtcctggcccgtcgcagcggagaagtgctaacaccggtgctggcaaccaacccgaaggcagcaaccacaaccacgagggcaacccacctccacctcctcctccgcctccaccaccaccaccagataccaacgccattctcacccaaatcctcgcccagcaagccaacatgatgactgctttcctccaccacctccaaaatccgccacaacataatgctccaccaccacctccccaacactctaaacacgccgagttcctccgcatccgtccacctaccttctctagttccaacaaccccatggatgcgttggattggttgcatgccgtggggaaaaagctagacactgtgcagtgcagcgatgaggagaaagtcatcttcgccgcccaccaactgcaggggcccgcatctctatggtgggaccatttccaggctgcgcagccagaggggcaacctattacttgggctcgcttcactgccgctttccggaggacccatgtgcccgccggagtcgtggcccttaagaaaagagaattccgagagttaaagcaaggcaaccgctccgtgatggagtatttgcatgagttcaacaacctggcccgttatgccccggaggatgtgcgggaagatgaggagaagcaagagaagttcttggcaggaatggaccctgagctgtccgtccgtatagtctctggggactatccggatttccaacgtctggtggacaagagcattcgcttggaagccaagcacaaggaactggagtcgcacaagcgccgcttggcgaatttccgcaatcaacagggtgctaaccaaaggccgcagcagcagcagaatcaacaagggactcgtgcgccccgtcctcctacgccagccgtgcagcctggtcaaggccgcagggacgctcaaggtcagcagcgtctgtgcttcaactgcttcgagcccgggcactttgcggataaatgcccgaagccaaggcgtcagcaaggccaagcgcctccccgctccgacaacggtggtaaggatgtcattcggggtcgtgtgaatcacgtgacggccgaggacgtgctgacaactccagacgtcattgttggtacgttcctcatacattccatccctgctaccattttgttcgactctggagcttcccactcgtttatatctgtgccattcgtggggagaaatcagttgggggtagaaaggcttaggaaccctctgctcatcaccacccctggaggggttatgacagcaaagtattatagccctgccgtccctatagaaattcagggggttccttttcccacggatctgattctgctagacaccaagaacttggatgtgatccttgggatgaattggttggctcaattccaaggagtagtggattgcgcgagacgcactgtcactctgtaccgagggccggaacaaccggttgttttctttgcacccccaacctctgtcagaagttcagaacttcatcagataggactgtcagaaatccccatagtcagggagttcggagatgtgtttccggaagaactacccggtatgccgcccaagcgagagattgagttccgaatagatcttgctccaggaaccactcctctgtacaagcgaccctaccgtatggccgcaaatgaactggccgaagtaaagaaacagttggaagagttgaaagaaaaggggtacatacgtccgagtacttccccctggggtgctcctgtgatttttgtggagaagaaagacaagacgaagaggatgtgcgttgactacagagctctcaatgaagtcaccatcaaaaacaagtaccctcttccccggatcgatgatctgttcgatcagcttaaagaggaagaccatcagcaccatctccgtctggtgttgggaaagttgcgggaacatcaattgtatgccaaacttagcaagtgtgagttctggttgtccgaagtcaaattcttagggcacgtgatatctgctaaaggagttgctgtggaccccgaaacagtgaccgccgtcaccgattggaagcaacccaagacagtcacccaaattcgcagtttcttaggtttggcaggatactaccggagattcatcgagaacttctccaaaatcgctcgacccatgacacagttgctgaagaaagaagagaaatttgtgtggagcccgcaatgcgagaaggcgttccaaactctcaaagaaaagctggtttcctcgccggtgttaatcttgccggatactcacaaggatttcatggtgtattgcgacgcttcgcgccaaggattggggtgcgtgctcatgcaggacggtcatgtggtggcctatgcctcacgccagctacggcctcatgaaggcaactaccctacccatgatttggagttagcagcggtggttcatgctctaaaaatctggcggcactatctcattgggaatcgctgtgaaatatatacggatcataagagtttgaaatacatcttcactcagtcggacctgaatcttcggcagaggagatggttagaactcatcaaggattatgatgtgggaattcactatcatcctggtaaggccaacgtggttgccgacgctctaagtcgaaaaagccattgcaacactcttaacgtccgtggcattccacccgaacttaatcaacagatggaagccctgaacctaagcatagttagtcgtggattcttggctacgctggaagccaagcccaccttgctcgatcaaatccgcgaggctcagaagaacgacccggacatgcatggactcctcaagaatatgaaacagggtaaagccgctggtttcacagaggatgaacacggaaccctatggaacggaaatcgggtatgcgttccagataacagagaacttaaacagttgatacttcaggaagctcacgagagcccttattccattcacccgggcagtacaaatatgtacttagacttgaaggagaaatactggtgggttagcatgaagcgggaaattgcagagtttgtggccctatgtgatgtgtgccagcgtgtcaaggcagagcaccaacgaccggccggacttctccaacctctccaagtaccagaatggaaatgggatgaaattgggatggatttcatcaccggacttccaaaaacccaaggcggatatgattctatatgggtagttgtggatcgattaaccaaggtagctcgatttattcctgtgaagaccacctatggagggaacaaactagccgagctctacttcgctaggatcgtgagtctccatggcgttcccaagaaaatcgtatctgataggggaagccaattcacctctcatttctggaagaaactccaagaagagttgggaacccgattaaatttcagcaccgcgtatcacccgcagacagatggacagaccgagcgtctaaatcagatcctagaagatatgcttcgcgcatgtgtcctagatttcgggaagacctgggataagagtctcccctatgccgagttctcctacaataacagttatcaagccagcatacaaatggcaccttatgaagcgttgtacgggcgcaaatgccggacaccactattgtgggaccaagttggagaaagccaagtgttcgggattgatatcctgagagaagctgaagctaaagtcagaaccattcgggataatctaaaggtggcccagtctcggcagaaaagttatgcggataaccgacgccgtgatctagaattcgcagtggatgactttgtgtatcttcgggtcacgccattgcgaggtgtacacaggtttcagacaaaggggaagctcgcacctcggtatgtgggtcctttccgtatcattgctcggcgcggagaagtcgcttaccagctggagctgcccgcctccttgggcaacgtgcatgatgtgtttcatgtgtctcaactcaagaaatgtcttcgagtgccattcgagcaggccgactcagagcaaattgaagttcgcaaagatttgacctacgtggagaggccagtgaaaatcctggacaccatggagcgcaggaccaggaaccgggtaatccgtttttgcaaggtccagtggagcaaccacgccgaagaagaagctacttgggagcgtgaagacgagctgaaggcagcccatcccgatctcttcgccagttcttccgaatctcggggtcgagattccgtttaa

SEQ ID NO: 14241 - DNA, 5432 bp, Oryza sativa
  Clone ID: TFbOSC411279j.C1.o19.fg
ataaaatatggaaatggttggcctggttggcttgggacgagctgaacccaggttcgggttgccagttcggtccgaatcatcgtaggcctgggttaaggcagatggccggcagcgttacccgtcgtggtttgcacatgactggcttcgtcttggagctgcgaggcatgtgcgtggtcttggggtatccacatggagtggattaccaggccaggccgctcccggagcaggagggtgaggatgcagagcctcacgctggttgggaggtcactgcagtgatcctctccggctctcccgagcggacttcgctggcagtcaccgcgggtggagattccttccccgccgcttgccagaacgccgctctcctcgccatcggcacccttcaccagcgctacccggacgagttgcagcactcgccctaccgctaccaccctcgtcgcggaggagcccgcgactacgccaccttccgagacgccagttcggaggatgacgctaccgtcgtgcatctggcacgcatggtggaggcgtacgacgcggctcgtatcgacttccatcagatggtgcgccgtggcatggtggagaacaacatgaagatcctggagctgcgccaagagaatctgcagctcaagaaggacctcgacgcgttggaggcgcagctgcatcagctcaagatcgcccagggagaggacagccgtcccaagcgtcgccgcgtctgccgcagccagaagatcaccgcccgcaagagcacctccaggcccgagcttgttcgtcagtccctggcgtggacctgcttcgtcgagacccctcgtgccgagcctgcgcccgtggttccccaggagggggaagcctccggcgttggtagctcggaggttttaatcgtcagctctccttctctgtttgctggttctgtgaggggttttcagatggtgacgaccaggagaaatgttaacaccggtgaaggcaaccaacccgagggcagcaaccccaaccaccaaggcaatccacctccaccttcgcctccaccaccaccaccagacactaacgccattctcacccaaatcctcgcccagcaagctaacctgatgaatgctttcctccaccacctccaaaacccgccacaacacaatgctccaccaccccctccccaacactccaaactcgccgaattcctccgtatccgcccacccaccttctctagctccaacaaccccgtggatgcgttggattggttgcatgccgtggggaagaagttagacactgtgcagtgcagtgacgaagagaaagtcatcttcgccgcccatcagctgcaggggcccgcatctctatggtgggaccatttccaggccacgcagccagaagggcaacctattacttggactcgcttcaccgccgctttccggagaacccatgtgcccgccggagtcgtggctcttaagaaaagggaatttcgggagttgaagcaaggcaaccgctccgtgatggagtatttgcatgagttccacaatctagcccgttatgccccggaggatgtgcgggaagatgaggagaaacaagagaagttcttggcaggaatggaccctgagctgtccgttcgtctagtctctggggactatcctgattttcaacgactggtggacaagagcatccgcttggaagccaagcacaaggagctggaatcgcacaagcgccgcttggcgaatttccgcaatcagcagggtgctaaccagagggtccgctacaccaatccctacccagggggatcctcctcacagcagcagcagcagcagcaacctcgctccgcgcctcgacctcaattcgtggtgcgcgtcccacagcagcaacagcagcagaatcagcaggggactcgtgcgccccgtcctcctacgccaactgtgcagcccgttcaaggccgcagggacgctcaaggtcagcagcgtctgtgcttcaactgcttcgagcccgggcactttgcggataaatgcccgaagccaaggcgtcagcaaggccaagcgcctccccgctccaacaacggcgggaaggatgtccttcggggccgtgtgaatcacgtgacggccgaggacgtgctgacaactccagacgtcatcgttggtacgttcctcgttcattccatccctgctaccattttgttcgactctggagcttcccactcgtttatatctgtgccattcgtggggaaaagtcagttgggggtagaaaggcttagaaaccctctgctcatcaccacccctggaggggttatgacagcaaagtactatagccctgccgtccctatagaaattcaggggattccttttccctcggatctgattctgctagacaccaagaatttggatgtgattctagggatgaattggttggcccaattccaaggggtagtggattgcgcgagacgcactgtcactctgtaccgaggaccagagcaaccggttgttttctttgcacctccaacctctgtcagaagttcagaactgcatcagataggtctgtcagaaatccccatagtcagagagttcggagacgtgtttccggaagaactacctggtatgccgcccaagcgagagattgagttccggatagatcttgctccaggaaccactcctctgcacaagcgaccctaccgtatggcagcaaatgaactagccgaagtaaagacacagttggaagaattgaaagaagaggggtacatacgtccgagtacttccccatggggtgctcctgtgatctttgtagagaagaaagacaagacgaagaggatgtgcgttgactacagagctctcaatgaagtcaccatcaaaaacaagtaccctcttccccggatcgatgatctgttcgatcagcttaaaggtgccactgtattctccaagattgatcttcgttccggatatcaccaattacgtattcgtgaagaagatattccgaagaccgcattcactacgcgatacgggctgtatgaattcacggtgatgtcgttcggcttgaccaatgctcctgccttcttcatgaacttaatgaacaaagtgttcatggaatacttggacaagtttgttgtggttttcatcgatgacattctgatatactcacaatcagaggaagaccatcagcaccatctccgtctggtattgggaaagttgcgggaacatcaattgtatgccaagcttagcaagtgtgagttctggttgtccgaagtcaaatttttggggcacgtgatatctgctaaaggagttgctgtggaccccgaaacagtgaccgccgtcaccgattggaagcaacccaagacagtcactcagattcgcagtttcttgggtttggcaggatactaccggaggttcatcgagaacttctccaaaatcgctcgacccatgacacagttgttgaagaaagaagagaagtttgtgtggagcccgcaatgcgagaaggcgttccaaactctcaaagaaaagctggtttcctcgccagtgttaatcttgccggatactcgcaaggatttcatggtgtactgtgatgcttcgcgccaaggattggggtgcgtgctcatgcaggacggtcatgtggtagcctatgcctcacgccagctacgacctcatgaaggcaactaccctacacatgacttggagttagcagcggtggttcatgctttaaaaatctggcggcactatctcattgggaaccgctgtgaaatatatactgatcataagagtttgaaatacatcttcactcagtcagatctgaaccttcggcaaaggagatggttagaactcatcaaggattatgatgtgggaattcactatcaccctggtaaggctaacgtggttgccgacgctctaagtcggaagagccattgcaatactctcaacgtccgaggcattccacccgagcttaatcaacagatggaagccctgaacctaaacatagttggtcgtggatttttggccgcgctagaagcccagcccaccttgctcgatcaaatccgcgaggctcagaagaatgatccggacatgcgtggactcctcaagaatatgaaacagggtaaagccgctggtttcacagaggatgaacacggaaccttatggaacggaaagcgggtatgcgttccggatagcagagaacttaaacagctgatacttcaggaagctcacgaaagtccttattccattcacccgggcagtaccaagatgtacttagatttgaaggagaaatactggtgggttagcatgaagcgggaaattgcagagtttgtggctctatgtgatgtgtgccagcgtgtcaaggcagaacaccaacgaccggccggacttctccaacctctccaagtgccagaatggaaatgggatgaaattgggatggatttcatcaccggccttccaaaaacccaaggtgggtatgattctatatgggtaatagtggatcgattaaccaaggtagctcgattcattcctgtgaagaccacctatggagggaataaactagcggagctctacttcgctaggatcgtgagtctccatggcgttcccaagaaaatcgtatctgataggggaagccaattcacctctcacttttggaagaagctccaagaagagcttggtacccgactaaatttcagcaccgcatatcacccgcagacagatggacagaccgagcgtctaaatcagatcctagaagatatgctccgcgcatgtgtcctagatttcgggaagacttgggataagagtctcccctatgccgagttctcctacaataacagctaccaagccagcatacaaatggcaccatatgaagcgttgtacgggcgcaaatgccggacaccgctcctgtgggaccaagttggggaaagccaagtgttcgggactgatatcctgagagaagctgcagctaaagtcagaatcattcgggataatctaaaggtggcacagtctcggcagaaaagttatgcagataaccgtcgccgtgatctggaattcgcagtggatgactttgtgtatcttcgggtcacgccattgcgaggtgtgcacaggtttcagacaaaagggaagctcgcacctcggtatgtgggtcccttccgtatcatcgctcgacgcggagaagtcgcttaccagctggagttgcccgcctccttgggcaacgtgcatgatgtgtttcatgtgtctcaactcaagaaatgtcttcgagtgccatccgagcaggccgactcagagcaaattgaagttcgcgaagacttgacctatgtggagaagccagtgaaaatcctggacgccatggagcgcaggaccaggaaccgagtaatccgtttttgcaaggtccagtggagcaaccacgccgaagaagaagctacttgggagcgtgaaggcgagctgaaggcagcccatcccgatctcttcgccagttcttccgaatctcggggtcgagattccgtttaa

SEQ ID NO: 14242 - DNA, 5972 bp, Oryza sativa
  Clone ID: TFbOSC413096j.C1.o1.np
atggcggccggatcttccgcgcccgtttccccctcatccggccgccctctctcactcccaaccctatataaacactccccgtgcctccctccaccgtttccgccactcgccgctccctctctccgccggaatcgagctcgcgccgtcgctctctctctccgccgtcaccgccgagctccggtctgccgccgtcgtcgccccggaccttcttccgcttcggcgccgcctccttcggtttcaccgcaacctcgccgacctcgtccacccctccgtttcgcccgccgacagccggaacgccgccgtccccgtctacccgagccgcgccgccgccttcctccgctccggtcgccgttcccgtcgtcgccgtcgacccggggtgagctgtggaccgccgattcgtttcccccttccctcccctctctcgggcgccgctctaccgcgccggtggtcaccggcggcgaccatcgggggcgcgggtgcgccgcctcccgtcggctgtgccggcgtggccgccttcgggcgcgccccgcggctgccatgtggggcccggccgtcagccgcccgcgccctcgggtgcggctgacgcgtgggacccacggcgccggccggtgtgagccgggtgcacccggtccaccatggacccacctcggccatataaggaccggtcttcgggcctctgttgcaaagcactaccgtacttccacatgtctagtggggcaaatgaaggctacacgagctgcggcccggtagtcgagatgtcatggcacagggccggtgtcctgctgctaggggctcagtcctgcctacctgtcccgggggttccgggcgtaggtgggattgggtcgatgtacacctctgatcagagtataatctattcgaatagccgcgccctcggttatgggcaagccgagcaatgtacccaaatggccggcagcgtcagccgtcgtggtctggacctgactggtttcgtcttggagctgcggggcatgtgcgttgtcctggggtatccgcatggagtggactaccagggcaggccgctcccggagcaggagggtgacgatgcagagccccacgctgcttgggaggttactgcagtgatcctcactggctcacccgagaggacttcgttggcagtcaccgcaggtggagattctttctccgccgcttgccagagcgccgctctcctcgccatcagcactcttcaccagcgctacccggacgagctgcagcactcgccctaccgctaccaccctcgtcgcggaggagcccgcgactacgccaccttccgggatgctagctcggaggatgacgctaccatcatgcacctggcgcgcatggtggaggcgtacgacgcggctcgtatcgacttccatcagatggtgcgccatgggatggtcgagaacaacctgaagatcctgaagctgcgtcaggagaatctgcagctgaagaaggacctagacgcagtggaggcgcagctgcatcagctcaagatcgcccagagagaggtctgtcgcccccagcgtcgccgcgtctgccgcagccagaagatcaccgcccgcaagagcacctccaggcccgagcttgttcgtcagtccctggcgtggacttgcttcgtggagacccctcgtgccgagcccgcgcccgtggttcctcaggagggggaagcctccggcgtcggtagcatggaggatgcgctgttgctcaccttccatggtgacgaccaggagaaatgctgccaccagtgatagcaaccaacctgaaggcagcaaccacaacaaccatggcagcccacctccacctcctccaccgcctccaccaccaccaccagacaccaacgccattctcacccaaatcctcgcccagcaggccaacatgatggctgctttcctccaccacatccaaaatccgccacaacataatgctccaccaccacccccacaacactctaaactcgccgagttcctacgcatccgtccacctaccttctctagctccaacaaccccgtggatgcgttggattggttgcatgccgtggggaaaaagttagacaccgtgcagtgcagcgatgaggagaaagtcatcttcgccgcccaccaactgcaggggcccgcatctctatggtgggaccatttccaggctacgcaactagaggggcaacctattacttgggcccgcttcaccgccgccttccggaggacccatgtgcccgccggagtcatggcccttaagaaaagggagttccgagagttgaagcaaggcaaccgctccgtgatggagtatttgcatgagttcaacaacctggcccggtacgccccggaggatgtacgggaagatgaggaaaagcaggagaagttcttggcaggaatggatcctgagctgtccgtccgtctagtctccggggactatccggatttccaacgtctggtggacaagagcatccgcttggaagccaagcacaaggaactggagtcgcacaagcgtcgcttggcgaattttcgcaaccaacagggtgctaaccaaaggatccgctacaccaatccctatccagggggatcttcctcgcagcagcagcaacctcgctccgcgcctcgacctcaattcgtggtgcgcgtcccacagccgcagcaacagcagagccagcaagggacccgtgcgccccgtcctcctacgccagccgcgcagtctggacaaggccgcagggacgttcaaggtccgcagcgtctgtgcttcaactgcttcgagcccgggcactttgcggataaatgcccgaagccgaggcgccagcaaggccaagcgcctccccactccaacaacggtggtaaggatgtcatttggggtcgtgtgaaccacgtgacggccgaggacgtgctgacaactccagacgtcatcgttggtacgttcctcatccattccatccctgctaccattttgttcgactctggagcttcccactcgtttatatctgtgccattcgtggggagaaatcagttgggggtagaaaggcttaggaaccctctactcatcaccacccctggaggggttatgacagcaaagtattatagtcctgccgtccctatagaaattcaggggattccttttccctcggatctgattcttctagacaccaagaacttggatgtgatccttgggatgaattggttggctcaattccaaggagtagtggattgtgcaagacgcactgtcactctgtaccgagggccggaataaccggttgttttctttgcacccccaacctctgtcagtagttcagaacttcatcagataggactgtcagaaatccccattgtcagagagttcggagacgtgtttccggaagaactacccggtatgccgcccaagcgagagattgagttccggatagatcttgctccaggaaccactcctctgtacaagcgaccctaccgtatggcagcaaatgaactggccgaagttaagaaacagttggaagagttgaaagaaaaggggtatatacgtctgagtacttccccctggggtgctcctgtgatttttgtggagaagaaagacaagacaaagaggatgtgcgttgactacagagctctcaatgaagtcaccatcaaaaacaagtaccctcttccccggatcgatgatctgttcgatcagcttaaaggtgccacggtattctccaagattgatcttcgttctggatatcaccagttgcgcatccgtgaagaagatattccgaagaccgcattcaccattcgatacggactgtatgaattcacggtgatgtcgttcggtttaaccaatgctcctgccttcttcatgaacttaatgaacaaagtgttcatggaatacttggataagtttgttgtggttttcattgatgacattctggtatactcacaatcagaggaagaccatcagcaccatctccgtctggtgttgggaaagttgcgggaacatcaattgtatgccaaacttagcaagtgtgagttctggttgtccgaagtcaccgattggaagcaacccaagacagtcactcaaattcgcagtttcttaggtttggcaggatactaccggaggttcatcgagaacttctccaaaatcactcgacccatgacacagttgttgaagaaagaggagaaatttgtgtggagcccgcaatgcgagaaggcgttcaaaactctcaaagaaaagctggtttcctcgccagtgttaatcttgctggatactcgcaaggacttcatggtgtattgtgacgcttcgcgccaaggattgggcgcgtgctcatgcaggacggtcatgtggtggcctatgcctcacgccagctacggcctcatgaaggcaactaccctacccatgatttggagttagccgcggtggttcatgctctaaaaatctggcggcactatctcattgggaatcgctgtgaaatatatactgatcataagagtttgaaatacatcttcacccagtcggatctgaatcttcggcagaggagatggttagaactcatcaaggattatgatgtgggaattcactatcatcctggtaaggccaacgtggtcgccgacgctctaagtcgaaaaagccattgcaacactcttaacgtccgtggcattccacccgaacttaatcaacagatggaagccctgaatctaagcatagtgggtcgcggattcttggctgcgttggaagccaagcccaccttgctcgatcaaatccgcgaggctcagaagaacgatccggacatgcatggactcctcaagaatatgaaacagggtaaagccactggtttcacagaggatgaacacggaaccctatggaacggaaatcggcgtgtcaaggcagagcaccaacgactggccggacatctccaacctctccaagtaccagaatggaaatgggatgaaattgggatggatttcatcaccggacttccaaaaacccaaggtggatatgattctatatgggtagttgtggatcgattaaccaaggtagctcgatttattcttgtgaaggccacctatggagggaacaaactagccgagctctacttcgctaggatcgtgagtctccatggcgttcctaagaaaattgtatccgataggggaagccaattcacctctcacttttggaagaagctccaagaagagctgggtacccgattaaatttcagcaccgcgtatcacccgcagacagatggacagaccgagcgtctaaatcagatcctagaagatatgcttcgcgcatgtgtcctagatttcgggaagacctgggataagagtctcccctatgccgagttctcctacaataacagctaccaagccagcatacaaatggcaccttatgaagcattgtatgggcgcaaatgtcggacaccgctattgtgggaccaagttggggaaagccaagtgttcgggaccgatatcctgagagaagctgaagctaaagtcagaaccattcgggataatctaaaggttgcccagtctcggcagaagagttatgtagacaaccgacgccgtgacctagaattcgcagtggatgactttgtgtatcttcgggtcacgcccttgcgaggtgtacacaggtttcagacaaaggggaagctcgcacctcggtttgtgggtcctttccgtatcattgcacggcgcggagaagtcgcttaccagttggagctgcctgcctccttgggcaacgtgcatgatgtgttccatgtgtcgcaactcaagaaatgtcttcgagtgccatccgagaaggccgactcagagtaaattgaagttcgcgaagacttgacctacgtggagaggccagtgaaaatcctggacaccatggagcgaaggaccaggaaccgggtaatccgttttttcaaggtccactggagcaaccacgccgaggaagaagctacttgggagcgtgaagacgagctgaaggcagcccatcccgatctcttcgtcagttcttccgaatctcggggtcgagattccgtt

SEQ ID NO: 14243 - DNA, 6041 bp, Oryza sativa
  Clone ID: TFbOSC413096j.C1.o2.np
atggcggccgggactcccgcgcctgtttccccctcctccggccaccccctccctctcttaaccctatataaaccctccccgtgcctccctccaccgtttccgccactcgccgctctctctccccgccggaatcgagctcgcgccatcgctctctctctccgccgtggccgccgagctccggtccgccgccgttgtcgccccggaccacctctcccctcggcgtcgcctccttcggcttcgccggatcctcgccgacctcgtccacccctccgtttcgcacgccgaccgccggagcaccgtcgaccccgtccacccgagccgcgccgccgccttcctccgctccggtcgtcgttcccgtcgtcgccgtcgacctggggtgagccgtggaccgccgattcgtttcccccttccctcccctctctcggccgccgctccgccgtacatatggccgccgccggcgaccataggggcgcgggcgcgccgcctcccgccgctgcgccggcgtggccgccttcgggcgcgccccgcggctgccgtgtggggcccggctgtcagccgcccacgcccttaggtgcggctgacgcgtgggacccacggcgccggccggtgagagcccgggtgcgcccggtccaccgtggtcgtacctcgggtactataaggattaagctcgggcctctgttgcaaagcactaccgtacttccacatgtctagtggggcaaatgaaggctacacgagctgcggcccggtagtcgagatgtcatggcacagggccggtgtcctgctgctgggggctcagtcctgcctacctgtcccgggggttccggccgtaggtggggttgggtcgatgtacacctctgatcagagtataatctattcgaatagccgcgccctcggttatgggcaagccgagcaatgtacccaaatggccggcagcgtcagccgtcgtggtctggacctgactagcttcgtcttggagctgcggggcatgtgcgttgccctggggtatccgcatggagtggactaccagggcaggccgctcccggagcaggagggtgatgatgcagagccccacgctgcttgggaggttactgcagtgatcctcactggctcacccgagaggacttcgttggcagtcaccgcgggtggagattctttctccgccgcttgccagaacgccgctctcctcgccatcggcactcttcaccagcgctacctggacgagttgcagcactcgccctaccgctaccaccctcgccgcggaggagcccgcgactacgccaccttccgggatgctagctcggaggatgacgctaccatcatgcacctggcgcgcatggtgtaggcgtacgacgcggctcgtatcgacttccatcagatggtgcgccctgggatggtcgagaacaacatgaagatcttggagctgcgtcaggagaatctgcagctgaagaaggacctagacgtagtggaggcgcagctgcatcagctcaagatcgcccagggagaggtctgtcgccccaagcgctgccgtgtctgccgcagccagaagatcaccgcccgcaagagtacctccaggcccgagcttgttcgtcagtccctggcgtggacttgcttcgttgagacccctcgtgccgagcccgcgcccgtggttcctcaggagggggaagcctccggcgttggtagcacggaggatgcgctgttgctcaccttccatggtgacgaccaggagaagtgctgccaccggtgatggcaaccaacctgaaggcagcaaccacaacaaccatggcagcccacctccacctcctccaccaccaccaccagacaccaacgccattctcacccaaatcctcgcccagcaggccaacatgatggctgttttcctccaccacatccaaaatccgccacatcataatgctccaccaccacccccacaacactctaaactcgccgagttcctccgcatccgtccaccaaccttctctagctccaataaccctgtggatgcgttggattggttgcatgccgtggggaaaaatctagacaccgtgcagtgcagcgatgaggagaaagtcgtcttcgccgcccaccaactgcaggggcccgcatctctatggtgggaccatttccaggctacacagccagaggggcagcctattacttgggcccgcttcaccgccgccttccggaggacccatgtgcccgccggagtcatggcccttaagaaaagggaatttcgagagttgaagcaaggcaaccgctccgtgatggagtatttgcatgagttcaacaacctggcccggtacgccccggaggatgtacgggaagatgaggaaaagcaggagaagttcttggcaggaatggatcctgagctgtccgtccgtctagtctccggggactatccggatttccaacgtctggtggacaagagcatccgcttggaagccaagcacaaggaactggagtcgcacaagcgtcgcttggcgaatttccgcaatcaacagggagctaaccaaaggatccgctacaccaatccctatccagggggatcctcctcgcagcagcaacaacagtagcagcaacctcgctccgcgccccgacctcaattcgtggtgcgcgtcccacagccgcagcaacagcagagccagcaagggacccatgcgccccgtcctcctacgccagccgcgcagtctggtcaaggccgcagggacgttcaaggtccgcagcgtttgtgcttcaactgcttcgagcccgggcactttgcggacaaatgcccaaagtcgaggcgccagcaaggccaagcgcctccccgctccaacaacggtggtaaggatgtcattcggggtcgtgtgaaccacgtgacggccgaggacgtgctgacaactccagacgtcatcgttggtacgttcctcattcattccatccctgctaccattttgttcgactctggagcttcccactcgtttatatctgtgccattcgtgggaagaaatcagttgggggtagaaaggcttaggaaccctctcctcatcaccacccctggaggggttatgacagcaaagtattatagtcctgccgtccctatagaaattcaggggattccttttccctcggatctgattcttctagacaccaagaacttggatgtgatccttgggatgaattggttggctcaattccaaggagtagtggattgcgcgagacgcactgtcactctgtaccgagggccggaacaaccggttgttttctttgcacccccaacctctgtcagtagttcagaacttcatcagataggactgtcagaaatccccatcgtcagagagtttggagacgtgtttccggaagaactacccggtatgccgcccaagcgagagattgagttccggatagatcttgctacaggaaccactcctctgtacaaacgaccctaccgtatggcagcaaatgaactggccgaagttaagaaacagttggaagagttgaaagaaaaggggtacatacgtccgagtacttccccctggggtgctcctgtgatttttgtggaaaagaaagacaagacgaagaggatgtgcgttgactacagagctctcaatgaagtcaccatcaaaaacaagtaccctcttccccggatcgatgatctgttcgatcagcttaaaggtgccacggtattctccaagattgatcttcgttccggatatcaccagttgcgcatccgtgaagaagatattccgaagaccgcattcaccacgcgatacggactgtatgaattcacggtgatgtcattcggtttaaccaatgctcctgccttcttcatgaacttaatgaacaaagtgttcatggaatacttggataagtttgttgtggttttcattgatgacattctggtatactcacaatcagaggaagaccatcagcaccatctccgtctggtattgggaaagttgcgggaacatcaattgtatgccaaacttagcaagtgtgagttctggttgtccgaagtcaagttcttagggcacgtgatatccgctaaaggagttgctgtggaccccgaaacagtgaccgccgtcactgattggaagcaacccaagacagtcactcaaattcgcagtttcttaggtttggcaggatactaccggaggttcatcgagaacttctccaaaatcgctcgacccatgacacagttgttgaagaaagaagagaaatttgtgtggagcccgcaatgcgagaaggcgttccaaactctcaaagaaaagctggtttcctcgccagtgttaatcatgccggatactcgcaaggacttcacggtgtattgtgacgcttcgcgccaaggattggggtgcgtgctcatgcaggacggtcatgtggtggcctatgcctcacgccagctacggcctcatgaaggcaactaccctacccatgatttggagttagccgcggtggttcatgctctaaaaatctggcggcactatctcattgggaatcgctgtgaaatatatactgatcataagagtttgaaatacatcttcacccagtcggatctgaatcttcggcagaggagatggttagaactcatcaaggattatgatgtgggaattcactatcatcctggtaaggccaacatggtcgccgacgctctaagtcgaaagagccattgcaacactcttaacgtccgtggcattccacccgaacttaaccaacagatggaagccctgaatctaagcatagtgggtcgtggattcttggctgcgttggaagccaagcccaccttactcgatcaaatccgcgaggctcagaagaacgacccggacatgcgtggactcctcaagaatatgaaacagggtaaagccgctggtttcacagaggatgaacacggaaccctatggaacggaaatcggcgtgtcaaggcagagcaccaacgaccggccggacttctccaacctctccaagtaccagaatggaaatgggatgaaattgggatggatttcatcaccggactttcaaaaacccaaggtggatacgattctatatgggtagttgtggatcgattaaccaaggtagctcgatttattcctgtgaagaccacctatggagggaacaaactagccgagctctacttcgctaggatcgtgagtctccatggcgttcccaagaaaatcgtatctgataggggaagccaattcacctctcacttttggaagaagctccaagaagagctgggtacccgattaaatttcagcaccacgtatcacccgcagacagatggacagaccgagcgtctaaatcagatcctagaagatatgcttcgcgcatgtgtcctagatttcgggaagacctgggataagagtctcccctatgccgagttctcctacaataacagctaccaagccagcatacaaatggcaccctatgaagcgttgtatggatgcaaatgccggacactgctattgtgggaccaagttggggaaagccaagtgttcgggactgatatcctgagagaagctaaagctaaagtcagaaccattcgggataatctaaaggtggcccagtctcggcagaagagttatgcagacaaccgacgccgtgacctggaattcgcagtggatgactttgtgtatcttcgggtcacgcccctgcgaggtgtacacaggtttcagacaaaggggaagctcgcacctcggttcgtgggtcctttccgtatcattgctcggtgcggagaagtcgcttaccagttggagctgcccgcctccttgggcaacgtgcatgatgtgttccatgtgtcgcaactcaagaaatgtcttcgagtgccatccgagcaggccgactcagagcaaattgaagttcgcgaagacttggcctacgtggagaggccagtgaaaatcctggacaccatggagcgcaggaccaggaaccgggtaatccgtttttgcaaggtccaatggagcaaccacgccgaggaagaagctacctgggagcgtgaagacgagctgaaggcagcccatcccgatctcttcgccagttcttccgaatctcggggtcgagattccgtt

SEQ ID NO: 14244 - DNA, 1260 bp, Oryza sativa
  Clone ID: TFbOSC413731j.C1.o2.fg
atgaccaggagaagtgctaacaccggtgatggcaaccaacctgaaggcagcaaccacaaccatcagggcaacccacctccacctcctcctccacctccaccaccaccaccagacaccaacgccattctcacccaaatcctcgcccagcaggccaacatgatgactgctttcctccaccacctccaaaatccgccacaacttaatgctccaccaccacccccacaacactctaaactcgccgagtttctccgcatccgcccacctaccttctctagctccaacaaccccgtggatgcgttggattggttgcatgccgtggggaaaaagctagacactgtgcagtgcagcgatgaggagaaagtcatcttcgccgcccaccagctgcagggacccgcatctctatggtgggaccatttccaggctacgcagccagagggacagcctattacatgggctcgcttcaccgccgctttccgaagaacccatgtgcccgccggagtcgtggcccttaagaaaagggaattccgagagttgaagcaaggcgaccgctccgtgatggagtatttgcacgagttcaacaacctggcccgttacgctccggaggatgtgcgggaagatgaggagaagcaagagaagttcctggcaggaatggaccctgagctgtccgtccgtctagtctccggggattatccggatttccaacgtctggtggacaagagcatccgcttggaagccaagcacaaggaactggagtcgcacaagcgccgcttggcgaatttccgcaaccaacagggtgctaaccaaagggtccgctacaccaatccctatccagggggatcctcctcgcagcagcaacaacagcagcagcaacctcgctccgcgcctcgacctcaattcgtggtgcgcgtcccacagccgcagcagcagcagaatcaacaagggactcgtgcgccccgtcctcctccaccgactgtgcagcctggtcaaggccgcagggacgctcaaggtccgcagcgtctgtgcttcaactgcttcgagcccgggcactttgcggataaatgcccgaagccaaggcgtcagcaaggccaagcgcctccccgccccaacaacggtggtaaggacgtcattcggggtcgtgtgaaccatgtgacggccgaggacgtgctgacaactccagacgtcatcgttgagagttcggagacgtgtttccggaagaactacctggtatgccgcctaagcgagagattgagttccggatag

SEQ ID NO: 14245 - DNA, 5049 bp, Oryza sativa
  Clone ID: TFbOSC416075j.C1.o2.gm
atggatgaagtcgggcgtcgatggacattctccagggcaaatgaaggctacacgagctgcggcccgatggccggcagcgtcacccgtcgtggtttggacatgactggcttcgtcttggagctgcgaggcatgtgcgtggtcttggggtatccacatggagtggattaccaggccaggccgctcccggaacaggagggtgaggatgcagagcctcacgctggttgggaggtcactgcagtgatcctctccggctctcccgagcggacttcgctggcagtcactgcggggggagactccttccccgccgcttgccagaacgccgctctcctcgccatcggcacccttcaccagcgctacccggacgagttgcagcactcgccctaccgctaccaccctcgtcgcggaggagcccgcgaccacgccaccttccgagacgccagctcggaggatgacgctaccgtcgtgcatctggcacgcatggtggaggcgtacgacgcggctcgtatcgacttccaccagatggtgcgtcgtggcatggtggagaacaacctgaagatcctggagctgcgtcaggagaacctgcagctcaagaaggacctcgacgcagtggaggcgcagctgcatcagctcaagatcgcccagggtgaggacagccgtcccaagcgtcgccgcgtctgccgcagccagaagatcaccgcccgcaagagcacctccaggcccgagcttgttcgtcagtccctggcgtggacttgcttcgtcgagacccctcgtgccgagcctgcgcccgtggttccccaggagggggaagcctccggcgttggtagctcggagggtgcgctgttgctcaccttccgccctggcccgtcgcagcgctcttcttctctgtttgctggttccgtgtggggtttccagatggtgacgaccaggagaaatgttaacaccggtgaaggcaaccaacccgagggcagcaaccccaacccccaaggcaacccacctccaccaccaccaccagataccaacgccattctcacccagatcctcgcccaacaagccaacatgatgaatgctttcctccaccacctccaaaatccgccacaacagaatgccccaccaccacctccccaacactccaaactcgccgagttcctccgcatccgcccacctaccttctctagctccaacaaccctgtggatgcgttggattggttgcatgccgtggggaagaagctagacacggtgcagtgcagtgatgaggagaaagtcgtcttcgccgcccatcagctgcaggggcccgcatctctatggtgggaccacttccaggctacgcagccacagggacagccgattacttgggcccacttcaccgccgctttccggagaacccatgtgcccgccggagtcgtggctctcaagaagagggaattccgagagttgaagcaaggcaaccgctccgtgatggagtatttgcacgagttcaacaacttggcccgttacgctccggaggatgtgcgggaagatgaggagaagcaagagaagttcttggcaggaatggaccctgagctgtccgttcgtctagtctctggggactatccggatttccaacgactggtggacaagagcatccgcttggaagccaagcacaaggagctggagtcgcacaagcgccgcttggcgaacttccgcaatcagcagggtgctaaccagagggttcgctacaccaatccctacccagggggatcctcctcgcagcagcagcagcagcagcaacctcgcccagcgcctcgacctcaattcgtggtgcgcgtcccacagccgcagcagcagcagaatcagcaagggactcgtgcgccccgtcctcctacgccagctgtgcagcccgttcaaggccgcagggacgctcaaggtcagcagcgtctgtgcttcaactgcttcgagcccgggcactttgcggataaatgcccgaagccaaggcgtcagcaaggccaagcgcctccccgctccaacaacggcgggaaggatgtcattcggggccgtgtgaatcatgtgacggccgaggacgtgctgacaactccagacgtcatcgttggtacgttcctcgttcattccatccctgctacaattttgttcgactctggagcttcccactcgtttatatctgtgccattcgtggggaaaaatcagttgggggtagaaaggcttagaaaccctctgctcatcaccacccctggcggggttatgacagcaaagtattatagccctgccgtccctatagaaattcaggggattccttttccctcggacctgattctgctagacaccaagaacttggatgtgatccttgggatgaattggttggcccaattccaagggataggtctgtcagaaatccccatagtcagagagttcggagacgtgtttccggaagaactacctggtatgccgcccaagcgagagattgagttccggatagatcttgctccaggaaccactcctctgtacaagcgaccctaccgtatggcagcaaatgaactggccgaagttaagaaacagttggaagagttgaaagaaaaggggtacatacgtccgagtacttccccatggggtgctcctgtgatttttgtagagaagaaagacaaaacgaagaggatgtgtgttgactacagagctctcaatgaagtcaccatcaaaaacaagtaccctcttccccggatcgatgatctgttcgatcagcttaaaggtgccactgtattctccaagattgatcttcgttccggatatcaccacttacgtattcgggaagaagatattccgaagaccgcattcaccacgcgatacgggctgtatgaattcacggtgatgtcgttcggtttgaccaatgcacctgccttcttcatgaacttaatgaataaagtgttcatggaatacttggataagttcgttgtggttttcatcgatgacattctgatatactcacaatcagaggaaggccatcagcaccatctccgtctggtgttgggaaagttggggaacatcaattgtatgccaagcttagcaagatattaccggagattcatcgagaacttctccaaaatcgctcgacccatgacacagttgttgaaaaaagaagagaaatttgtgtggagcccgcaatgcgagaaggcgttccaaactctcaaagaaaagctggtttcctcgccagtgttaatcttgccggatactcgcaaggacttcatggtgtattgtgatgcttcgcgccaaggattggggtgcgtgctcatgcaggacggtcatgtggtagcctatgcttcacgccaactacgtcctcatgaaggcaactaccctacacatgacttggagttagcagcggtggttcatgctctaaaaatctggcgacactatctcattgggaaccgctgtgaaatatatactgatcataagagtttgaaatacatcttcacccagtcggatctgaatcttcggcaaaggagatggttagaactcatcaaggattatgatgtgggaatacactatcatcctggtaaggccaacgtggttgccgacgctctaagtcgaaagagccactgcaacactctcaacgtccgaggcattccacccgagcttaatcaacagatggaagccctgaacctaagcatagttggtcgcggattcttggctgcgttggaagccaagcctaccttgctcgatcaaatccgcgaggctcagaagaatgatccggacatgcatggactcctcaagaatatgaaacagggtaaagccgcaggtttcacagaggatgaacacggaactctatggaacggaaagcgggagaaatactggtgggtcagcatgaagcgggaaattgcagagtttgtggctctatgtgatgtgtgccagcgtgtcaaggcagaacaccaacgaccggccggacttctccaacctctccaagtgccggaatggaaatgggatgaaattgggatggatttcgtcaccggccttccaaaaacccaaggtggatatgattctatatgggtaattgtggatcgattaaccaaggtagctcgattcattcctgtgaagaccacctacggagggaacaaactagcggagctctacttcgctaggatcgtgagtctccatggtattcccaagaaaatcgtatctgataggggaagccaattcacctctcacttttggaagaagctccaagaagagctgggtactcgattgaatttcagcaccgcctatcacccgcagacagatggacagaccgagcgtctaaatcagatcctagaagatatgctccgcgcatgtgtcctagatttcgggaagacttgggataagagtctcccctatgccgagttctcctacaataacagctatcaagccagcatacaaatggcaccctatgaagcgttgtacgggcgcaaatgccggacaccgctattgtgggaccaagttggagaaagccaagtgttcgggactgatatcctgagagaagctgaagctaaagtcagaatcattcgggataatctaaaggtggcacagtctcggcagaaaagttatgcagataaccgtcgccgcgatctggaattcgcagtggatgactttgggtatcttcgggtcacgccattgcgaggtgtgcacaggtttcagacaaaagggaagctcgcacctcggtatgtgggtcccttccgtatcatcgctcgacgtggagaagtcgcctaccagctggagttgcccgcctccttgggcaacgtgcatgatgtgttccatgtgtcgcaactcaagaaatgtctccgagtgccatccgagcaggccgactcagagcaaattgaagttcgcgaagatttgacctacgtggagaggccagtgaaaatcctggacaccatggagcgcaggaccaggaaccgggtaatccgtttttgcaaggtccagtggagcaaccacgccgaagaagaagctacttgggagcgcgaagacgagctgaaggcagcccatcccgatctcttcgccagttcttccgaatctcggggtcgagattccgtttaa

SEQ ID NO: 14246 - DNA, 5953 bp, Oryza sativa
  Clone ID: TFbOSC416252j.C1.o1.np
atggcggccggatcccccgcgccggtttccttccccgccgaccgccctctctccctcccgaccctatttaaaccctccccgctccttcctcgtccgtttctgccacttgccgcaccgtttccccgccagaatcgagctcgcgccgtcgtcctctctctcctccgtcaccgacgacctccggctggccctctccgctcgccgggaccgcctcccgcctcggcgtcgtctcctcaagcttcgccgtgccgtcgctgaccctgtccaccacctcgccgagctcgccgaccgccgaagcgccatagtccccgtccacccgagccgcgccaccgccttcctccgctccggacgcctcctttgccgtcgccgtcgacccggggtgagacgtggaccaccgcctctttcccccttcccttcccctctcttggccgccgctccgctgtgcctatggccgccgccggcgaccataggggcgcaggcgccgcctcccgccggccgcgccgacgtggccgcctccgggcgcgccgtgtggccgtcgcgtggggcccggccgttagccgcccgtgccctcgggtgcggctgatgcgtggggcctacggcgccggccggtgtgagcccgggtgcgcccggtccaccgtggacccacctcggccacataaggaccggtctttgggcctctgttgcaaagcactaccgtacttccacatgtctagtgggaggtaggagaagggcccgacatgtgggccccacatgtcggtgacccgcgtgagaggaggggcggcggcggcttgggccgaatttatgcttccgcttgttaaactctatattgtatcaacttttggtgtaccttgcctcctgggacaaggaataatacacgcacgtaaggaacgcccgttgggttatttccggtcgtgacaatgtttgtagatggccggcaacatcaaccgtcatggcctggatctgactggctttgttttggagctgcggggcatgtttgttgtcctgggatatccgcatggagtggactaccagggcaagaagcttccggagcaggatggtgacgatgcagagccccgcgccgcttgggaggtcactgcggtgatcctcaccggctctcccgagaggacttcgttggcagtcaccgcgggtggagattctttccccgccgcttgccagaacgccgcgctcctcgtcatcggcactcttcaccagcgctatttggacgagttgcggcactcgccctacagctaccaccctcgttgaggagcctgcgactacgccaccttcagggatgctagctcggaggatgacgctaccatcatgcacctggcgcgcatggtggaggcgtacgatgcggcccgtatcgacttccatcatatagtgcgccgtgggttggtcgagaacaacatgaagatcctggagctgcgtcaggagaatttgcagctgaagaaggacttggacgcagtggaggcgcagctgtgtcagctcaagattgctaagggagaggtctgccgccccaagcgccgccgcgtttgccgcaacctgaagatcaccgcccgcaagagtacctccaggcctgagcttgttcgtcagtccctagcgtggacttgctttgtggagatcccttgcgccgagtccgcgcccttggttcctcaggaggagggagcctctggcgttggtagcacggaggatgtgctgttgctcaccttccatggtgacaaccaggagaagcgctgttactggcgaaggcagtcatcccgaaggcagcaaccccaacaaccatgacagcccacctccacctcctccccaccaccaccaccgccacctgacaccaaccccatcctcacccaaatcctcgcccagcaggccaacgtgatggctgctttcctccaccacatccagaatccgccgcaacacaatgctccgcccccaccaccacccctgcagcattctaagcttgccgagttcctccgcatccgcccgcctaccttctctagcttcaacaaccctgttgatgccttggattggttgcatgccgttgggaaaaagttagacaccgtccagtgcaatgatgaggagaaagtcatcttcgccacccaccaactgcaggggcccgcatctctatggtgggaccacttccaggctacgcagccggaaggatagcctatcacctgggcccgcttcaccgccgctttccggaggacccatgtgcccgccggagtcatggcccttaagaagagggaatttcgggagttgaagcaaggcaaccgctctgtgatggagtatttgcatgagttcaataacttggcccggtacgctccagaggatgttcgtgaagatgaggaaaagcaacagaaattcctggcaggaatggaccctgaactgtctgtgcatctggtctccagggactatcctgatttccagcgcctggtggacaagagcatccacctggaagccaagcacaaggaactggagtcgcacaagcgtcgcttggcgaatttttccaatcaacagggagctaaccaaagggtccgctacacaaatccctatcctggaggatcctcctcacagcagcagcagcagcagcaacctcgccccgcgccccgacctccatacgtggtgcgcgtcccacagccgcagcagcagcagaatcagcaagggacccgtgcaccccgccctcctgcaccggccgtgcagcctggtcaaggccgcagggacgctcaaggtcaacaacgtctgtgcttcaactgcttcgagcccggacactttgcggataaatgcccgaagccaggcgccagcaaggccaagcgcctccccgccccaacaacggtggtaaggatgtcactgggggttgtgtgaaccacgtgactgccgaggatgtgctgacaactccagacgtcatcgttggtacgttcctcattcattccatccctgctaccattttgttcgactctggagcttcccactcgtttatatctgtgccattcgtggggagaaatcagctgggggtagaaaggcttaggaaccctctactcatcaccacccctggagtggttatgacaacgaagtattatagcccggccgttcctatagaaatccagggaattcctttccctcggatctgattcttctggacaccaagaacttggatgtgatccttgggatgaattggttggctcaattccaaggagtagtggattgcgcaaggcgcactgtcactctgtaccgggggcccgatcaaccagttgttttctttgcactccaactcccgccggcacttcagtacttcatcaactaggattatccgtaatctccatcgtcagtgagttcggtgatgtgtttccggaagagctacccggtatgccgcccaagcgggagattgagttccggatagatcttgctccaggagccactcctttatacaagcgaccctaccgtatggcagcaaatgaattggccgaagtcaagaaacagttggaagagttgaaagaaaatgggtatatacggccgagcacttccccctggagtgctcccgtgatttttgtggagaagaaagacaagacaaagaggatgtgcgttgactacagagctctcaacgaggtcactatcaaaaacatgtacccccttccccagatcgatgatctgttcgatcagcttaaaggtgccactgtcttttccaagattgatcttcgttccggatatcaccagttgcgtattcgtgaagaagatatcccgaagaccgcattaaccacgcggtacggactgtatgaattcacggtgatgttgttcggtctgaccaattctcctgccttcttcatgaatttaatgaacaaagtgttcatggaatacctggataagttcgttgtggtctttattgacgacatactggtgtactcggagtcagaggaagaccatcagcagcatctccgtttagtgttggggaagctgcgggaacactaactgtatgccaagctcagcaagtgtgagtttttgttgtccgaagttaagttcttagggcatgtgatttctgctaaaggagttgctgtggatcccaaaacggtgaccgccgtcactgattggaagcaacccaagacagtcactcaggtccgcagctttttgggtttggcaggatactaccgaagattcatcgagaatttctccaaaattgccaggcccatgacgcagttgctgaagaaggaagaaaaatttgtgtggagtccgcagtgtgagaaagcattccaaactctcaaagaaaagctggtttcctcgcccgtgttaatcttactggatactcgcaaggacttcttggtgtactgtgacgcttcgcgccaaggattggggtgtgtattaatgcaggaaggtcatgtggtagcctatgcctcacgccagctacggccccatgaaggcaactatcctactcatgatttggagttggccgctgtggttcatgatttgaaaatctggcggcattatctcattggaaatcgctgcgaaatatataccgatcataagagtttgaaatacatcttcactcagtcagatctgaatcttcagcagagaagatggttagagctcatcaaagattatgatgtgggaatccactatcaccctagtaaggccaacgtggtcgccgacgcgctaagtcgaaaaagccattgcagcactcttggcgtccgtggcattccaccagaacttaatcaacagttggaagccctgaacctaagcatcgttagctatggattcttggctatgctggaagccaagcctaccttgctcgatcaaatccgcgaggctcagaagaatgatccagatattcatgggatcctcaagaatatgaaacagggtaaagccgctggtttcacagaagatgaacacggaaccctatggaacggaaatcatcgtgtcaaggcagagcaccaacgaccggccagacttctccaacctctccaagtaccagaatggaaatgggatgaaattgggatggatttcatcaccggagttccaaaaacccaaggcggatatgattctatatgggtaatcgtggatcgactaaccaaggtagcttggttcattcctgtgaagaccacctatggagggaacaaattagctgaactctacttcgctaggatcgtgagtctccatggcgttcctaagaaaattgtatctgataggggaagccaattcacctatcacccgcagacagatggacagaccgatcatccgaatcaggtcctagaagacctgggataagagtctcccctatgccgagttctcctacaataatagctaccaagccagcatacaaatggcaccctatgaagcgttgtatggccgcaaatgccggacaccactattgtgggaccaagttggggaaagccaagtgttcgggactgatatcctgagagaagctgaagctaaagtcagaaccatttgagataatctaaaggtggcatagtctcggcagaagagttatgcagacaaccgacgccgtaacctggaattcgcagtggacgattttgtgtatcttcgggtcacgctattgcggggcgtacataggtttcagacaaaagggaagctcccacctaggtttgtggggcctttccgcatcattgctcgacgcggagaagttgcttaccagttagagctgcccgcatccttgggcaacgtgcacgatgtgttccatgtgtcgcaactcaagaaatgccttcgagtgccgtccgagcaggctgattcagagcaaattgaagttcgcgaagacttgacctacgtggagaagccagtgaagattctggacaccatagagcgcaggaccaggaatcgggtaatccgtttttgcaaggtccaatggagcaaccatgccgaggaagaagctacttgggaacgtgaagacgagctgaaggcagcccatcccgatctcttcgccagttcttccgaatctcggggtcgagattccgtt

SEQ ID NO: 14247 - DNA, 4359 bp, Oryza sativa
  Clone ID: TFbOSC417437j.C1.o1.np
accgccaccccacccagcgcgccacccccgccgcaccacagcgcccccaacccccccccccacccgaaaccccaccccggcctcgcccccgcccgccccgcccgcccccccaacccggccccgcccccccctcgccccgacccccgccacacgcccgcccacccccctcccgccgccccccctcaccccccccccccccaccggccccgccgcgccccgccccccccaccccccgcgccgccccccatcccgcccgccccgccccccgccgccccgcccggaccccaccccccgacgcgcacaaccccactccccccccccgccccccccccggccccccccccgccccccccccgccgaacgccccgcaccccaagaggccagcccccgttaagccatccgtgcccccgggcgtcggcgacagggcggggcaacaccagaccgggctgacggcgaaccaggcgggaaaagcaccgcccggcgccctcagatgcagatgacgggtgggaacccacggcgccggccggtgtgagcccgggtgcgcccgggtccaccgtggacccacctcggccatataaggaccggtcttcgggcctctgttgcaaagcactaccgtacttccacatgtctagtggggcaaatgaaggctacacgagctgcggcccggtagtcgagatgtcatggcacagggccggtgtcctgctgctaggggctcagtcctgcctacctgtcccgggggttccggccgtaggtgggattgggtcgatgtacacctctgatcagagtataatctattcgaatagccgcgccctcggttatgggcaagccgagcaatgtacccaaatggccggcagcatcagccgtcgtggtctggacctgactggtttcgtcttggagctgcggggcatgtgcgttgtcctggggtatccgcatggagtggactaccagggcaggccgctcccggagcaggagggtgacgatgcagagccccacgctgcttgggaggttactgcagtgatcctcaccggctcacccgagaggacttcgttggcagtcaccgcgggtggagattctttctccgtcacttgccagaacgccgctctcctcgccatcggcactcttcaccagcgctacccggacgagttgcagcactcgccctaccgctaccaccctcgtcgcggaggagcccgcgactacgccaccttccgggatgctagctcggaggatgacgctaccatcatgcacctggcgcgcatggtggaggcgtacgacgcggctcgtatcgacttccatcagatggtgcgccgtgggatggtcgggaacaacatgaagatcctggagctgcgtcaggagaatctgcagctgaaaaaggacctagacgcagtggaggcgcagctgcatcagctcaagatcgcccagggagaggtctgtcgccccaagcgccgccgcgtctgccgcagccagaagatcaccgcccgcaagagcacctccaggcccgagcttgttagtcagtccctggcgtggacttgcttcgttgagatcccccgtggttcctcaggagggggaagcctccggcgttggtagcacggaggatgcgctgttgctcaccttccatggtgacgaccaggagaagtgctgtcaccggtgatggcaaccaacccgaaggcagcaaccacaacaaccatggcagcccacctccacctcctcctccgcctccaccaccaccaccagacaccaacgccattctcacccaaatcctcgcccagcaggccaacatgatggctgctttcctccaccacatccaaaatccgccacaacataatgctccaccaccacccccacaacactctaaactcgccgagttcctccgcatccgtccacctaccttctctagctccaacaaccccgtggatgcgttggattggttgcatgccgtggggaaaaagctagacaccgtgcagtgcagcgatgaggagaaagtcgtcttcgccgcccaccaattgcaggggcccgcatctctatggtgggaccatttccaggctacgcagccagaggggcagcctattacttgggcccgcttcaccgccgccttccggaggacccatgtgcccgccggagtcatggcccttaagaaaagggaattccgagagttgaagcaaggcaaccgctccgtgatggagtatttgcatgagttcaacaacctggcccggtacgccccggaggatgtacgggaaaatgaggaaaagcaggagaagttcttggcaggaatggaccctgagctgtccgtgcgtctagtctccggggactatccggatttccaacgtctggtggacaagagcatccgcttggaagccaagcacaaggaactggagtcgcacaagcgtcgcttggcgaatttccgcaatcaacagggagctaaccaaaggatccgctacaccaatccctatccagggggatcctcctcgcagcagcaacaacagcagcagcaaccatgctccgcgccccgacctcaattcgtggtgcgcgtcccacagccgcagcagcagcagagtcagcaagggacccgtgcgccccgtcctcctacgcccgccgtgcagtctggtcaaggccgcagggacgttcaaggtccgcagcgtctgtgcttcaactgcttcgagcccgggcactttgcggacaaatgcccaaaaccgcggcgccagcaaggccaagcgcctccccgctccaacaacggtggtaaggatgtcattcggggtcaggtgaaccacgtgacggccgaggacgtgctgacaactccagacgtcatcgttggtacgttcctcattcattccatccctgctaccattttgttcgactctggagcttcccactcgtttatatctgtgccattcgtggggagaaatcagttgggggtagaaaggcttaggaaccctctcctcatcaccacccctggaggggttatgacagcaaagtattatagtcctgccgtccctatagaaattcaggggattccttttccctcggatctgattcttttagacaccaagaacttggatgtgatccttgggatgaattggttggctcaattccaaggagtagtggattgtgcaagacgcactgtcactctgtaccgagggccggaacaaccggttgttttctttgcacccccaacctctgtcagtagttcagaacttcatcagataggactgtcagaaatccccatcgtcagagagttcggagacgtgtttccggaagaactacccggtatgccgcccaagcgagagattgagttccggatagatcttgctccaggaaccactcctctgtacaagcgaccctaccgtatggcagcaaatgaactggctgaagttaagaaacagttggaagagttgaaagaaaaggggtatatacgtccgagtacttccccctggggttctcctgtgatttttgtggagaagaaagacaagacgaagaggatgtgcgttgactacagagctctcaatgaagtcaccatcaaaaacaagtaccctcttccctggatcgatgatctgttcgatcagcttaaaggtgccacggtattctccaagattgatcttcgttccagatatcactagttgcgcatccgtgaagaagatattccgaagaccgcattcaccacgtgatacggactgtatgaattcacggtgatgtcattcggtttaaccaatgctcctgccttcttcatgaacttaatgaacaaagtgttcatggaatacttggataagtttgttgtggttttcattgatgacattctggtatactcacaatcagaggaagaccatcagcaccatctccgtctggtgttggggaagttgcgggaacatcaattgtatgccaaacttagcaagtgtgagttctggttgtccgaagtcaaattcttagggcacgtgatatctgctaaaggagttgctgtggaccccgaaacagtgaccgccgtcactgattggaagcaacccaagacagtcactcaaattcgcagtttcttaggtttggcaggatactaccggaggttcatcgagaacttctccaaaatcgctcgacccatgacacagttgttgaagaaagaagagaaatttgtgtggagcccgcaatgcgagaaggcgttccaaactctcaaagaaaagctggtttcctcgccagtgttaatcttgccggatactcgcaaggacttcatggtgtattgtgacgcttcgcgccaaggattggggtgcgtgctcatgcaggacggtcatgtggtggcctatgcctcacgccagctacggcctcatgaaggcaactttccaacggagagaagcatcaaggcaacacaaatccccgccaaga

SEQ ID NO: 14248 - DNA, 4467 bp, Oryza sativa
  Clone ID: TFbOSC417495j.C1.o2.fg
atgaagatcctggagctgcgtcaagagaacctgcagctcaagaaggacctagacgcggtggaggcgcagctgcatcagctcaagatcgcccagggagaggtctgccgccccaagcgccgccgcgtctgccgcagccagaagatcaccgcccgcaagagcacctccaggcccgagcttgttcgtcagtccctggcgtggacttgcttcgtcgagacccctcgtgccgagcccgcgcccgtggttccccaggagggggaagcctccggcgttggtagcacggaggatgcgctgttgctcaccttccgtcctggcccgtcgcagcggagaagtgctaataccggtgatggcaaccaacccgaaggcagcaaccaccaccaccagggcagcccacctccacctcctcctccgcctccaccaccaccgccagataccaacgccattctcacccaaatcctcgcccagcaggccaacatgatgactgctttcctccaccacctccaaaatccgccacaacataatgctcccccgccacctccccaacactctaaactcgccgagttcctccgcatccgcccacctaccttctctagctccaacaaccccgtggatgcgttggattggttgcatgctgtggggaaaaagctagacactgtgcagtgcagcgatgaggagaaagtcatcttcgccgcccaccaactgcagggactcgcatctctatggtgggaccatttccaggctacgcagccagaaggacagcctattacttgggctcgcttcaccgccgctttccggagaacccatgtgcccgccggagtcgtggcccttaagaaaagggaattccgagagttgaagcaaggcaaccgctccgtgatggagtatttgcatgagttcaacaacctggcccgttacgccccggaagatgtgcgggaagatgaggagaagcaagagaagttcttggcaggaatggaccctgagctgtccggtgctaaccaaagggtccgctacaccaatccctatccagggggatcctcctcgcagcagcaacaacagcagcagcagcctcgctccgcgcctcgacctcaattcgtggtgcgcgtcccacagccgcagcagcagcagaatcaacaagggactcgtgcgccccgtcctcctacgccaactgtgcagcctggtcaaggccgcagggacgctcaaggtccgcagcgtctgtgcttcaattgcttcgagcctgggcactttgcggataaatgcccaaagccaaggcgacagcaaggccaagcgcctccccgctccaacaacggtggtaaggacgtcattcggggtcgtgtgaaccacgtgacggctgaggacgtgctgacaactccagacgtcatcgttggtacgttcctcgttcattccatccctgctaccattctgttcgactctggagcttcccactcgtttatatctgtgccattcgtggggagaaatcagttgggggtagaaaggcttaggaaccctctgctcatcaccacccctggaggggttatgacagcgaagtattatagtcctgccgtccctatagaaattcaggggattccttttccctcggatctgattctgctagacaccaagaacttggatgtgatccttgggatgaattggttggctcaattccaaggagtagtggattgcgcgagacgcactgtcactctgtaccgaggtccggaacaaccggttgttttctttgcacctccaacctctgtcagtagttcagaactgcatcagataggactgtcagaaatccccatcgtcagggagttcggagacgtgtttccggaagaactacccgttatgccgcctaagcgagagattgagttccggatagatcttgctccaggaaccactcctctgtacaagcgaccctaccgtatggcagcaaatgaactggccgaagtcaagaaacagttggaagagttgaaagaaaaggggtatatacgtccgagcacttccccctggggtgctcctgtgatttttgtggagaagaaagacaagacgaagaggatgtgcgttgactacagagctctcaatgaagtcaccatcaaaaacaagtaccctcttccccggatcgatgatctgttcgatcagcttaaaggtgccactgtattctccaagattgatcttcgttccggatatcaccaattacgtattcgtgaagaagacattctgaagaccgcattcaccacgcgatacggactgtatgaattcacggtgatgtcattcggtttaaccaatgcacctgccttcttcatgaacttaatgaacaaagtgttcatggaatacttggataagtttgttgtggttttcattgatgacattctggtatactcacaatccgaggaagaccatcagcaccatctccgtctggtgttgggaaagttgcgggaacatcaattgtatgccaaacttagcaagtgtgagttctggttgtccgaagtcaaattcttagggcacgtgatatctgctaaaggagttgcggtggaccccgaaacagtgaccgccgtcactgattggaagcaacccaagacagtcactcaagtccgcagtttcttaggtttggcaggatactaccgaaggtttatcgagaacttctccaaaatcgctcgacccatgacgcagttgttgaaaaaagaagagaaatttgtgtggagcccgcaatgcgagaaggcgtttcaaactctcaaagaaaagctggtttcctcgccggtgttaatcttgccggatactcgcaaggatttcatggtgtattgtgacgcttcgcgccaaggattggggtgcgtgctcatgcaggatggtcatgtggtggcctatgcctcacgccagctacgacttcatgaaggcaactaccctacccatgatttggagttagccgcggtggttcatgctctaaaaatctggcggcactatctcatcgggaatcgctgtgaaatatatactgatcataagagtttgaaatacattttcactcagtcggacctgaatcttcggcaaaggagatggttagaactcatcaaggattatgatgtgggaattcactatcatcctggtaaggccaacgtggttgccgacgctctaagtcgaaaaagtcattgcaacactcttaacctccgtggcattccacccgaacttaatcaacagatggcagccctgaacctaagcatagttagtcgtggattcttggctgcgttggaagccaagcctgccttgctcgatcaaatccgcgaggctcagaagaatgatccggacatgcatggactcctcaagaatatgaaacagggtaaagccgctggtttcacagaggatgaacacggaaccctgtggaacggaaatcgagtatgcgttccagataacagagaacttaaacagctgatactccaggaagcccacgaaagtccttattccatccaccctggcagtacaaagatgtacttagacttgaaggagaaatactggtgggttagtatgaagcgggaaattgcagagtttgtggccctttgtgatgtgtgccagcgtgtcaaggcagagcaccaacgaccggccggacttctccaacccctccaagtacctgaatggaaatgggatgaaattgggatggacttcatcaccggacttccaaagacccaaggtggatatgattctatatgggtagttgtggatcgattaaccaaggtagctcgattcattcctgtgaagaccacctatggagggaacaaactagccgagctctacttcgataggatcgtgagtctccatggcgttcccaagaaaatcgtatccgataggggaagccaattcacctctcacttttggaagaagctccaagaagagctgggtacccgcttaaatttcagcaccgcgtatcacccgcagacagatggacagaccgagcgtctaaatcagatcctagaagatatgcttcgcgcatgtgtcctagatttcgggaagacctgggataagagtctcccctatgccgagttctcctacaataacagttatcaagccagcatacaaatggcaccttatgaagcgttgtatgggcgcaaatgccggacaccgctattgtgggaccaagttggggaaagccaagtgttcgggactgatatcctgagagaagctgaagcgaaggtcagaaccattcgggataatctaaaggtggcacagtcccggcagaaaagttatgcagataatcgtcgccgtaacctggaattcgcagtgggtgatcttgtgtatcttcgggtcacgccattgcgaggtgtacacaggtttcggacaaaagggaagctcgcacctcggtatgtgggtcctttccgtatcgttgctcgacgcggagaagtcgcttaccagttggagctgcccgcctccttgggcaacgtgcatgatgtgttccatgtgtcgcaactcaagaaatgtctccgagtgccatcctag

SEQ ID NO: 14249 - DNA, 2451 bp, Oryza sativa
  Clone ID: TFbOSC420793j.C1.o1.fg
atgactggcttcgtcttggagttgcgaggcatgtgcgtggccctggggtatccacacggagtggactaccaggccaggccgcttccagagcaggagggtgaggacgcggagccccacgctggttgggaggtcactgcagtgatcctcgctggctcttctgagcggacttcgctgacagtcaccgcgggtggcgactccttccccgccgcttgccagagcgccgctctcctcgccatcggcactcttcaccagcgctacccggacgagttgcagcactcgccctaccgctaccaccctcgtcgcggaggagcccgcgactacgccaccttccgggatgctagctcggaggatgacgctaccatcgtgcacctggcacgcatggtggaggcgtacgacgcggctcgtatcgacttccaccagatggtacgccgcgggatggtcgagaacaacatgaagatcctggagctgcgtcaggagaacctgcagctcaagaaggacctcgacgcagtggaggcgcagctgcatcagctcaaggtcgcccagggagagatctgccgccccaagcgtcgccgcgtctgccgcagccagaagatcaccgcccgcaagagcacctccaggcccgagcttgttcgtcagtccctggcgtggacttgcttcgtcgagacccctcgtgccgagcctgcgcccgtggttccccaggagggggaagcctccggcgttggtagctcggaggctccttctctgtttgctggttctgtgtggggttttcagatggtgacgaccaggagaaatgttagcaccggtgaaggcaaccaacccgaaggcagcgaccacaaccaccagggcaacccacctccacctcctcctccacctccacctccaccaccaccaccagacaccaacgccattctcacccaaatcctcgcccaacaagccaacatgatgactgctttcctccaccacctccaaaatccgccacaacagaatgctccaccaccacctccccaacactctaaactcgccgagttcctccgcatccgcccacctaccttctccagctccaacaaccccgtggatgctttggattggttgcatgccgtggggaaaaagctagacacggtgcagtgcagtgatgaggagaaagtcgtcttcgccgcccatcagctgcagggacccgcatctctctggtgggaccacttccaggctacgcagccagagggacagccgattacttggactcgcttcaccgccgctttccggagaacccatgtgcccgctggagtcgtggctcttaagaaaagggaattccgagagttgaagcaaggcaaccgctccgtgatggagtatttgcatgagttcaacaacctggcccgttacgctccggaggatgtgcgggaagatgaggagaagcaagagaagttcttggcaggaatggaccctgagctgtccgtccgtctagtctctggggactatccggattttcaacgactggtggacaagagcatccgcttggaagccaagcacaaggagctggaatcgcacaagcgccgcttggcgaatttccgcaatcaacagggtgctaaccagagggttcgctacaccaatccctatccagggggatcctcctcgcagcagcagcagcaacctcgcccagcgccccgacctcaattcgtggtgcgcgtcccacagccgcagcagcagcagaatcagcaagggactcgtgcgccccgtcctcctacgccagctgtgcagcccgttcaaggccgcagggacgctcaaggtcagcagcgtctgtgcttcaactgtttcgagcccgggcactttgcggataaatgcccgaagccaaggcgtcagcaaggccaagcgcctccccgctccaacaacggcgggaaggatgtcattcggggccgtgtgaatcacgtgacggccgaggacgtgctgacaactccagacgtcatcgttgttgtggatcgactaaccaaggtagctcgatttattcctgtgaagaccacctatggagggaacaagctagcggagctctacttcgccaggatctttcgccggcgtcttcaatggagccgagatctccgcggccggtttcctttctctccggccgccctctctctctcccgtcgctataaaatcgtcccccgtgcttcgctcttccgtttccgccgctcgccgctcgctctcgccgtcggattcgtgctcacgccgtgcacctctctctccgccgtcgccgtcgagctccggtccgccgccgtcgtcgctccggtcttcctcccgactcggcgtcacctccatccgcgtcgccgcgtcgtcgtcgaccccgtccgcatctccgtttcgcccgccgaccgtcggagcaccgtcgtcatcgtcatcccgaaccgcgccgccgccttcttccgcttcggccgccgttcccgtcgtcgccgtcgaccggggtga

SEQ ID NO: 14250 - DNA, 2103 bp, Oryza sativa
  Clone ID: TFbOSC4210j.C1.o1.fg
atgtcatggcacagggccggtgtcctgctgctaggggctcagttctgcctgcctgtcccgggtgttccggccatggccggcagcgtcacccgtcgtggtttggacatgactggcttcgtcttggagttgcggggcatgtgcgtggccctggggtatccacacggagtggactaccaggccaggccgctcccggagcaggagggtgacgatgcggagccccgcgctggttgggaggtcactgcagtgatcctcgctggctcttctgagcggacttcgctgacagtcaccgcgggtggcgattccttccccgccgcttgccagagcgccgctctcctcgccatcggcactcttcaccagcgctacccggacgagttgcagcactcgccctaccgctaccaccctcgtcgcggaggagcccgcgactacgccaccttccgggatgctagctcggaggatgacgctaccatcgtgcacctggcgcgcatggtggaggcgtacgacgcggctcgtatcgacttccatcagatggtgcgccgtgggatggtcgagaacaacatgaagatcctggagctgcgtcaggagaacctgcagctcaagaaggacctcgacgcggtggaggcgcagctgcatcagctcaagatcgcccagggagagatctgccgccccaagcgtcgccgcgtctgccgcagccagaagatcaccgcccgcaagagcacctccaggcccgagcttgttcgtcagtccctggcgtggacttgcttcgtcgagacccctcgtgccgagcccgcgcccgtggttccccaggagggggaagcctccggcgttggtagcacggaggttgtgtggggcatggttatgccgatggtgacgaccaggagaaatgctaacaccggtgatggcaaccaacccgaatgcagcaaccacaaccaccagggcaacccacctccacctcctcctcctcctccaccaccaccaccagacaccaacgccattctcacccaaatcctcgcccagcaagccaacatgatgaccgctttcctccaccacctccaaaacccgccacaacaaaatgctccaccaccacccccacaacactctaaactcgccgaattcctccgcatccgcccacctaccttctctagctccaacaaccccgtggatgctttggattggttgcatgccgtggggaaaaagttaggcactgtgcagtgcagcgatgaggagaaagtcatcttcgccgcccaccagctgcaaggacccgcatctctatggtgggaccacttccaggctacgcagccagagggacagcctattacttgggctcgcttcaccgccgctttccggagaacccatgtgcccgccggagtcgtggcccttaagaaaagggaattccgagagttgaagcaaggcaaccgctccgtgatggagtatttgcatgagttcaacaatctggcccgttacgctccggaggatgtgcgggaagatgaggagaagcaagaaaagttcttggcaggaatggaccccgagctgtccgtccgtctagtctctggggattatccggattttcaacgactggtggacaagagcatccgcttggaagctaagcacaaggagctggagtcgcacaagcgtcgcttggcgaatttccgcaatcaacagggtgctaaccaaagggtccgctacaccaatccctatccagggggatcctcctcgcagcagcaacaacagcagcagcaacctcgctccgcgccccgacctcaattcgtggtgcgcgtcccacagccgcagcagcagcagaatcagcaagggactcgtgcgccccgtcctcctacgccaactgtgcagcctggccaaggccgcagggacgctcaaggtcagcagcgtctatgcttcaactgcttcgagcccgggcactttgcggataaatgcccaaagccaaggcgtcagcaaggccaagcgcctccccgctccaacaacggcgggagggatgtcattcggggtcgtgtgaatcacgtgacggccgaggacgtgctgacaactccggacgtcatcgttggacggtcatgtggtagcctatgcctcacgtcagctacgacctcatga

SEQ ID NO: 14251 - DNA, 3690 bp, Oryza sativa
  Clone ID: TFbOSC421503j.C1.o5.fg
atgtcatggcacagggccggtgtcctgctgctaggggctcagtcctgcctgcctgtcccgggggttccggccgtaggtgggattgggtcggtactcttgtctatggctaggatgggtttgaaactatgtcacgtcttccgtctgtataccgtggtgatggccggcagcgtcacccgtcgtggtttgagcatgactggcttcgtcttggagctgcggggcatgtgcgttgtcctggggtatccacatggagtggactaccaggccaggccgcttccggagcaggagggtgacgatgcagagccccacgctgcttgggaggtcactgcagtgatcctctctggctctcccgagcggacttcgctggcagtcaccgcgggtggagattccttccccgccgcttgccagaacgccgctctcctcgctatcggcactcttcaccagcgctacccggacgagttgcagcactcgccctaccgctaccaccctcgccgcggaggagcccgcgactacgccaccttccgagatgctagctcggaggatgacgctaccatcgtgcacctggcgcgcatggtggaggcgtacgacgcggctcgtatcgacttccaccagatggtgcgccgtgggatggtcgagaacaacatgaagatcctggagctgcatcaggagaacctgcaactcaagaaggacttagacgcggtggaggcgcagctgcatcagctcaagatcgcccagggagaggtctgccgccccaagcgtcgccgcgtctgccgcagccagaagatcaccgcccgcaagagcacctccaggcccgagcttgtttgtcagtccctggcgtggacctgcttcgtggagacccctcgtgccgagcccgcgcccgtggttccccaggagggggaagcctccggcgttggtagcacggaggatgcgctgttgctcaccttccgtcctggcccgtcgcagcggagaaatgctgccaccggtgatggcaaccaacctgaaggcagcaaccacaaccaccagggcaacccacctccacctcctcctccgcctccaccaccaccaccagacaccaacgccattctcacccaaatcctcgcccagcaagccaacatgatgactgctttcctccaccacctccaaaatccgccacaacataatgctccaccaccacctccccaacactctaaactcgccgagttcctccgcatccgtccacctaccttctctagctccaacaaccccgtggatgcattggattggttgcatgccgtggggaaaaagctagacacggtgcagtgcagcgatgaggagaaagtcatcttcgccgcccaccagctgcaggggcccgcatctctatggtgggaccatttccaggctacgcagccagaggggcagcctattacttgggcccgtttcaccgccgctttccggaggacccatgtgcccgttggagtcgtgtcccttaagaaaagggaattccgagagttgaagcaaggcaaccgctccgtgatggagtatttgcatgagttcaacaacctggcccgttacactccggaggatgtgcgggaagatgaggagaagcaagagaagttcttggcaggaatggaccccgagctgtccgtccgtctagtctctggggactatccggattttcaacgtctggtggacaagagcatccgcttggaagccaagcacaaggaactggagtcgcacaagcgccgcttggcgaatttccgcaatcaacagggtgctaaccaaagggtccgctacaccaatccctatccagggggatcctcctcgcaacagcaacaacagcagcagcaacctcgctccgcgcctcgacctcaattcgtggtgcgcgtcccacagccgcagcagcagcagaatcaacaagggactcgtgcgccccgtcctcctacgccaactgtgcagcctggtcaaggccgcagggacgctcaaggtcagcagcgtctgtgcttcaactgcttcgagcccgggcactttgcggataaatgcccgaagccaaggcgtcagcaaggccaagcgcctccccgctccaacaacggtgcgaaggatgtcattcggggtcgtgtgaatcacgtgacggccgaggacgtgctgacaactccagacgtcatcgttggtacgttcctcgttcattccatccctgctaccattttgttcgactctggagcttcccactcgtttgtatctgtgccattcgtggggagaaatcagttgggggtagaaaggcttaggaaccctctgctcatcaccacccctggaggggttatgacagcaaagtattatagccctgccgtccctatagaaattcaggggattccttttccctcggatctgattctgctagacaccaagaacttggatgtgatccttgggatgaattggttggctcaattccaagtagtagtggattgcgcgagacgcactgtcactctgtaccgagggccggaacaaccggttgttttctttgcacccccaacctctgtcagtagttcagaactgcatcagataggactgtcagaaatccccatcgtcagggagttcggagatgtgtttccggaagaactacccggtatgccgcccaagcgagagattgagttccggatagatcttgctccaggaaccactcctctgcacaagcgaccctaccgtatggcagcaaatgaactggccgaagttaagaaacagttggaagagttgaaagaaaaggggtatatacgtccgagtacttccccctggggtgctcctgtgatttttgtagagaagaaagacaagacgaagaggatgtgcgtcgactacagagctctcaatgaagtcaccataaaaaacaagtaccctcttccccggatcgatgatctgttcgatcagcttaaaggtgccactgtattctccaagattgatcttcgttccggatatcaccaattacgtattcgtgaagaagatattccgaagaccgcattcaccacgcgatacggactgtatgaattcacggtgatgtcattcggtctaaccaatgcacctgccttcttcatgaacttaatgaacaaagtgttcatggaatacttggataagtttgtcgtggttttcattgatgacattctgatatactcacgatcagaggaagaccatcagcaccatctccgtctggtgttgggaaagttgcatgaacatcaattgtatgccaaacttagcaagtgtgagttctggttgtccgaagtcaaattcttagggcacgtgatatctgctaaaggagttgccgtggaccccgaaacagtgaccgccgtcactgattggaagcaacccaagacagttactcaagtccgcagtttcttaggtttggcaggatattaccggaggttcatcgagaacttctccaaaatcgctcgacccatgacacagttgttgaagaaagaagagaaatttgtgtggagcccgcaatgcgagaaggcgtttcaaactctcaaggaaaagctggtttcctcgccggtgttaatcttgccggatactcgcaaggacttcatggtgtattgtgacgcttcgcgccaaggattggggtgcgtgctcatgcaggacggtcatgtggtagcctatgcctcacgccagctacgacctcatgaaggcaactaccctacccatgacttggagttagccgctgtcacgtcctga

SEQ ID NO: 14252 - DNA, 5793 bp, Oryza sativa
  Clone ID: TFbOSC5440j.C1.o1.np
cctcgtccacccttccgtttcggtcgccgaccgccggaacgccgtcgaccccgtcgacccgatccgcgctgtcgccttccctcgctccgaccgccttttttgtcgtcgccgtcgacctagggtgagccatggaccgccgcctcttttcccccttcccttcccctctctcggccgccgctccgccgtgcctatggccgccgccggcgaccataggggcgcgggcgctgcctcccgccggctgcgccggccttggccgccctcgggcgcgtcgagtggctgccgcgtggggcccggccgtcagccgcccgcgcccttaggtgcggctgacgcgtgggacccacggcgccggccggtgtgagcccgggtgcacccggtccaccgtggacccacctcggccatataaggaccggtcttcgggcctctgttgcaaagcactaccgtacttccacatgtctagtggggcaaaggaaggctacacgagctgcggcccggtagtcgagatgtcatggcacagggccggtgtcctgctgctaggggctcagtcctgcctacctgtcccggaggttccggccgtaggtggggttgggtcgatgtacacctctgatcagagtataatctattcgaatagccgcgccctcggttatgggcaagccgagcaatgtacccaaatggccggcagcatcaaccgtcgtggtctggacctgaccggcttcgttttggagctgcggggcatgtgcgttgtcttagggtattcgcatggagtggactaccagggcaagcagctcccggagcaggagggtgacgatgcagagccccacgctgcttgggaggttactgtagtgatcctcactggctcacccgagaggacttcgttggcagtcaccgtgggtggagattctttctccgccgcttgccagaacgccgctctccttgccatcggcactcttcaccagctctacccggacgagttgcagcactcgccctaccgctaccaccctcgccgcggaggagcccgcgactacgccaccttccgggatgctagctcggaggatgacgctaccatcaggcacctggcacgcatggtggaggcgtacgacgcggcccgtatcgacttccatcagatggtgcgtcgcgggttggtcgagaacaacatgaagatcctggagctgcgtcaggagaatctgcagctgaagaaggacctagacgcagtggaggcgcagctgcgtcagctcaagatcgcccagggagaggtcggtcgccccaagtgtcgccgcgtctgccgcagcctgaagatcactgcccgcaagagtacctccaggcccgagcttgttcgtcagtccctggcgtggacctgcttcgtcgagaccccttgtgccgagcccgcgcccgtggttcctcaggaggatggagcctccggcgttggcagcacggaggatgcgctgctgctcaccttccatggtgacaaccaggagaagtgctgctaccggtgaaggcagtcaccccgaaggcagcaaccacaacaaccatggcagcccacctccacctcctccccctcctccaccaccaccaccagacaccaacgccatcctcacccaaatcctcgcccagcaggccaacatgatggctgctttcctccaccacatccaaaatccgccacaacataatgctccaccaccacccccacaacactctaaactcgccgagttcctccgcatccgtccacctaccttctctagctccaataaccccgtggatgcgttggattggttgcatgccgtggggaaaaagttagacaccgtgcagtgcagtgatgaggagaaagtcatcttcgccgcccaccaactgcaggggcccgcatctctatgttgggaccatttccaggctacgcagccaaaggggcagcctattacttgggcccgcttcaccgccgctttccggagaacccatgtgcccgccggagtcatggcccttaagaaaagggaattccgagagttgaagcaaggcaaccgctccatgatggagtatttgcatgagtttaacaacctggcccggtacgccctggaggatattcgtgaagatgaggagaagcaagagaagttcttggcaggaatggaccctgagctgtccgtgcgtcttgtctccggggactatccggatttccaacgtctggtggacaagagcatccgcttggaagccaagcacaaggaactggagtcgcacaagcgtcgcttggcgaatttccgcaaccaacagggggctaaccaaagggtccgctacaccaatccctatccagggggatcctccttgcagcagcaacagcagcaacaacctcgctccgcgccccgacctcaattcgtggtgcgtgtcccacagccgcagcaacagcagagtcagcaagggactcgtgcgccccgtcctcctacgccagctgtgcagcctggtcaaggccgccgggacgctcaaggtcagcagcgtctgtgcttcaactgcttcgagcctgggcactttgcggataaatgcccaaagccgaggcgccagcaaggccaagcgcctccccgctccaacaacggtggtaaggatgtcattcggggtcgtgtgaaccacgtgatggccgaggacgtgctgacaactccagacgtcatctttggtacgttccccattcattccatccctgctaccattttgttcgactctggagcttcccactcgtttatgtctgtgccattcgtggggagaaatcagttgggggtagaaaggcttaggaaccctctgctcatcaccacccctggaggggttatgacagcaaagtattatagccatgccgttcctatagaaattcagggaattccttttctctcggatctgattcttctagacaccaagaacttggatgtgatccttgggatgaattggttggctcaattccaaggagtagtggattgtgcaagacgcactatcactctgtaccgagggccggaacaaccggttgttttctttgcacccccaacctctgtcggcagttcagaacttcatcagataaaactgtcggaaatccccatcgtcagggagttcggagacgtgtttccggaagaactacccggtatgccgcccaagcgagagattgagttccggatagatcttgctccaggaaccgctcctctgtacaagcgaccctaccgtatggcagcaaatgaactggccgaagtcaagaaacagttggaagagttgaaagaaaaggggtatatacggccgagtatttccccctggggtgctcctgtgatttttgtggagaagaaagacaagacgaaagaggatgtgcgttgactacagagctctcaatgaagttactatcaaaaacaagtaccctcttccccggatcgatgatctgttcgatcagcttaaaggtgccacggtattctccaagattgatcttcgttccggatatcaccagttgcgcatccgtgaagaagacatcccgaagaccgcattcaccacgcgatacggactgtatgaattcacagtgatgtcgtttggtttaaccaatgctcctgccttcttcatgaacttaatgaacaaagtgttcatggaatacttggataagtttgttgtggttttcattgacgacattctggtgtactcacaattagaggaagaccatcagcaccatctccgtctggtgttgggaaagttgcgggaacatcaattgtatgccaaacttagcaagtgtgagttttggttgtccgaagtcaaattcttaggacacgtgatatctgctaaaggagttgctgtggaccccgaaacagcgaccgccgtcactgattggaagcaacccaagacagtcactcaaattcgcagttttttgggtttggcaggatactaccggaggttcatcgagaacttctccaaaatcgctcgacccatgacacagttgttgaagaaagaagagaaatttgtgtggagcccgcaatacgagaaggcattccaaactctcaaggaaaggctggtttcctcgccggttttaatcttaccggatactcgcaaggacttcatggtgtactgtgacgcttcgcgccaaggattggggtgcgtgctcatgcaggaaggtcatctggtagcctatgcctcacgccagctacggcctcatgaaggcaactaccctacccatgatttggagttagccgcggtggttcatgctctaaaaatctggcggcactatctcattgggaatcgctgtgaaatatatactgatcataagagtttgaaatacatcttcacccagtcggatctgaatcttcggcagaggagatggttagaactcatcaaggattatgatgtgggaattcactatcatcctggtaaggccaacgtggttgccgacgctctatgtcgaaaaagccattgcaacactcttaacgtccgtggcattccagccaaacttaatcaacagatggaagccctgaacctaagcatagttggtcgtggattcttggctacgctggaagccaagcctaccttgctcgatcaaatccgcgaggcccagaagaatgatccggatatgcgtggactcctcaagaatatgaaatagggtaaagccgctggtttcacagaggatgaacacggaaccctatggaacggaaatcggcgtgtcaaggcagagcaccaacgaccggccggacttctccaacctctccaagtaccagaatggaaatgggatgaaattgggatggatttcatcaccggacttccaaaaacccagggcggttatgattctatatgggtagtcgtggatcgactaaccaaggtggctcggtttattcctgtgaagaccacctatggagggaacaaactagctgagctctacttcgctaggatcgtgagtctccatggcgttcctaagaaaattgtatctgataggggaagccaattcacctctcacttttggaagaagctccaagaagagctgggtacccaattaaatttcagcaccgcgtatcacccgcagacagatggacagaccgagcgtctaaatcagatcctagaagatatgcttcgcgcatgtgtcctagatttcgggaagacctgggataagagtctcccctatgccgagttctcctacaataacagctaccaagccagcatacaaatggcaccctatgaagcgttgtatggacgcaaatgccggacaccgctattgtgggaccaagttggggaaaacaagtgttcggggctgatatcctgagagaagctgaagctaaagtcagaaccattcgggataatctaaaggtggcacagtcccggcaaaagagttatgcagataaccgacgccgtaatctggaattcgtagtggatgattttgtgtaccttcgggtcacgccattgcgaggtgtacataggtttcagacgaaagggaagctcgcacctcggtttgtgggtcctttccgtatcattgctcgacgcggggaagtcgcttaccagttggagctgcccgtttccttgggcaacgtgcatgatgtgttccatgtgtcgcaactcaagaaatgccttcgagtgccgtccgagcaggccgactcagagcagattgtagtttgcgaagacttgacctacgtgtagagactagtgaaaatcctggacaccatggagcgcaggaccaggaaccgggtaatccgtttttgcaagatccaatggagcaaccacgctgaggaagaacctacttgggagcgtgaagacgagatgaaggcagcccatcccaatctcttcgccagttcttccgaatctcggggtcgagattccgtt

SEQ ID NO: 14253 - DNA, 5334 bp, Oryza sativa
  Clone ID: TFbOSC5888j.C1.o4.fg
atggatgaagtcgggggtcgatggacattctccagggcaaatgaaggctacacgagctgcggcccgatggccggcagcgttacccgtcgtggtttggacatgactggcttcgtcttggagctgcgaggcatgtgcgtggtcttggggtatccacatggagtggattaccaggccaggccgctcccggagcaggagggtgaggatgcagagcctcacgctggttgggaggtcactgcagtgatcctctccggctctcccgagcggacttcgctggcagtcaccgcgggtggagactccttccccgccgcttgccagaacgccgctctcctcgccatcggcactcttcaccagcgctacccggacgagttgcagcactcgccctaccgctaccaccctcgtcgcggaggagcccgcgactacgccaccttccgagacgccagctcggaggatgacgctaccgtcgtgcatctggcacgcatggtggaggcgtacgacgcggctcgtatcgacttccatcagatggtgcgccgtggcatggtggagaacaacctgaagatcctggagctgcgtcaggagaacctgcagctcaagaaggacctcgacgcgttggaggcgcagctgcaccagctcaagatcgcccagggagagatcagccgtcccaagcgtcgccgcgtctgccgcagccagaagatcaccgcccgcaagagcacctccaggcccgagcttgttcgtcagtccctggcgtggacttgcttcgtcgagacccctcgtgccgagcctgcgcccgtggttccccaggagggggaagcctccggcgttggtagctcggaggctccttctctgtttgctggttccgtgtggggttttcagatggtgacgaccaggagaaatgttaacaccggtgaaggcaaccaacccgaaggcagcaaccccaaccaccaaggcaatccacctccgccaccaccgccagacaccaacgccattctcacccaaatcctcgcccagcaagccaacatgatgaccgctttcctccaccacctccaaaacccgccacaacagaatgctccaccaccacccccacaacactctaaactcgccgagttcctccgcatccgcccacctaccttctccagctccaacaaccccgtggatgctttggattggttgcatgccgtggggaagaagttagacacggtgcagtgcagcgatgaggagaaagtcgtcttcgccgcccatcagctgcagggacccgcatctctatggtgggaccatttccaggctacgcagccagaggggcaaccgattacttgggctcgcttcaccgccgctttccggagaacccatgtgcccgccggagtcgtggctctcaagaagagggaattccgggagttgaagcaaggcaaccgctccgtgatggagtatttgcatgagttcaacaatctagcccgttatgccccggaggatgtgcgggaagacgaggagaagcaggagaagttcttggcaggaatggaccctgagctgtccgttcgtctagtctctggggactatcctgattttcaacgactggtggacaagagcatccgcttggaagccaagcacaaggagctggaatcgcacaagcgccgcttggcgaatttccgcaatcaacagggtgctaaccagagggtccgctacaccaatccctacccagggggatcctcctcgcagcagcagcagcagcagcaacctcgcccagcgccccgacctcaattcgtggtgcgcgtcccacagccacagcagcagcagaatcagcaagggactcgtgcaccccgtcctcctacgccagctgtgcagcccgttcaaggccgcagggacgctcaaggtcagcagcgtctgtgcttcaactgcttcgagcccgggcactttgcggataaatgcccgaagccaaggcgtcagcaaggccaagcacctccccgctccaacaacggcgggaaggatgtcattcggggtcgtgtgaatcacgtgacggccgaggacgtgctgacaactccagacgtcatcgttggtacgttcctcgttcattccatccctgctacaattttgttcgactctggagcttcccactcgtttatatctgtgccattcgtggggagaaatcagttgggggtagaaaggcttagaaaccctctgctcatcaccacccctggaggggttatgacagcaaagtattatagccctgccgttcctatagaaattcaggggattccttttccctcggatctgattcttctagacacaaagaacttggatgtgatccttgggatgaattggttggcccaattccaaggggtagtggattgcgcgaggcgcactgtcactctgtaccgaggaccggaacaaccggttgttttctttgcaccctcaacctctgtcagaagttcggaacttcatcagatagaactgtcagaaatccccatagtcagagagttcggagacgtgtttccggaagaactacctggtatgccgcccaagcgagagattgagttccgaatagatcttgctccaggaaccactcctctgtacaagcgaccctaccgtatggcagcaaatgagctggccgaagttaagaaacagttggaagagttgaaagaaaaggggtacatacgtccgaagaagaaagacaagacgaagaggatgtgcgtcgactacagagctctcaatgaagtcaccataaaaaacaagtaccctcttccccggatagatgatctgttcgatcagcttaaaggtgccactgtattctccaagattgatcttcgttccggatatcaccagttacgtattcgtgaagaagatattccgaagaccgcattcaccacgcgatacgggttatatgaattcacggtgatgtcgttcggcttaaccaatgctcctgccttcttcatgaacttgatgaacaaagtgttcatggaatacttggataagttcgttgtggttttcatcgatgacattctgatatactcacaatcagaggaagaccatcagcaccatctccgtctggtgttgggaaagttgcgggaacatcaattgtatgccaagcttagcaagtgtgagttctggttgtccgaagtcaaattcttggggcacgtgatatctgctaaaggagttgctgtggaccccgaaacagtgaccgccgtcaccgattggaagcaacccaagacagtcactcagattcgcagtttcttgggtttggcaggatattaccggagattcatcgagaacttctccaaaatcgctcgacccatgacacagttgttgaagaaagaagagaaatttgtgtggagcccgcagtgcgagaaggcgttccaaactctcaaggaaaagctggtttcctcgccagtgttaatcttgccggatactcgcaaggatttcatggtgtattgtgatgcttcgcgccaaggattggggtgcgtactcatgcaggacggtcatgtggtagcctatgcttcacgtcagctacgtcctcatgaaggcaactaccctacacatgacttggagttagcagcggtggttcatgctctaaaaatctggcggcactatctcattgggaaccgctgtgaaatatatactgatcataagagtttgaaatacatcttcactcagtcagatctgaaccttcggcaaaggagatggttagaactcatcaaggattatgatgtgggaattcactatcatcctggtaaggctaacgtggttgccgacgctctaagtcggaagagccattgcaatactcttaacgtccgtagcattccgcccgagcttaatcaacagatggaagccctgaacctaagcatagttggtcgcggattcttggctgcgttggaagccaagcctaccttgctcgatcaaatccgcgaggctcagaagaatgatccggacatgcatggactcctcaagaatatgaaacagggtaaagccgctggtttcacagaggatgaacacggaaccctatggaacggaaagcgggtatgcgttccagataaccgagaacttaaacagctgatacttcaggaagctcacgaaagtccttattccattcacccgggcagtaccaagatgtacttagacttgaaggagaaatactggtgggttagcatgaagcgggaaattgcagaatttgtggctctatgtgatgtgtgccagcgtgtcaaggcagaacaccaacgaccggccggacttctccaacctctccaagtgccggaatggaaatgggatgaaattgggatggatttcatcaccggtcttccaaaaacccaaggtggatatgactctatatgggtaatagtggatcgattaaccaaggtagctcgattcattcctgtgaagaccacctatggagggaataaactagcggaactctacttcgctaggatcgtgagtctccatggtattcccaagaaaatcgtatctgataggggaagccaattcacctctcgcttttggaagaagctccaagaagagctgggtacccgattgaatttcagcaccgcctatcacccgcagacagatggacagaccgagcgtctaaatcagatcctagaagatatgctccgcgcatgtgtcctagatttcgggaagacttgggataagagtctcccctatgccgagttctcctacaataacagctatcaagccagcatacaaatggcaccatatgaagcgttgtacgggcgcaaatgccggacaccgctattgtgggaccaagttggagaaagtcaagtgttcgggactgatatcctgagagaagctgaagctaaagtcagaatcattcgggataatctaaaggtggcacagtcccggcagaaaagttatgcggataaccgtcgccgtgacctggaattcgcagtggatgactttgtgtatcttcgggtcacgccattgcgaggtgtacacaggtttcagacgaaagggaagctcgcacctcggtatgtgggtccctttcgtatcactgctcgacgcggagaagtcgcctaccagctggagttgcccgcctccttgggtaacgtgcatgatgtgttccatgtgtcgcaactcaagaaaagtctccgagtgccatccgagcaggccaactcagagcaaattgaagttcgcgaagacctgacctatgtggagaggccagtgaaaatcctggacaccatggagcgcaggaccaggaaccgagtaatccgtttttgcaaggtccagtggagcaaccacgccgaagaagaagctacttgggagcgcgaagacgaactgaaggcagcccatcccgatctcttcgccagttcttccgaatctcggggtcgagattccgtttaa

SEQ ID NO: 14254 - DNA, 2133 bp, Oryza sativa
  Clone ID: TFbOSC6120j.C1.o1.fg
atgtcgtggcagagggttggtgccctgctgcttggggctcagtcctgcctgcctgtcccggagatggccggcagcgtcacccgtcgtggtttggacatgactggcttcgtcttggagctgcggggcatgtgcgtggccctggggtatccacatggagtggactaccaggccaggccgcttccggatcaggagggtgacgacgcggagccccacgctggttgggaggtcaccgcagtgatcctctctggctctcccgagcggacttcgctggcagttaccgcgggtggagattccttccccgccgcttgccagaacgccgctctcctcgccatcggcactcttcaccagcgctacccggacgagttgcagcactcgccctaccgctaccaccctcgtcgcggaggagcccacgactacgccaccttccgggatgctagctcggaggatgacgctaccatcgtgcacctggcgcgcatggtggaggtgtacgacgcggctcgtatcgacttccatcagatggtgcgtcgcgggatggtcgagaacaatctgaagatcctggagctgcgtcaggagaacctgcagctcaagaaggacctagacgcggtggaggcgcagctgcatcagctcaagatcgcccagggagaggtctgccgccccaagcgtcgccgcgtctgccgcagccagaagatcaccgcccgcaagagcacctccaggcccgagcttgttcgtcagtccctggcgtggacttgcttcgtcgagacccctcgtgccgagcccgcgcccgtggttccccaggagggggaagcctccggcattggtagcacggaggctctttctctgtttgctggttctgtgtggggttttcagatggtgacgaccaggagaaatgctgccaccggtgatggcaaccaacccgaaggcagcaaccacaaccatcagggcaacccacctccacctcctcctccgcctccaccaccaccaccagacaccaacgccattctcacccaaatcctcgcccagcaagccaacatgatgactgctttcctccaccacctccaaaatccaccacaacataatgctccaccaccacccccacaacactctaaactcgccgagttcctccgtatccgcccacctaccttctctagctccaacaaccccgtggatgcgttggattggtttcatgccgtggggaaaaagctagacacggtgcagtgcagcgatgaggagaaagttatcttcgccgcccaccaactgcaggggcccgcatctctatggtgggaccatttccaggctacgcagccagaggggcagcctattacttgggcccgcttcaccgccgctttccggagaacccatgtgcccgccggagtcgtggcccttaagaaaagggaattccgagagttgaagcaaggcaaccgctccgtgatggagtatttgcatgagttcaacaacctagcccgttacgccccggaggatgtgcgggaagatgaggagaagcaagaaaagttcttggcaggaatggaccctgaactgtccgtccgtctagtctctggggactatccggattttcaacgattggtggacaagagcatccgcttggaagccaagcacaaggagctggagtcgcacaagcgccgcttggcgaatttccgcaatcaacagggtgctaatcaaaggggccgctacaccaatccctatccagggggatcctcctcgcagcagcaacaacagcagcagcaacctcgccccgcgccccgacctcaattcgtggtgcgcttcccacagccgcagcaacagcagaatcaacaagggactcgtgcgccccgtcctcctacgccaacggtgcagcctggtcaaggccgcagggacgctcaaggtcagcagcgtctgtgcttcaactgcttcgagcccgggcactttgcggataaatgcccaaagccaaggcgtcagcaaggccaagcgcctccccgctccaacaacggcgggaaggatgtcattcggggtcgtgtgaatcacgtgacggccgaggacgtgctgacaactccagacgtcatcgttgggagttcggagatgtgtttccggaagaactacccggtatgccgcccaagcgagagattgagttccggatag

SEQ ID NO: 14255 - DNA, 1957 bp, Oryza sativa
  Clone ID: TFbOSC6491j.C1.o1.fg
atgtcatggcacagggccggtgtcctgctgctgggggctcagtcctgcctgcctgtcccgggggttccggccatggccggcagcatcaaccgtcgtggtctggacctgactggctttgttttggagctgcggggcatgtgcgttgtcctggggtatgcgcatggagtggactaccagggcaggcagctcccggagcaggagggtgacgatgcagagccccacgctgcttgggaggttactgcagtgatcctcactggctcacccgagaggacttcgttggcagtcaccacgggtggagattctttctccgccgcttgccagaacgccgctctcctcgccatcggcactcttcaccagcgctacccggacgagttgcagcactcgccctaccgctaccaccctcgccgcggaggagcccgcgactacgccaccttccgggatgctagctcggaggatgacgctaccatcatgcacctggcgcgcatggtggaggcgtacgacgcggctcgtatcgacttccatcagatgctgaagaaggacctagacgcagcagaggcgcagctgcatcagctcaagatcgcccagggagaggtctgtcgccccaagcgccgccgcgtctgccgcagccagaagatcaccgcccgcaagagcacctccaggcccgagcttgttcgccagtccttggcatggacctgcttcgtggagacccctcgtgccgagcccgcgcccatggctcctcaggagggggaagcctccggcgttgatggtgacgaccaggagaagtgctgctacggtgaaggcagtcaccccgaaggcagcaaccacaacaaccagggcagtccacctccacctcctcctccgcctctaccaccaccaccagacaccaacgccattctcacccaaatcctcgcccagcaggccaacatgatgactgctctcctccaccacatccaaaatccgccacaacataatgctccaccaccacccccacaacactctaaactcgccgagtttctccgcatccgcccacctaccttctctagctccaacaaccccgtggatgcgttggattggttgcatgccgtggggaaaaagttagacactgtgcagtgcagcgatgaggagaaagtcatcttcgccgcccaccaactgcagggacccgcatctctatggtgggaccatttccaggctacgcagccagaggggcagcctattacttgggcccgttttaccgccgctttccggagaacccatgtgcccgccggagtcgtggcccttaagaaaagggaattccgagagttgaagcaaggcaaccgctccgtgatggagtatttgcatgagttcaacaacctggcccgttacgccccggaggatgtgcgggaagatgaggagaagcaagagaagttcttggcaggaatggaccctgagctgtccgtgcgtctagtctccggggactatccggacttccaacgtctggtggacaagagcatccgcttggaagccaagcacaaggaactggagtcgcacaagtgccacttggagaatttccgcaaccaacagggtgctaaccaaagggtccgctacaccaatccctatccagggggatcctcctcgcagcagcaaccacagcagcagcaacctcgctccgcgccccgacctcaattcgtggtgcgcgtcccacagccgcagcagcaacagaatcaacaagggactcgagcgccccgtcctcctacgccaactgtgcagcctggtcaaggccgcagggacgcttcaggtccgcagcgtctgtgcttcaactgcttcgagcccgggcactttgcggataaatgcccgaagccaaggcgtcagcaaggccaagcgcctccccgccccaacaacggtggtaaggatgtcattcagggtcgtgtgaaccatgtgacggccgaggacgtgctgacaactccagacgtcatcgttg

SEQ ID NO: 14256 - DNA, 1537 bp, Oryza sativa
  unsure (1)..(1537): unsure at all n locations
  Clone ID: TFbOSC7321j.C1.o1.fg
atggtggaggcgtacgacgcggctcgtatcgacttccatcagatggtgcgtcgtgggatggtcgagaacaacatgaagatcctggagctgcgtcaggagaacctgcagctcaaaaaggacctagatgcggtggaggcgcagctgcatcaactcaagatcgcccagggagaggtctgccgccccaagcgtcgccgcgtctgccgcagccagaagatcaccgcccgcaagagcacctccaggcccgagcttgttcgtcagtccctggcgtggacttgcttcgtggagacccctcgtgccgagcccacgcccgtggttccccagaagggggaagcctccggcgttgatggtgagaccaggagaaatgctgccaccagtgatggcaaccaacccgaaggcagcaaccacaacaaccatggcagcccacctccacctcctcctccgcctccaccaccaccaccagataccaacgccattctcacccaaatcctcgcccagcaggccaacatgatgactgcttttctccaccacctccaaaatccgccacaacataatgctccaccaccacctccccaacactctaaactcgccgagttcctccgcatctgtccacctaccttctctagctccaacaaccccgtggatgcgttggattggttgcatgccgtggggaaaaagctagacactgtgcagtgcagcgatgaggagaaagtcatcttcgccgcccatcagctgcagggacccgcatctctatggtgggaccatttccaggctacgcagccagagggacagcctattacatgggcccgcttcaccgccgctttccggagaacccatgtgcccgccggagtcgtggcccttaagaaaagggaattccgagagttgaagcaaggcaaccgctccgtgatggagtatttgcacgagttcaacaacctggcccgttacgctccggaggatgtgcgggaagatgaggagaagcaagagaagttcctggcaggaatggaccctgagctgtccgtctgtctagtctccggggattatccggatttccaacgtctggtggacaagagcatccgcttggaagccaagcacaaggaactggagtcgcacaagcgccgcttggcgaatttccacaaccaacagggtgctaaccaaagggtccgctacaccaatccctatccagggggatcctcctcgcagcagcaacagcagcagcagcaacctcgctccgcgcntngacctcaattcgtggtgcgcgtcccacagccgcagcaggagcagaatcaacaagggactcgtgcgccccgtcctcctccaccgactgtgcagcctggtcaaggccgcagggacgctcaaggtccgcagcgtctgtgcttcaactgcttcgagcccgggcactttgcggataaatgcccgaagccaaggcgtcagcaaggccaagcgcctccccgccccaacaacggtggtaaggacgtcattcggggtcgtgtgaaccatgtgacggccgaggacgtgctgacaactccagacgtcatcgttg

SEQ ID NO: 14257 - DNA, 1980 bp, Oryza sativa
  Clone ID: TFbOSC7370j.C1.o1.fg
atgactggcttcgtcttggagctgcggggcatgtgcgtggtcttggggtatccacatggagtggattaccaggccaggccgctcccggagcaggagggtgaggatgcagagcctcacgctggttgggaggtcactgcagtgatcctctccggctctcccgagcggatttcgctggcagtcacagcgggtggggactccttccccgccgcttgccagaacgccgctctcctcgccatcggcacccttcaccagcgctacccggacgagttgcagcactcgccctaccgctaccaccctcgtcgcggaggagcccgcgactacgccaccttccgagacgccagctcggaggatgacgctaccgtcgtgcacctggcacgcatggtggaggcgtacgacgcggctcgtatcgacttccatcagatggtgcgtcgtggcatggtggagaacaacctgaagatcctggagctgcgtcaggagaacctgcagctcaagaaggacctcgacgcagtggaggcgcagctgcaccagctcaagatcgcccagggagaggacagccgtcccaagcgtcgccgcgtctgccgcagccagaagatcaccgcccgcaagagcacctccaggcccgagcttgtccgtcagtccctggcgtggacctgcttcgtcgagacccctcgtgccgagcctgcgcccgtggttccccaggagggggaagcctccggcgttggtagctcggaggtcgtgtggggcatggttacgccgatggtgacgaccaggagaaatgttaacaccggtgaaggcaaccaacccgagggcagcaaccccaaccaccaaggcaatccacctccaccaccaccaccagacaccaacgccattctcacccaaatcctcgcccagcaagccaacatgatgaccgctttcctccaccacctccaaaacctgccacaacagaatgctccaccaccacctccccaacactctaaactcgccgagttcctccgcatccgcccacctaccttctccagctccaacaaccccgtggatgctttggattggttgcatgccgtggggaagaagctagacacggtgcagtgcagtgacgaagagaaagtcatcttcgccgcccaccagctgcaggggcccgcatctctatggtgggaccacttccaggctacgcagcccgaggggcagccgattacttgggctcgcttcaccgccgctttccggagaacccatgtgcccgccggagtcgtggctctcaagaagagggaattccgggagttgaagcaaggcaaccgctccgtgatggagtatttgcatgagttcaacaatctagcacgttatgccccggaggatgtgcgggaagatgaggagaagcaagagaagttcttggcaggaatggaccctgagctgtctgttcgtctagtctctggagactacccggacttccaacgtctggtggacaagagcatccgcttggaagccaagcacaaggagctggaatcgcacaagcgccgcttggcgaacttccgcaatcagcagggtgctaaccagagggtccgctacaccaatccctacccagggggatcctcctcgcagcagcaacagcagcagcagcaacctcgctccgcgcctcgacctcaatccgtggtgcgcgtcccacagcagcaacagcagcagaatcagcaagggactcgtgcgccccgtcctcctacgccagctgggcagcccgttcaaggccgcagggacgcttcaggtccgcagcggctgtgcttcaactgcttcgagcccgggcactttgcggataaatgcccgaagccaaggcgtcagcaaggccaagcgcctccccgctccaacaacggcgggaaggatgtcattcggggtcgtgtgaatcacgtgacggccgaggacgtgctgacaactccagacgtcatcgttggacggtcatgtggtagcctatgcctcacgccaactacgacctcatga

SEQ ID NO: 14258 - DNA, 1984 bp, Oryza sativa
  Clone ID: TFbOSC7911j.C1.o1.fg
atggccggcagcgttacccgtcgtggtttgcacatgactggcttcgtcttggagctgcgaggcatgtgcgtggtcttggggtatccacatggagtggattaccaggccaggccgctcccggatcaggagggtgaggatgcagagcctcacgctggttgggaggtcactgcagtgatcctctccggctctcccgagcggacttcgctggcagtcaccgcgggtggagattccttccccgccgcttgccagaacgccgctctcctcgccatcggcacccttcaccagcgctacccggacgagttgcagcactcgccctaccgctaccacccccgtcgcggaggagccagcgaccacgccaccttccgagacgccagctcggaggatgacgctaccgtcgtgcatctggcacgcatggtggaggcgtacgacgcggctcgtatcgacttccaccagatggtgcgtcgtggcatggtggagaacaacctgaagatcctggagctgcgtcaggagaacctgcagctcaagaaggacctcgacgcgttggaggcgcagctgcatcagctcaagatcgcccagggagagatcagccgtcccaagcgtcgccgcgtctgccgcagccagaagatcaccgcccgcaagagcacctccaggcccgagcttgttcgtcagtccctggcgtggacctgcttcgtcgagacccctcgtgccgagcctgcgcccgtggttccccaggagggggaagcctccggcgttggtagctcggaggttgtgtggggcatggttacaccgatggtgacgaccaggagaaatgctgctaccggtgatggcaaccaacccgaaggcagcaaccacaaccaccagggcaacccacctccacctccacctccgcctccaccaccaccgccagacaccaacgccattctcacccaaatcctcgcccagcaagccaacatgatgaccgctttcctccaccacctccaaaacccgccacaacagaatgctccaccaccacctccccaacactctaaactcgccgagttcctccgcatccgtccacccaccttctctagctccaacaaccccgtggatgctttggattggttgcatgccgtgggaaagaagctagacacggtgcagtgcagcgacgaagagaaagtcatcttcgccgcccaccagctgcagggacccgcatctctctggtgggaccacttccaggctacgcagccagaggggcagccgattacttgggctcgcttcaccgccgctttccggagaacccatgtgcccgccggagtcgtggctcttaagaagagggagttccgggagttgaagcaaggcaaccgctccgtgatggagtatttgcatgagttcaacaatctggcccggtacgctccggaggatgtgcgggcagacgaggagaagcaggagaagttcttggcaggaatggaccctgagctgtccgttcgtctagtctctggggactatcctgatttccaacgtctggtggataagagcatccgcttggaagccaagcacaaggagctggaatcgcacaagcgccgcttggcgaacttccgcaatcaacagggtgctaaccagagggtccgctacaccaatccctacccagggggatcctcctcgcagcagcagcagcagcagcagcaacctcgctccgcgcctcgaccacaattcgtggtgcgcgtcccacagccgcagcagcagcagaatcaacaagggactcgtgcgccccgtcctcctacgccagctgtgcagcccgctcaaggccgcagggacgctcaaggtcagcagcgtctgtgcttcaactgcttcgagcccgggcactttgcggataaatgcccaaagccaaggcgtcagcaaggccaagcgcctccccgctccaacaacggcgggaaggatgtcattcggggccgtgtgaatcacgtgacggccgaggacgtgctgacaactcccgacgtcatcgttg

SEQ ID NO: 14259 - DNA, 2196 bp, Oryza sativa
  Clone ID: TFbOSC7912j.C1.o1.fg
atgactggcttcgtcttggagctgcgaggcatgtgcgtggtcttggggtatccacacggagtggactaccaggccaggccgcttccgaagcaggagggtgaggatgcagagcctcacgctggttgggaggtcactgcagtgatcctctccggctctcccgagcggacttcgctggcagtcaccgcgggtggggattccttccccgccgcttgccagaacgccgctctcctcgccatcggcacccttcaccagcgctacccggacgagttgcagcactcgccctaccgctaccaccctcgtcgcggaggagcccgcgactacgccaccttccgagacgccagctcggaggatgacgccaccgtcgtgcatctggcacgcatggtggaggcgtacgacgcggctcgtatcgacttccaccagatggtgcgtcgtggcatggtggagaacaacctgaagatcctggagctgcgtcaggagaacctgcagctcaagaaggacctcgacgcgttggaggcgcagctgcatcagctcaagatcgcccagggagagatcagccgtcccaagcgtcgccgcgtctgccgcagccagaagatcaccgcccgcaagagcacctccaggcccgagcttgttcgtcagtccctggcgtggacctgcttcgtcgagacccctcgtgccgagcctgcgcccgtggttccccaggagggggaagcctccggcgttggtagctcggagggtgcgctgttgctcaccttccgtcctggcccgtcgcagcgctcttcttctctgtttgctggttctatgtggggttttcagatggtgacgaccaggagaaatgttaacaccggtgaaggcaaccaacccgagggcagcaaccccaaccaccaaggcaatccacctccaccaccaccacctgacaccaacgccattctcacccagatcctcgcccaacaagccaatatgatgaatgctttcctccaccacctccaaaatccaccacaacagaatgctccaccaccacccccacaacactctaaactcgccgaattcctccgcatccgcccacccaccttctctagctccaacaatcccgtagatgcgttggattggttgcatgccgtggggaagaagctagacacggtgcagtgcagtgacgaagagaaagtcatcttcgccgcccaccagctgcaagggcccgcatctctatggtgggaccatttccaggctacgcagccagagggacagccgattacttgggctcgcttcaccgccgctttccggagaacccatgtgcccgccggagtcgtggctctcaagaaaagggaatttcgagagttgaagcaaggcaaccgctccgtgatggagtatttgcatgagttcaacaatctggcccggtacgctccggaggatgtgcgggaagacgaggagaagcaggagaagttcttggcaggaatggaccctgagctgtccgtccgcttagtctctggggactatccggattttcaacgactggtggacaagagcatccgcttggaagccaagcacaaggagctggaatcgcacaagcgccgcttggcgaacttccgtaatcagcagggtgctaaccagagggtccgctacaccaatccctacccagggggatcctcctcgcaacagcagcagcagcagcaacctcgttccgcgcctcgacctcaattcgtggtgcgcgtcccacagccgcagcagcaacagaatcagcaagggacccgtgcaccccgtcctcctacgccaactgtgcagcccgttcaaggccgcagggacgctcaaggtcagcagcgtctgtgcttcaactgcttcgagcccgggcactttgcggataaatgcccaaagccaaggcgtcagcaaggccaagcgcctccccgctccaacaacggtggcaaggacgtcatccgtggtcgtgtgaatcacgtgacggccgaggacgtgctgacaaccccagacgtcatcgttgagaagaaagacaagacgaagaggatgtgcgtcgactacagagctctcaatgaagtcaccatcaaaaacaacgtgtcaaggcagaacaccaacgaccggccggacttctccaacctctccaagtgccagaatggaagtgggatgaaattgggatggatttcatcaccggacttccaaaaacccaaggtggatatgattctatatgggtaa

SEQ ID NO: 14260 - DNA, 5919 bp, Oryza sativa
  Clone ID: TFbOSC8726j.C1.o1.np
ccttccttctcgccggattcgagctcgcgacgtcgctctctctctccgccgtcgccgccgagctctggtccgccgccgtcgtcgccccggaccgcctcccacctcggcgccgcctcctttggcttcaccgcatcctcgccgacctcgtccacctctccgtttcggtcgccaaccgccggagcgccgtcgtccccgtcgacccgatccgcgccaccgcctccctccgctccggccgcctcccccgtcgccgccgtcgccccgggatgagctgtggaccgtcgcctcctttccccttcccttccctctctcggccgccgctccgccgcgccggtggtcgccggctccgaccatcggagcgtgggcgcgccgcctcccgccgaccgcgcaagcatggccgccctcgggcgtgccgagtggctaccgcgtggggcctggctgtcagccgcccgcgcccttgggtgcggctgacgtgtggggcccacagcgccgaccggtgtgagccccggggtgcatggttttgatggtagcacctcggccatatatggaccggtcttcgggcctctgttgcaaagcactaccgtacttccacatgtctagtggggcaaatgaaggctacacgagctgcggcccggtagtcgagatgtcatggcacagggccggtgtcctgctgctaggggctcagtcctgcctgcctgtcccgggggttccggccgtaggtgggattgggtcgatgtacacctctgatcagagtataatttattcgaatagccgcgccctcggttatgggcaagccgagcaatgtacccaaatggccggcagcgtcagccgtcgtggtctggacatgactggtttcgtcttggagctgcggggcatgtgcgttgtcctggggtatccgcatggagtggactaccagggcaggccgcttccggagcaggagggtgacgatgcagagccccacgctgcttgggaggttactgcagtgatcctcactggctctcccgagcggacttcgctggcagtcaccgcgggtggagattctttctccgccgcttgccagagcgccgctctcctcgccatctgcactcttcaccagcgctacccggacgagttgcagcactcgccctaccgctaccaccctcgccgcggaggagcccgcgactacgccaccttccgggatgctagctcggaggatgacgctaccatcatgcacctggcgcgcatggtggaggcgtacgacgcggctcgtatcgacttccatcagatggtgcgccgtgggatggtcgagaacaatctgaagatcctggagctgcgtcaagagaacctgcagctcaagaaagacctagacgcagtggaggcgcagctgcatcagctcaagatcgcccagggagaggtctgccgccccaagcgtcgccgcgtctgccgcagccagaagatcaccgcccgcaagagcacctccaggcccgagcttgttcgtcagtccctggcatggacttgcttcgtcgagaaccctcgtgccgagcccgcgcccgtggttccccaggagggggaagcctccggcgttggcagcacggaagatgcgctgttgctcaccttccatggtgatgaccaggagaagtgctagtaccggtgatggcaaccaacctgaaggcagcaaccacaaccaccagggcagcccacctccacctcctcctccgcctccaccaccaccaccagataccaacgccattctcacccaaatcctcgcccagcaggccaacatgatgattgctttcctccaccacctccaaaatccgccacaacataatgctccaccaccacccccacaacactctaaactcgccgagttcctccgcatccgtccacccaccttctttagctccaacaaccccgtggatgcgttggattggttgcatgccgtggggaaaaagctagacactgtgcagtgcagcgatgaggagaaagtcatcttcgccgcccaccagctgcaggggcccgcatctctatggtgggaccatttccaggctacgcagccagaggggcagcctattacttgggctcgcttcactgccgctttccggagaacccatgtgcccgccggagtcgtggcccttaagaaaagggaattccgagagttgaagcaaggcaaccgctccgtgatggagtatttgcatgagttcaacaacctggcccgttacgccccggaggatgtgcggagatgaggagaagcaagagaagttcttggcaggaatggaccctgagctgtccgtccgtctagtttccggggactatccggatttccaacgtctggtggacaagagcatccgcttggaagccaagcacaaggaactggagtcgcacaagcgccgcttggcgaatttccgcaatcaacagggtgctaaccaaagggtccgctacaccaatccctatccagggggatcgtcctcgcagcagcaacctcgctccgcgccccgacctcaattcgtggtgcgcgtcccacagccgcagcaacagcagagtcagcaagggactcgtgcgccccgtcctcctacaccaactgtgcagcctggtcaaggccgcagggacgctcaaggtccgcagcgtctgtgcttcaactgcttcgagcctgggcactttgcggataaatgcccgaagccgaggcgccagcaaggccaagcgcctccccgctccaacaacggtggtaaggatgtcattcggggtcgtgtgaaccacgtgacggccgaggacgtgctgacaactccagacgtcatcgttggtacgttcctcattcattccatccctgctaccattttgttcgactctggagcatcccactcgttcatatctgtgccattcgtggggagaaatcagttgggggtagaaaggcttaggaaccctctgctcatcaccacccctggaggggttatgacagcaaagtattatagtcctgccgtccctatagaaattcaggggattccttttccctcggatctgattcttctagacaccaagaacttggatgtgatccttgggatgaattggttggctcaattccaaggagtagtggattgcgcgagacgcactgttactctgtaccgagggccggaacaaccggttgttttctttgcacccccaacctctgtcagaagttcagaacttcatcagatagtactgtcagaaatccccatcgtcagggagttcggagatgtgtttccggaagaactacccggtatgccgcccaagcgagagattgagttccggatagatcttgctccaggaaccactcctctgtacaagcgaccctaccgtatggcagcaaatgaactggccgaatttaagaaacagttggaagagttaaaagaaaaggggtatatacgtccgagtacttccccctggggtgctcctgtgatttttgtggagaagaaagacaagacgaagaggatgtgcgttgactacagagctctcaatgaagtcaccatcaaaaacaagtaccctcttccccggatcgatgatctgttcgattagcttaaaagtgccacggtattctccaagatcgatcttcgttccggaaatcaccagttgcgcattagggaagaagatattccgaagaccgcattcaccacgcgatacggactgtatgaattcacggtgatgtcattcggtctaaccaatgctcctgccttcttcatgaacttaatgaacaaagtgttcatggaatacttggataagtttgttgtggtgttcattgatgacattctgatatactcacaatcagaggaagaccatcagcaccatctccgtctggtgttgggaaagttgcgggaacatcaattgtatgccaaacttagcaagtgtgagttctggttgtccgaagtcaaattcttagggcacgtgatatctgctaaaggagttgctatggaccccgaaacagtgaccgccgtcactgattggaagcaacccaagacagtcactcaagtccgcagtttcttaggtttggcgggatactaccggaggttcatcgagaacttctccaaaatcgctcgacccatgacacagttgttgaagaaagaagagaaatttgtgtggagcccgcaatgcgagaaggcgtttcaaactctcaaagaaaagctggtttcctcgctagtgttagtcttgccagatactcgcaaggatttcatggtgtattgtgacgcttcgcgccaaggattggggtgcgtgctcatgcaggacggtcatgtggtggcctatgcctcacgccagctacggcctcatgaaggcaactaccctacccatgatttggagttagccgcggtggttcatgctctaaaaatctggcggcactatctcattgggaatcgctgtgaaatatatactgatcataagagtttgaaatacatcttcacccagtcggatctgaatcttcggcaaaggagatggttagaactcatcaaggattatgatgtgggaattcactatcatcctggtaaggccaacgtggtcgccgacgctctaagtcgaaagagccattgcaacactcttaacgtccgtggcattccacccgaacttaaccaacagatggaagccctgaatctgagcatagtgggtcgtggattcttggctacgctggaagccaagcccaccttgctcgatcaaatccgcgaggctcagaagaacgacccggacatgcgtggactcctcaaaaatatgaaacagggtaaagccgcgggtttcacagaggatgaacacggagccctatggaacggaaatcggcgtgtcaaggcagagcaccaacgaccggccggacttctccaacctctccaagtaccagaatggaaatgggatgaaattgggatggacttcatcaccggacttccaaaaacccaaggtggatatgattctatatgggtagttgtggaccggttaaccaaggtagctcgatttattcctgtgaagaccacctatggagggaacaaactagccgagctctacttcgctaggatcgtgagtctccatggcgttcccaagaaaatcgtatctgataggggaagccaattcacctctcacttttggaagaagctccaagaagagctgggtacccgattaaatttcagcaccgcgtatcacccgcagacagatggacagaccgagcgtctaaatcagatcctagaagatatgcttcgcgcatgtgtcctagatttcgggaagacctgggataagagtctcccctatgccgagttctcctacaataacagctaccaagccagcatacaaatggcaccttatgaagcgttgtatgggcgcaaatgccggacaccgctcttgtgggaccaagttggggaaagtcaagtgttcgggactgatatcctgagagaagctgaagcgaaggtcagaaccattcgggataatttaaaggtggcacagccacggcagaaaagttatgcagataaccgtcgccgtaacctggaattcgcggtggacgattttgtgtaccttcgaatcacgccattgcggggtgtacacaggtttcggacaaaagggaagctcgcacctcggttcgtgggtcctttccgtatcattgctcggcgcggagaagtcgcttaccagttggagctgcccgcctccttgggcaacgtgcatgatgtgttccatgtgtcgcaactcaagaaatgtctccgagtgccatccgagcaggccgactcagagcaaattgaagttcgcgaagacttgacctacgtggagaggccagtgaaaatcctggacaccatggagcgcaggaccaggaaccgggtaatccgtttttgcaaggtccagtggagcaaccacgccgaagaagaagctacctgggagcgtgaagacgagctgaaggcagcccatcccgatctcttcgccagttcttccgaatctcggggtcgagattccgtt

SEQ ID NO: 14261 - DNA, 5563 bp, Oryza sativa
  Clone ID: TFbOSC900012j.C1.o12.np
atggatgaagtcgggggtcgatggacattctccagggcaaatgaaggctacacgagctgcggcccggtagtcgagatgtcgtggcagagggttggtgccctgctgcttggggctcagtcctgcctgcctgtcccggaggttccggccgtaggcgggattgggtcgatgtacacctctgatcagagtataatctattcgaatagccgcgccctcggttatgggcaagccgagcaatgtacccaaatggccggcagcatcaaccgtcgtggtctggacctgactggcttcgttttggagctgcggggcatgtgcgttgtcctggggtatccgcatggagtggattaacagggcaagcagctcccggagcaggagggtgccgatgcagagccccacgctgcttgggaggtcactgcagtgatcctcactggctcacccgagaggacttcgttggcggtcaccgcgggtggagattctttctccgccgcttgccagaacgccgctctccttgccatcggcactcttcaccagcgctacccggacgagttgcagcactcgccctaccgctaccaccctcgtcgcggaggagcccgcgactacgccaccttccgggatgctagctcggaggatgacgctaccatcatgcaccaggcgcgcatggtggaggcgtacgacgtggctcgtatcgacttccatcagatgatgcatcgcgggttggtcgagaacaacatgaagatcctggagctgcgtcaggagaatctgcagctgaagaaggacctagacgcagtggaggcgcaactgcgtcagctcaagatcgcccagggagaggtctgtcgccccaagcgtcgccgcgtctgccgcagccagaagatcaccgctcgcaagagtacctccaggacctgtttcgtcgagacccctcgtgccgagcgcgcgcctgtggttcctcaggaggatggagcctccggcgttggcagcacggaggatgcgctgatgctcaccttccgtcctggcccatcgcagctgtaggcgagcagttagtaggtttgcgcatggtgacgaccaggagaagtgctgctaccggtgaaggcagtcaccccgagggcagcaaccacacaaccatggcagcccacctccacctccccctccgcctccaccaccaccaccagacaccaacgccattctcacccaaatcctcgcccagcaggccaacatgatggctgctttcctccaccacatccaaaatccgccaccacataatgctccaccaccacccccacaacactctaaactcgctgagttcctccgcatccgtccgcctaccttctctagctccaataaccccgtggatgcgttggattggttgcatgccgtggggaaaaagttagacaccgtgcagtgcagcgatgaggagaaagtcatcttcgccgcccaccaattgcaggggcccgcatctctatggtgggaccatttccaggctacgcagccagaggggcaacctattacttgggcccgcttcaccgccgctttctggagaacccatgtgcccgccggagtcatggcccttaagaaaagggaattccgagagttgaagcaaggcaaccgctccgtgatggagtatttgcatgagtttaacaacctggcccggtacgccccggaggatgttcgtgaagatgaggagaagcaagagaagttcttggcaggaatggaccctgagctgtccgtccgtctagtctccggggactatccggatttccaacgtctggtggacaagagcatccgcttggaagccaagcacaaggaactggagtcgcacaagcgtcgcttggcgagtttccgcaaccaacagggggctaaccaaagggtccgctacaccaatccctatccagggggatcctcctcacagcagcagcaacagcagcagcaacctcgctccgcgccccgacctcaattcgtggtgcgcgtcccacagccgcagcaacagcagagtcagcaagggactcgtgcgccccgtcctcctacgccagccgtgcagcctggtcaaggccgcagggacgttcaaggtccgcaacgtctgtgcttcaactgcttcgagcctgggcactttgcggataaatgcccaaagccgaggcgccagcaaggccaagcgcctccccgctccaacaacggtggtaaggatgtcattcggggtcgtgtgaaccacgtgacggccgaggacgtgctgacaactccagacgtcatcgttggtacgttcctcattcattccatccctgctaccattttgttcgactctggagcttcccactcatttatatctgtgccattcgtggggagaaatcagttgggggtagaaaggcttaggaaccctctgctcatcaccacccctggaggggttatgacagcaaagtattatagccctgccgttcctatagaaatctagggaattccttttctctcggatttgattcttcttgacaccaagaacttggatgtgatccttgggatgaattggttggctcaattccaaggagtagtggattgtgcaagacgcactgtcactctgtaccgagggccggaacaaccggttgttttctttgcacccccaacctctgtcggtagttcagaacttcatcagataagactgtcggaaatccccatcgtcagagagttcggagacgtgttttaggaagaactacctggtatgcctcccaagcgagagattgagttccggatagatcttgctccaggaaccactcccctgtacaagcgaccctaccgtatggcagcaaatgaactggccgaagttaagaaacaattggaagagttgaaaggaaaggggtatatacggccgagtacttccccctggggtgctcctgtgatttttgtggaaaagaaagacaagacgaagaggatgtgcgttgactacagagctctcaatgaagttactatcaaaaacaagtaccctcttccccggatcgatgatctgttcgatcagcttaaaggtgccactgtattctccaagattgatcttcgttccggatatcaccagttgcgcatccgtgaagaagatattccgaagaccgcattcaccacgcaatacggactatatgaattcacggtgatgtcgttcggtttaaccaatgctcctgccttcttcatgaacttaatgaacaaagtgttcatggaatacttggataagtttgttgtggttttcattgatgacattctggtatactcacagtcagaggaagaccatcagcaccatctccgtctggtgttgggaaagttgcgggaacatcaattgtatgccaaacttagcaagtgtgagttctggttgtccgaagtcaaattcttagggcacgtgatatctgctaaaggagttgctgtggaccccgaaacagtgaccgccgtcaccgattggaggcaacccaagacagtcactcaaattcgcagtttcttgggtttggcaggatactaccggaggttcatcgagaacttctccaaaatcgctcgacccatgacacagttgttgaagaaagaagagaaatttgtgtggagcccgcaatgcgagaaggcgttccaaactctcaaggaaaagctggtttcctcgccagtgttaatcttaccggatactcgcaaggacttcatggtgtattgtgacgcttcgcgccaaggattggggtgcgtgctcatgcaggaaggtcatgtggtagcctatgcctcacgccagctacggccccatgaaggcaactaccctacccatgatttggagttggctgctgtggttcatgctctaaaaatctggcggcattatctcattgggaatcgctgtgaagtatatactgatcataagagtttgaaatacatcttcactcagtcggatctgaatcttcggcagagaagatggttagagctcatcaaggattatgatgtgggaattcactatcatcctggtaaggccaacatggtcgccgacgctctaagtcgaaaaagccattgcaacactcttgacgtccgtggcattccacccgaacttaatcaacagatggaagccctgaacctaagcatagttggtcgtggattcttggctacgctggaagccaagcctaccttgctcgatcaaatccgcgaggctcagaagaatgatccggatatgcgtggactcctcaagaatatgaaacagggtaaagccgctggtttcacagaggatgaacacagaaccctatggaacgggaatcgggtatgcgttccagacgacagagaacttaaacagctaatacttcaggaagctcacgaaagtccttactccatccaccctggcagtacgaagatgtacttagacttgaaagggaaatactggtgggttagtatgaagcgggaaattgcagagttcgtggccctttgtgatgtgtgccagcgtgtcaaggcagagcaccaacgaccggccggacttctccaacctctccaagtaccagaatggaaatgggatgaaattgggatggatttcatcaccggacttccaaaaacccaaggtggatatgattctatatgggtagttgtggaccgattaaccaaggtagctcggtttattcttgtgaagaccacctatggagggaacaaactagccgagctctacttcgctaggatcgtgagtctccatggcgttcctaagaaaatcgtatctgataggggaagccaattcacctctcacatttggaagaagctccaagaagagttgggtacccgattaaatttcagcaccgcgtatcacccgcagacagatggacagaccgagcgtctaaatcagatcctagaagacatgcttcgtgcatgtgtcctagatttcgggaagacctgggataagagtctcccctatgccgagttctcctacaataacagctaccaagccagcatacaaatggcaccctatgaagcgttgtatggacgcaaatgccagacaccgctattgtgggaccaagttggggaaagctaagtgttcgggactgatatcctgagagaagctgaagctaaagtcagaaccattcgggataatctaaaggtggcacagtcccggcagaagagttatgcagataaccgacgccgtaatctggaattcgcagtggacaattttgtgtacctttgggtcacgccattgcgaggtgtacacaggtttcagatgaaagggaagctcgcacctcggttcgtgggtcctttccgtatcattgctcggcgcggagaagtcgcttaccagttggagctgcccgcctccttgggcaacgtgcatgatgtgttccatgtgtcgcaactcgagaaatgccttcgagtgccatccgagtaggccgactctgagcagattgaagttcgcgaagacttgacctacgtggagagaccagtgaaaatcctggacaccatggaacgcaggaccaggaaccgggtaatccgtttttgcaaggtccaatggagaaaccacgctgaggaagaagctacttgggagcgtgaagacgagctgaaggcagcccatcccgatctcttcgcccgttcttccgaatctcggggtcgagattccgtt

SEQ ID NO: 14262 - DNA, 1385 bp, Oryza sativa
  unsure (1)..(1385): unsure at all n locations
  Clone ID: TFbOSC900012j.C1.o15.np
aacggcctaaagtcctgatttaggaaaccgataccgtattggttaaggtttctatcttgtaaccctgccccccaacctatataacccggagaagcgctgctatcggggagggcagtcaccccgaaggcagcaacnnnnnnnnnnnnnnnnnnnnnnnnnnnnnnnnnnnnnnnnnnnnnnnnnnnnnnnnnnnnnnnnnnnnnnnnnnnnnncaaatactcgcccagcaggccaacatgatggctgctttcctccaccacatccagaatctgccgcaaaacaatgctccacctccaccaccacccccacagcactctaagcttgccgagttcctccgcatccgcccgcctaccttctctagctcccataaccccattgatgctttggactggttgcatgccgtggggaaaaagttggacaccgtacagtgcaatgatgaggagaaagtcatcttcgccgctcaccaactgcaggggcccgcatctctatggtgggaccacttccaggctacgcagccagagggacagcctatcacctgggcccgtttcactgccgccttccggaggacccatgtgcccgccggagtcatggcccttaagaagagggaatttcgggagttgaaacaaggcaaccgctccgtgatggagtatttgcacgagttcaataatttggcccggtacgccccagaggatgttcgtgaagatgaggagaagcaggagaaattcctggcagggatgaaccctgagctgtctgtgcgtctggtctccggggactatcctgatttccagcgcctggtggacaagagcatccgcctggaagccaagcaaaaggaattggagtcgcacaagcgtcgcttggcgaatttccgcaaccaacgggggctaaccaaaggatccgctacaccaatccttatccaaggggatcctcctcgcagcagcagcaacagcaacctcgctccgcgcccttacctcaattcgtgcctggacaaggccacagggatgctcaaggtcaacagcgtctgtgcttcaactgcttcgagcccgggcactttgcggataaatgcccaaagccgaggcgccagcaaggccaagcgcctccccgccccaacaacggtggtaaggatgtcattcggggccgtgtgaaccacgtgactgccgaggatgtgttgacaactccagacgtcatcgttggtacgttcctcattcattccatccctgctaccattttgttcgactctagagcttcccactcgtttatttctgtgccattcgtggggagaaatcagctgggggtagaaaggcttatgaaccctctgctcatcaccacccctggaggtgttatgacaacaaagtattatagccctgccgttcctatagaaatccaag

SEQ ID NO: 14263 - DNA, 5373 bp, Oryza sativa
  Clone ID: TFbOSC900028j.C1.o18.fg
atggatgaagtcgggggtcgatggacattctccaaggcaaatgaaggctacacgagctgcggcccgatggccggcagcgtcacccgtcgtggtgtggacatgactggcttcgtcttggagctgcgaggcatgtgcgtggtcttggggtatccacatggagtggattaccaggccaggccgctcccggagcaggagggtgaggatgcagagcctcacgctggttgggaggtcactgcagtgatcctctccggctctcccgagcggacttcgctggcagtcaccgcgggtggggattccttccccgccgcttgccagaacgccgctctcctcgccatcggcactcttcaccagcgctacccggacgagttgcagcactcgccctaccgctaccaccctcgtcgcggaggagcccgcgactacgccaccttccgagacgccagctcggaggatgacgctaccgtcgtgcatctggcacgcatggtggaggcgtacgacgcggctcgtatcgacttccatcagatggtgcgtcgtggcatggtggagaacaacctgaagatcctggagctgcgtcaggagaatctgcagctcaagaaggacctcgacgcgttggaggcgcagctgcatcagctcaagatcgcccagggagaggacagccgtcccaagcgtcgccgcgtctgccgcagccagaagatcaccgcccgcaagagcacctccaggcccgagcttgttcgtcagtccctggcgtggacttgtttcgtcgagacccctcgtgccgagcctgcgcccgtggttccccaggagggggaagcctccggcgttggtagctcggaggctccttctctgtttgctggtgctgtgtggggttttcagatggtgacgaccaggagaaatgttaacaccggtgaaggcaaccaacccgaaggcagcaaccccaaccaccaaggcaatccacctccaccaccaccaccagacaccaacgccattctcacccagatcctcgcccaacaagccaacatgatgactgctttcctccaccacctccaaaatccaccacaacagaatgctccaccaccccctccccaacactccaaactcgccgaattcctccgcatccgcccacccaccttttctagctccaacaaccctgtggatgcgttggattggttgcatgccgtggggaagaagctggacactgtgcagtgcagtgatgaagagaaagtcatcttcgccgcccatcagctgcaggggcccgcatccctatggtgggaccacttccaggctacgcagccagcgggacagccgatcacttgggcccacttcaccgccgctttccggagaacccatgtgcccgccggagtcgtggctcttaagaaaagggaattccgagagttgaagcaaggcaaccgctccgtgatggagtatttgcacgagttcaacaatctggcccggtacgctccggaggatgtgcgggaagatgaggagaagcaagagaagttcttggcaggaatggaccctgagctgtccgttcgtctagtctctggggactatcctgattttcaacgactggtggacaagagcatccgcttggaagccaagcacaaggagctggaatcgcacaagcgccgcttggcgaatttccgcaatcagcagggtgctaaccagagggtccgctacaccaatccctacccagggggatcctcctcgcagcagcaacaacagcagcagcaacctcgcccagcgccccgacctcaattcgtggtgcgcgtcccacagccgcagcaacagcagaatcagcaagggactcgtgcgccccgtcctcctacgccagctgggcagcccgttcaaggccgcagggacgcttcaggtccgcagcggctgtgcttcaactgcttcgagcccggacactttgcggataaatgcccaaagccaaggcgtcagcaaggccaagcgcctccccgctccaacaacggcgggaaggatgtcattcggggtcgtgtgaatcacgtgacggccgaggacgtgctgacaactccagacgtcatcgttggtacgttcctcgttcattccatccctgctacaattttgttcgactctagagcttcccactcgtttatatctgtgccattcgtggggagaaatcagttgggggtagaaaggcttagaaaccctctgcttatcaccacccctggaggggttatgacagcaaagtattatagccctgccgtccctatagaaattcaggggattccttttccctcggatctgattcttctagacacaaagaacttggatgtgatccttgggatgaattggctggcacaattccaaggagtagtggattgcgcgagacgcactgttactctgtaccgaggaccagaacaaccggttgttttctttgcacctccaacctctgtcagaagttcagaactgcatcagataggtctgtcagaaatccccatcgtcagagagttcggagacgtgtttccggaagaactacctggtatgccgcccaagcgagagattgagttccggatagatcttgctccaggaaccactcctctgtacaagcgaccctaccgtatggcagcaaatgaactggccgaagttaagaaacagttggaagaattgaaagaaaaggggtatatacgtccgagtacttccccttggggtgctcctgtgatttttgtagagaagaaagacaagacgaagaggatgtgcgtcgactacagagctctcaatgaagtcaccatcaaaaacaagtaccctcttccccggatcgatgatctgttcgatcagcttaaaggtgccactgtattctccaagattgatcttcgttccggatatcaccaattacgtattcgtgaagaagatattccgaagaccgcattcaccacgcgatacgggctgtatgaattcacggtgatgtcgttcggcttgaccaatgctcctgccttcttcatgaacttaatgaacaaagtgttcatggaatacttggataagttcgttgtggttttcatcgatgacattctgatatactcacaatcagaggaagaccatcagcaccatctccgtctggtgttgggaaagttgcggaaacatcaattgtatgccaagcttagcaagtgtgagttctggttgtccgaagtcaaattcttggggcacgtgatatctgctaaaggagttgctgtggaccccgaaacagtgaccgccgtcaccgattggaagcaacccaagacagtcactcagattcgcagtttcttgggtttggcaggatactaccggaggttcatcgagaacttctccaaaatcgctcgacccatgacacagttgttgaagaaagaagagaagtttgtgtggagcccgcaatgcgagaaggcgttccaaaccctcaaggaaaagctggtttcctcgccagtgttaatcttgccggatactcgcaaggacttcatggtgtattgtgatgcttcgcgccaaggattggggtgcgtgctcatgcaggacggtcatgtggtagcctatgcttcacgtcagctacgacctcatgaaggcaactaccctacgcacgacttgaagttagcagcggtggttcatgctctaaaaatctggcggcactatctcattgggaaccgctgtgaaatatatactgatcataagagtttgaaatacatcttcactcagtcagatctgaaccttcggcaaaggagatggttagaactcatcaaggattatgatgtgggaatacactatcatcctggtaaggccaacgtggttgccgacgctctaagtcgaaagagccactgcaacactctcaacgtccgaggcattccacccgagcttaatcaacagatggaagccctgaacctaagcatagttggtcgcggattcttggctgcgttggaagccaagcccaccttgctcgatcaaatccgcgaggctcagaagaatgatccggacatgcatggactcctcaagaatatgaaacagggtaaagccgctggtttcacagaggatgaacacggaaccttatggaacggaaagcgggtatgcgttccagatagcagagaacttaaacagctgatacttcaggaagctcacgaaagtccttattccattcacccgggcagtaccaagatgtacttagacttgaaggagaattactggtgggttagcatgaagcgggaaattgcagagtttgtggctctatgtgatgtgtgccagcgtgtcaaggcagagcaccagcgaccggccggacttctccaacctctccaagtgccggaatggaaatgggatgaaattgggatggatttcatcaccggccttccaaaaacccaaggtggatatgattctatatgggtaattgtggatcgactaacaaaggtagctcgattcattcctgtgaagaccacctatggagggaataaactagcggagctctacttcgctaggatcgtgagtctccatggcgttcccaagaaaatcgtatctgataggggaagccaattcacctctcacttttggaagaagctccaagaagagcttggtacccgactaaatttcagcaccgcgtatcacccgcagacagatggacagaccgagcgtctaaatcagatcttagaagatatgcttcgcgcatgtgtcctggacttcgggaagacttgggataagagtctcccctatgccgagttctcctacaataacagctatcaagccagcatacaaatggcaccatatgaagcgttgtacgggcgcaaatgccggacaccgctattgtgggaccaagttggagaaagccaagtgttcgggactgatatcctgagagaagctgaagctaaagtcagaatcattcgggataatctaaaggtggcacagtcccggcagaaaagttatgcagataaccgacgccgtgatctggaattcgcagtggatgattttgtgtaccttcgggtcacgccattgcgaggtgtgcacaggtttcagacaaaagggaagctcgcacctcggtatgtgggtcccttccgtatcatcgctcgacgcggagaagttgcttaccagctggagttgcccgcctccttgggcaacgtgcatgatgtgttccatgtgtcgcaactcaagaaatgtctccgagtgccatccgagcaggccgattcagagcaaattgaagttcgcgaagacttgacctatgtggagaagccagtgaaaatcctggacaccatggagcgcaggaccaggaaccgagtaatccgtttttgcaaggtccagtggagcaaccacgccgaagaagaagctacttgggagcgcgaagacgagctgaaggcagcccatcccgatctcttcgccagttcttccgaatctcggggtcgagattccgtttaa

SEQ ID NO: 14264 - DNA, 6051 bp, Oryza sativa
  Clone ID: TFbOSC900039j.C1.o3.np
atggagcccgagattgccgcgccggtttccttcccctccggccgccctctctcactcccaacactatataaacactccccgtgcctccctcctccgtttccgccactcgccgctctctctccccgtcggattcgagctcgcgccgtcgccctctctctccgccatcgccgccgagctccggtccgccgccgtcgtcgccccggacctcctcccgcttcggcatcgccctccttcggcttcgccgcgtcctcgccgacctcgtccactcctccgtttcgcccgccgaccgccggaacgccgccgtcctcgtcgacccgagccgcgccgccgccttcctccgctccggtcgccgttcccgtcgtcgccgtcgacccggggtgagccgtggaccgccgtttcacttcccccttccctcccctctctcgggcgccgctccgccgcgccggtggtcgccggcggcgaccatcggggcgcgggtgcgccgcctcccgtcggctgtgccggcgaggccgccttcgggtgcgccccgcggctgccatgtggggcccggccgtcagccgcccgcgtcctcaggtgcggctgacgcgtgggacccacggcgccgaccggcgtaagccgcgtgcacccggtccaccgtggacccacctcggccatgtaaggaccggtcttcgggcctctgttgcaaagcactaccgtacttccacatgtctagtggggcaaatgaaggctacacgagctgcggcccggtagtcgagatgtcatggcacagggccggtgtcctgctgctaggggctcagtcctgcctgcctgtcccgggggttccggccgtaggtgggattgggtcgatgtacacctctgatcagagtataatctattcgaatagccgcgccctcggttatgggcaagccgagcaatgtacccaaatggccggcagcgtcacccgtcgtggtttgagcatgactggcttcgtcttggagctgcggggcatgtgcgtggtcctggggtatccacatggagtggactaccaggccaggccgcttccggagcaggagggtgacgacgcagagccccacgctggttgggaggtcactgcagtgatcctctctggctctcccgagcggacttcgctggcagtcaccgcgggtggagattctttccccgccgcttgccagaacgccgctctcctcgccatcggcactcttcaccagcgctacccggacgagttgcagcactcgccctaccgctaccaccctcgccacgaaggagcccgcgactacgccaccttccgagatgctagctcggaggatgacgctactatcgtgcacctggcgcgcatggtggaggcgtacgacgtggctcgtatcgacttccatcagatggtgcgccgtgggatggtcgagaacaacatgaagatcctggagctgcgtcaggagaacctgcagctcaagaaggacttagacgcggtggaggcgcagctgcatcagctcaagatcgcccagggagaggtctgccgccccaagcgtcgccgcgtctgccgcagccagaagatcaccgcccgcaagagcacctccaggcccgagcttgttcgtcagtccctggcgtggacctgcttcatggagacccctcgtgccgagcccgcgcccgtggttccccaggagggggaagcctccggcgttggtagcacggaggatgcgctgttgctcaccttccatggtgacgaccaggagaaatgctgccaccggtgatggcaaccaacctgaaggcagcaaccacaaccaccaaggcaacccacctccacctcctcctccgcctccaccaccaccaccagacaccaacgccattctcacccaaatcctcgcccagcaagccaacatgatgactgctttcctccaccacctccaaaatccgccacaacataatgctccaccaccacctcccgaacactctaaactcgctgagttcctccgcatccgtccacctaccttctctagctccaacaaccccgtggatgcgttggattggttgcatgccgtggggaaaaagttagacaccgtgcagtgcagcgatgaggagaaagtcatcttcgccgcccaccagctgcaggggcccgcatctctatggtgggaccattttcaggctacgcagccagaagggcagcctattacttgggctcgcttcaccgccgctttccggagaacccatgtgcccgccggagtcgtggcccttaagaaaagggaattccgagagttgaagcaaggcaaccgctccgtgatggagtatttgcatgagttcaacaacctggcccgttacgccccggaggatgtgcgggaagatgaggagaagcaagagaagttcttggcaggaatggaccccgagctgtccgtccgtctagtctctggggactatccggattttcaacgtctggtggacaagagcatccgcttggaagccaagcacaaggaactggagtcgcacaagcgccgcttggcgaatttccgcaatcaacatggtgctaaccaaagggtccgctacaccaatccctatccagggggatcctcctcgcaacagcaacaatagcagcagcaacctcgctccgcgcctcgacctcaattcgtggtgcgcgtcccacagccgcagcagcagcagaatcaacaagggactcgtgcgccccgtcctcctacgccaactgtgcagcctggtcaaggccgcagggacgctcaaggtcagcagcgtctgtgcttcaactgcttcgagcccgggcactttgcggataaatgcccgaagccgaggcgtcagcaaggccaagcgcctccccgctctagcaatggtggtaaggatgtcattcggggtcgtgtgaatcacgtgacggccgaggacgtgctgacaactccagacgtcatcgtcggtacgttcctcatacattccatccctgctaccattttgttcgactctggagcttcccactcgtttatatctgtgccattcgtggggagaaatcagttgggggtagaaaggcttaggaaccctctgctcatcaccacccctggaggggttatgacagcaaagtattatagctctgccgtccctatagaaattcaggggattccttttccctcggatctaattctgctagacaccaagaacttggatgtgatccttgggatgaattggttggctcaattccaaggagtaatggattgcgcgagacgcactgtcactctgtaccgagggccggaacaaccagttgttttctttgcacccccaacctctgtcaaaagttcagaacttcatcagataggactgtcagaaatccccatcgtcagagagttcggagatgtgtttccggaagaactacccggtatgccgcccaagcgagagattgagttccggatagatcttgctccaggaaccactccgttgtacaagcgaccctaccgtatggcagcaaatgaactggccgaagttaagaaacagttggaagagttgaaagaaaaggggtatatacgtccgagtacttccctctggggtgctcctgtgatttttgtagagaagaaagacaagacgaagaggatgtgcgtcgactacagagctctcaatgaagtcaccctcaaaaacaagtatcctcttccccggatcgatgatctgttcgatcagcttaaaggtgccactgtattctccaagattgatcttcgttccggatatcaccaattacgtattcgtgaagaagatattccgaagaccgcattcaccacgcgatacggactgtatgaattcacggtgatgtcattcggtctaactaatgcacctgccttcttcatgaacttaatgaacaaagtgttcatggaatacttggataagtttgtcgtggttttcattgatgacattctgatatactcacgatcagaggaagaccatcagcaccatccccgtctggtgttgggaaagttgcgtgaacatcaattgtatgccaaacttagcaagtgtgagttctggttgtccgaagtcaaattcttagggcacgtgatatctgctaaaggagttgccgtggaccccgaaacagtgaccgccgtcactgattggaagcaacccaagacagtcactcaagtccgcagtttcttaggtttggcaggatactaccggaggttcatcgagaacttctccaaaatcgctcgacccatgacacagttgttgaagaaagaagagaaatttgtgtggagcccgcaatgcgagaaggcgttccaaactctcaaagaaaagctggtttcctcgccagtgttaatcttgccggatactcgcaaggatttcatggtgtattgtgacgcttcgcgccaaggattggggtgcgtgctcatgcaggacggtcatgtggtggcctacgcctcacgccagctacgacctcatgaaggcaactaccctacccatgacttggagttagccgcggtggttcatgctctaaaaatctggcggcactatctcattgggaatcgctgtgaaatatatactgatcataagagtttgaaatacatcttcacccagtcggatctgaatcttcggcaaaggagatggttagaactcatcaaggattatgatgtggggattcactatcatcctggtaaggccaacgtggtcgctgacgctctaagtcgaaagagccattgcaacactcttaacgtccgtggcattccacccgaacttaatcaacagatggaagccctgaacctaagcatagttggtcgcggattcttggctgcgttggaagccaagcctaccttgctcgatcaaatccgcgaggctcagaagaatgatccggacatgcatggactcctcaagaatatgaaacagggtaaagccgctggtttcacagaggatgaacacggaaccctatggaacggaaagcggcgtgtcaaggcagagcaccaacgaccggccggacttctccagcctctccaagtaccagaatggaaatgggatgaaattgggatggatttcatcaccggacttccaaaaacccaaggtggatatgattctatatgggtagttgtggatcgattaaccaaagtagctcgatttattcctgtgaagaccacttatggagggaacaaactagccgagctctacttcgctaggattgtgagtctccatggcgttcccaagaaaattgtatctgataggggaagccaattcacctctcacttttggaagaagctccaagaagagctgggtacccgattaaatttcagcaccgcgtatcacccgcagacagatggacagaccgagcgtctaaatcagatcctagaagatatgcttcgcgcatgtgtcctagatttcgggaagacctgggataagagtctcccctatgccgagttctcctacaataacagctatcaagccagcatacaaatggcaccttatgaagcgttgtatgggcgcaaatgccggacaccgctattgtgggaccaagttggagaaagccaagtgttcgggactgatatcctgagagaagctgaatctaaagtcagaatcattcgggataatctaaaggtggcacagtctcggcagaaaagttatgcagataaccgtcgccgtgacctggaattcgcagtgggtgattttgtgtaccttcgggtcacaccattgcgaggtgtacacaggtttcagacaaaagggaagctcgcacctcggtatgtgggtcctttccgtatcattgctcggcgcggagaagtcgcctaccagttggagctgcccgcctccttgggcaacgtgcatgatgtgtttcatgtgtctcaactcaagaaatgccttcgagtgccatccgagcaggccgactcagagcagattgaagttcgcgaagacttgacctatgtggagaggccagtgaaaatcctggacaccatggagcgcaggaccaggaaccgggtaatccgtttttgcaaggtccagtggagcaaccacgctgaagaagaagctacctgggagcgtgaagacgagctgaaggcagcccatcccgatctcttcgtcagtccttccgaatctcggggtcaagattccgtt

SEQ ID NO: 14265 - DNA, 5274 bp, Oryza sativa
  Clone ID: TFbOSC900042j.C1.o11.fg
atgtcatggcacagggccggtgtcctgctgctaggggctcagtcctgtctgcctgtcccgggggttccggccgtaggtgggattgggtcggtactcttgtctatggctaggatgggttggaaactatgtcacgtcttccgtctgtataccgtggtgatggccggcagcgtcagccgccgtggtttggacatgactggtttcgtcttggagctgcggggcatgtgcgttgtcctggggtatccacatggagtggactaccagcgcaggccgcttccggagcaggagggtgacgatgcagagcccctcgccgcttgggaggtcactgcagtgatcctcgctggctctcccgagcggacttcgttggcagtcaccgcgggtggagattctttccccgctgcttgccagagcgccgctctcctcgccatcggcactcttcaccagcgctacccggacgagttgcagcactcgccctaccgctaccaccctcgccgcggaggagcccgcgacttcgccaccttccgggatgctagctcggaggatgacgctaccatcatgcacctggcgcgcatggtggaggcgtacgacgcggctcgtatcgacttccatcagatggtgcgccgtgggatggtcgagaacaacatgaagatcctggagctgcgtcaggagaacctgcagctcaagaaggacctagacgcggtggaggcgcagctgcatcagctcaagatcgcccagggagaggtctgctgccccaagcgccgccgcgtctgccgcagccagaagatcaccgctcgcaagagcacctccaggcccgagcttattcgtcagtccctggcgtggacctgcttcatggagacccctcgtgccgagcccacgctcgtggttccccaggagggggaagcctccggcgttggtagcacggaggatgcgctgttgctcaccttccgccctggcccgtcgcagcggagaagtgctaataccggtgatggcaaccaacctgaaggcagcaaccacaaccaccagggcagcccacctccacctcctcctccgcctccaccaccaccaccagacaccaacgccattctcacccaaatcctcgcccagcaggccaacatgatgactgctttcctccaccacctccaaaatccgccacaacataatgctccaccaccacccccacaacactctaaactcgccgagttcctccgcatccgcccacctaccttctctagctccaacaaccccgtggatgcgttggattggttgcatgccgtggggaaaaagctagacactgtgcagtgcagcgatgaggagaaagtcatcttcgccgcccaccagctgcaggggcccgcatctctatggtgggaccatttccaggctacgcagccagaggggcagcctattacttgggcccgtttcaccgccgctttccggaggacccatgtgcccgccggagtcgtggcccttaagaaaagagaattccgagagttgaagcaaggcaaccgctccgtgatggagtatttgcatgagttcaacaacctggcccgttacgccccggaggatgtgcgggaagatgaggagaagcaagagaagttcttggcaggaattgaccctgagctgtccgtccgtctagtctccggggactatccggatttccaacgtctggtggacaagagcctccgcttggaagccaagcacaaggaactggagtcgcacaagcgccgcttggcgaatttccgcaatcaacagggcgctaaccaaaggcagcaacaacagcagccgcaacctcgctctgcgccccgacctcaattcgtggtgcgcgtcccacagccgcaacaacagcagagtcagcaagggactcgtgtgccccgtcctcctatgccagacgggcagcctagtcaaggccacagggacgctcaaggtccgcagcgtctgtgcttcaactgcttcgagccagggcactttgcggataaatgcccgaagccaaggcgtcagcaaggccaagcgcctccccgctccaacaacggtgggaaggatgtcattcggggtcgtgtgaaccacgtgacggccgaggacgtgctgacaactccagacgtcatcgttggtacgttcctcatacattccatccctgctactattttgttcgactctggagcttcccactcgtttatatctgtgccatttgtggggagaaatcaattgggggtagaaaggcttaggaaccctctgctcatcaccacccctggaggggttatgacagcaaagtattatagccccgccgtccctatagaaattcaggggattccttttccctcggatctgattctgctagacaccaagaacttggatgtgatccttgggatgaattggttggctcaattccaaggagtagtggattgcgcgagacgcactgtcactctgtaccgagggccggaacaaccggttgttttctttgcacccccaacctctgtcagtagctcagaactttatcagataggactgtcagaaatccccatcgtcagggagttcggagatgtgtttccggaagaactacccggtatgccgcccaagcgagagattgagttccggatagatcttgctccaggaactactcctctatacaagcgaccctaccgtatggcagcaaatgaattggccgaagtcaagaaacagttggaagagttgaaagaaaaggggtatatacatccgagtacttccccctggggtgctcctgtgatttttgtggagaagaaagacaagacgaagaggatgtgcgttgactacagagctctcaatgaagttaccatcaaaaacaagtaccctcttccccggatcgatgatctgttcgatcagcttaaaggtgccactgtattctccaagatcgatcttcgttccggatatcaccaattacgtattcatgaagaagatattctgaagaccgcattcaccacgcgatacggactgtatgaattcacggtgatgtcgttcggtttaaccaatgcacctgccttcttcatgaacttaatgaacaaagtgttcatggaatacttggataagtttgttgtggtgttcattgatgacattctgatatactcacaatcagaggaagaccatcagcaccatctccgtctggtgttgggaaagttgcgggaacatcaattgtatgccaaacttagcaagtgtgagttctggttgtccgaagtcaaattcttagggcacgtgatatctgctaaaggagttgctgtggaccccgaaacagtgaccgccgtcactgattggaagcaacccaagacagtcactcaagtccgcagtttcttaggtttggcaggatactaccggaggttcatcgagaacttctccaaaatcgctcgacccatgacacagttgttgaagaaagaagagaaatttgtgtggagcccgcaatgcgagaaggcgtttcaaactctcaaagaaaagctggtttcctcgccagtgttagtcttgccagatactcgcaaggatttcatggtgtattgtgacttcgcgccaaggattgggctacggcctcatgacggcaactaccctacccatgatttggagttagccgcggtggttcacgctctaaaaatctggcggcactatctcattgggaatcgctgtgaaatatatactgatcataagagtttgaaatacatcttcacccagtcggatctgaatcttcggcaaaggagatggttagaactcgtcaaggattacgatgtgggaattcactatcatcctggtaaggccaacgtggtcgccgacactctaagtcgaaaaagccattgcaacactcttaacgtccgtggcattccacccgaacttaacaaacagatggaagccctgaacctaagcatagttggtcgcggattcttggctgcgttggaagccaagcctaccttgctcgatcaaatccgcgaggctcagaggaatgatccggacatgcatggactcctcaagaatatgaaacagggtaaagtcgctggtttcacagaggatgaacacggaaccctatggaacggaaatcgggtatgcgttccagataatagagaacttaaacagctgatacttcaggaagctcacaaaagtccttattccatccaccctggcagtacgaagatgtacttagacttgaaggagaaatactgcgtgtcaaggcagagcaccaacgaccggccggacttctccaacctctccaagtaccagaatggaaatgagatgaaattgggatggatttcatcaccggacttccaaaaacccaaggtagctcgatttattcctgtgaagaccacctatggagggaacaaactagccgagctctacttcgctaggatcgtgagtctccatggcgttcccaagaaaatcgtatcggataggggaagccagttcacctctcacttttggaagaagctccaagaagagctgggtactcgattaaatttcagcaccgcgtatcacccgcagacagatggacagaccgagcgtctaaatcagatcctagaagatatgcttcgcgcatgtgtcctagatttcgggaagacctgggataagagtttcccctatgccgagttctcctacaataacagctaccaagccagtatacaaatggcaccttatgaagcgttgtatgggcgcaagtgccggacaccgctattgtgggaccaagttggggaaagccaagtgttcgggattgatatcctgagagaagctgaagctaaagtcagagccattcgggataatctaaaggtggcccagtcccggcagaaaagttatgcagataaccgtcgccgtgacctggaattcgcagttgacgattttgtataccttcgggtcacgccattgcggggtgtacaaaggtttcggacaaaagggaagctcgcacctcggttcgtggatcctttccgtatcattgctcggcgcggagaagtcgcttaccagttggagctgcccgcctccttgggcaacgtgcatgatgtgttccatgtgtcgcaactcaagaaatgccttcgagtgccatccgagcaggctgactcagagcaaattgaagttcgtgaagacttgacctacgtggagaggccagtgaaaatcctggacaccatggagcgcaggaccaggaaccgggtaatccgtttttgcaaggtccagtggagcaaccacgccgaagaagaagctacctgggagcgtgaagacgagctgaaggcagcccatcccgatctcttcgccagttcctccgaatctcggggtcgagattccgtttaa

SEQ ID NO: 14266 - DNA, 2436 bp, Oryza sativa
  Clone ID: TFbOSC900055j.C1.o18.np
atgtcatggcacagggccggtgtcctgctgctaggggctcagtcctgcctacctgtcccgggggttccggccgtaggtgggattgggtcggtactcttgtctatggctaggatgggttggaaactatgtcacgtcttccgtctgtataccgtggtgatggccggcagcatcagccgtcgtggtctggacctgactggcttcgtcttggagctgcggggcatgtgcgttgtcctggggtatccgcatggagtggactaccagggcaggccactcccggagcaggagggtgacgatgcagagccccacgctgcttgggagaggacttcgttggcagtcaccgcgggtggagattccttctccgccgcttgccagaacgccgctctcctcgccatcggcactcttcaccagcgctacccggacgagctgcagcactcgccctaccgctaccaccctcgccgcggaggagcccgcgactacgccaccttccgggatgctagctcggaggatgacgctaccatcatgcacctggcgcgcatggtggaggcgtacgacgcggctcgtatcgacttccatcatatggtgcgccgtgggatggtcgagaacaacatgaagatcctggagctgcgtcaggagaatctgcagctgaagaaggacctagacgcagtggaggcgcagctgcatcagctcaagatcgcccagggagaggtctgtcgccccaagcgtcgccgcgtctgccgcagccagaagatcacctcccgcaagagtacctccaggcccgagcttgttcgtcagtccctggcgtggacctgcttcgtggagacccctcgtgccgagcctgcgcccgtggttcctcaggagggggaagcctccggcgttggtagcacggaggatgcgctgttgctcaccttccgtcctggcccgtcgcagcggagaagtgctgccaccggtgatggcaaccaacctgaaggcagtaaccacaacaaccatggcagcccacctccacctcctcccccgcctccaccaccaccaccagacaccaacgccattctcacccaaatcctcgcccagcaggccaacatgatggctgctttcctccaccacatccaaaacccgccacaacataatgctccaccaccaccccgacagcactctaaactcgccgagttcctccgcatccgcccacctaccttctctagctccaataaccccgtggatgcgttggattggttgcatgccgtggggaaaaagttagacaccgtacagtgcagcgatgaggagaaagtcatcttcgccgctcaccaactgcaggggcccgcatctcaatggtgggaccatttccaggctacgcagccagaggggcagcctattacgtgggcccgcttcaccgccgctttccggaggacccatgtgcccgccggagtcatggcccttaagaaaagggaattccgagagttgaagcaaggcaaccgctccatgatggagtatttgcatgagttcaacaacctggcccggtacgccccggaggatgtacgggaagatgaggaaaagaaggagaagttcttggcaggaatggaccctgagctgtccgtgcgcctggtctccggggactattcggatttccaacgtctggtggacaagagcatccacttggaagccaagcacaaggaactggagtcgcacaagcgtcgcttggcgaatttccgcaaccaacagggtgctaaccaaagagtccgctacaccaatccctatccagggggatcctcctcacagcagcagcaacctcgctccgcgccccgacctcaattcgtggtgcgtgtcccacagccgcagcaatagcagagtcagcaagggactcgtgcgccccgtcctcctacgccagccgcgcagtctggtcaaggccgcagggacgttcaaggtccgcagcgtctgtgcttcaactgcttcgagcctgggcactttgcggataaatgcccaaagccgaggcgccagcaaggccaagcgcctccccgctccaacaacggtggtaaggatgtcattcggggtcgtgtgaaccacgtgacggccgaggacgtgctgacaactccagacgtcatcgttggtacgttcctcattcattccatccctgctaccattttgttcgactctggagcttcccactcgtttatatctgtgccattcgtggggagaaatcagttgggggtagaaaggcttaggaaccctctgctcatcaccacccctggaggggttatgacagcaaagtattatagccctgccgttcctatagaaattcagggaattccttttccctcggatctgattcttctagacaccaagaacttggatgtgatccttgggatgaattggttggctcaattccaaggagtagtggattgtgcaagacgcactgtcaccctgtaccgagggccgaaacaaccg

SEQ ID NO: 14267 - DNA, 2282 bp, Oryza sativa
  Clone ID: TFbOSC900056j.C1.o22.gm
gcaattttcccggtcgcgacaagcgtctgtgcttcaactgcttcgagcctgggcactttgcggataaatgcccgaagccaaggcgccagcaaggccaagcgcctccccgctccaacaacggtgggaaggatgtcattcggggtcgtgtgaaccacgtgacggccgaggacgtgctgacaactccagacgtcatcgttggtacgttcctcattcactccatccctgctaccattttgttcgactctggagcttcccactcgtttatatctgtgccattcgtggggagaaatcagttgggggtagaaaggcttaggaaccctctgctcatcaccacccctggaggggttatgacagcaaagtattatagccctgccgtccctatagaaattcaggggataccttttccctcggatctgattctgctagacaccaagaacttggatgtgatccttgggatgaattggttggctcaattccaagggatagggctgtcagaaatccccatagtcagagagttcggagacgtgtttccggaagaactacccggaatgccgcccaagcgagagattgagttccggatagatcttgctccaggaaccactcctctgtacaagcgaccctaccgtatggcagcaaatgaactggccgaagttaagaaacagttggaagagttgaaagaaaaggggtatatacgtccgagtacttccccctggggtgctcctgtgatttttgtggagaagaaagacaagacgaagaggatgtgcgttgactacagagctctcaatgaagtcaccatcaaaaacaagtatcctcttccccggatcgatgacctgttcgatcagcttaaaggtgccactgtattctccaagatcgatcttcgttccggatatcaccaattacgtattcgtgaagaagatattccgaagaccgcattcaccacgcgatacggactgtatgaattcacggtgatgtcgttcggtttaaccaatgcacctgccttcttcatgaacttaatgaacaaagtgttcatggaatacttggacaagtttgttgtgccgcgccgcgccgccgttgcagccgccgtcgtcagtcgccgtcgccaccatcgggttcgcaaggtcgccgccgtccccgtccaccgcttcgccgccgccgaagaccgccggagcaccgtcgccgccgtcgacccgatcttctccgccgccttttcctcgacgccgccgccgtccgttggtcttccgccgacgttttggtcatcggtgagttcgccgcgccgtgatctacgtcttggtgccctccgtttgtgccgtagagccgccgttcgccggcgagcatgcgccgtccgagccgtccgagccgccgagccgccgccggtgctgacgtcgtcgctgaccccctttccgaggtaccgtggtggtactgaggcacatggtgacatgatgtggggctgtgtcttgtgggtacagtggtacacctctggccagagatactaccggaggttcatcgagaacttctccaaaatcgctcgacccatgacacagttgttgaagaaagaagagaaatttgtgtggagcccgcaatgcgagaaggcgttccagactctcaaagaaaagctggtttcctcgccggtgttaatcttgccggatactcgcaaggatttcatggtgtactgtgatgcttcgcgccaaggattgggcctctcggtccacggcggaccgggagcacgcggctggcggcggccggcgccgtgggtcccacgcgtcagccgcacccgcgggcgcgggcggctgacggccgggccccacctggcagccgcggggcgcgcccgaaggcggcctcgccggcacggccgacgggagaacggcgcacccgcgccccgatggtcgccgccggcgaccaacggcgcggcggagtggcacccgagagagaggagggaagggggaagcgaacggagcggtccacggctcaccccggtcgacggcgacgacgggaacggcggccgaaaacggagaaaggcggcggcgcggttcgggacgacgaggacgacggcgttccggcggtcggcgagcgaagcggaggggcggacgaggtcgacgacgacgcggcgaagccgaaggagacgacgccgagaggggaggaagtccggagcgacggcggcggcgaaccggagctcggcggcgacggcggagagaaggtgcgacggcgcgagcacgattccgacggggagagcgagcggcgagcggcggaaacggaggaggagagcacgggggacgtttaaatag

SEQ ID NO: 14268 - DNA, 5421 bp, Oryza sativa
  Clone ID: TFbOSC900082j.C1.o6.fg
atgtcgtggcacagggccagtgtcctgctgctaggggctcagtcctgcctacctgtcccgggggttccggctgtaggtgggattgggtcggtactcttgtctatggctaggatgggttggaaactatgtcacgtcttccgtctgtataccgtggtgatggccggcagcatcaaccgtcgtggtctggacctgactggtttcgttttggagctgcggggcatgtgcgttgtcctggggtatccgcatggagtggactaccagggcaggcagctcccggagcaggagggtgacgatgcagagccccacgctgcttgggaggttactgcagtgatcctcactggctctcccgagaggacttcgttggcggtcaccgcgggtggagattccttctccgccgcttgccagaacgccgcactcctcgccatcggcactcttcaccagcgctacccggacgagttgcagcactcgccctaccgctaccaccctcgccgcggaggagcccgcgactacgccaccttccgggatgctagctcggaggatgacgctaccatcatgcacctggcgtgcatggtggaggcgtacgacgcggctcgtatcgacttccatcaaatggtgcgccatgggttggtcgagaacaacatgaagatcctggagctgcgtcaggagaatctgcagctgaagaaggacctagacgcagtggaggcgcagctgcatcagctcaagatcgcccagggagaggtctgtcgccccaagcgccgccgcgtctgccgcagccagaagatcaccgcccgcaagagcacctccaggcccgagcttgttcgccagtccttggcgtggacttgcttcgtcgagacccctcgtgccgagcccatgcccgtggttcctcaggagggggaagcctccggcgttggtagcacggaggatgcgctgttgctcaccttccgtcctggcccgtcgcagcggagaagtgctaacaccggtgatggcaaccaacccgaaggcagcaaccaccacaaccatggcagcccacctccacctcctcctccgcctccaccaccaccaccagacaccaacgctattctcacccaaatcctcgcccagcaggccaacatgatggctgctttcctccaccacatccaaaatccgccacaacataatgctccaccaccaccgccacaacactctaaactcgccgagttcctccgcatccatccacctaccttctctagctccaataaccccgtggatgcgttggattggttgcatgccatggggaaaaagttagacatcgtgcagtgcagcgatgaggagaaagtcgtcttcgccgcccaccaactgcaggggcctgcatctctatggtgggactatttccaggctacgcagccagaggggcagcctattacttgggcccgcttcaccgccgctttccggaggacccatgtgcccgccggagtcatggcccttaagaaaagggaattccgagagttgaagcaaggtaaccgctccgtgatggagtatttgcatgagttcaacaacctggcccggtacgccccggaggatgtacgggaagatgaggaaaagcaggagaagttcttggcaggaatggatcctgagctgtcagtccgtctagtctccggggactatccagatttccaacgtctggtggacaagagcatccgcttggaagccaagcacaaggaactggagtcgcacaagcgccgcttggcgaatttccgcaatcaacagggagctaaccaaaggatccgctacaccaatccctatccagggggatcgtcctcgcagcagcaacagcagcagcaacctcgctccgcgccccgacctcaattcgtggtgcgcgtcccacagccgcagcaacagcagagccagcaagggacccgtgcgccccgtcctcctacgccagccgcgcagtctggtcaaggccgcagggacgttcaaggtccgcagcgtctgtgcttcaactgcttcgagcctgggcactttgcggataaatgcccaaagccgaggcgccagcaaggccaagcgcctccccgctccaacaacggtggtaaggatgtcattcggggtcgggtgaaccacgtgacggccgaggacgtgctgacaactccagacgtcatcgttggtacgttcctcattcattccatccctgctaccattttgttcgactctggagcttcccactcgtttatatctgtgccattcgtggggagaaatcagttgggggtagaaaggcttaggaaccctctgctcatcaccacccctggaggggttatgacagcaaagtattatagtcctgccgtccctatagaaattcaggggattccttttccctcggatctgattcttctagacaccaagaacttggatgtgatccttgggatgaattggttggctcaattccaaggagtagtggattgtgcaagacgcactgtcactctgtaccgagggccggaacaaccggttgttttctttgcacccccaacctctgtcagtagttcagaacttcatcagataggactgtcagaaatccccatcatcagagagttcggagacgtgtttccggaagaactacccggtatgccgcccaagcgagagattgagttccggatagatcttgctccaggaaccactcctctgtacaagcgaccctaccgtatggcagcaaatgaactggccgaagttaagaaacagttggaagagttgaaagaaaaggggtacatacgtccgagtacttccccctggggtgctcctgtgatttttgtggaaaagaaagacaagacgaagaggatgtgcgttgactacagagctctcaatgaagtcaccatcaaaaacaagtaccctcttccccggatcgatgatctgttcgatcagcttaaaggtgccacggtattctccaagattgatcttcgtttcggatatcaccaattacgtattcgtgaagaagatatcccgaagaccgctttcaccacgcgatacggactgtatgaattcacggtgatgtcattcggtttaaccaatgctcctgccttcttcatgaacttaatgaacaaagtgttcatggaatacttggataagtttgttgtggttttcattgatgacattctggtatactcacaatcagaggaagaccatcagcaccatctccgtctggtgttgggaaagttgcgggaacatcaattgtatgccaaacttagcaagtgtgagttctggttgtccgaagtcaaattcttagggcacgtgatatctgctaaaggagttgctgtggaccccgaaacagtgaccgccgtcaccgattggaagcaacccaagacagtcactcaaattcgcagtttcttgggtttggcaggatactaccggaggttcatcgagaacttctccaaaatcgctcgacccatgacacagttgttgaagaaagaagagaaatttgtgtggagcccgcaatgcgagaaggcgttccaaactctcaaagaaaagctggtttcctcgccagtgttaatcttgccggatactcgcaaggacttcatggtgtattgtgacgcttcgcgccaaggattggggtgcgtgctcatgcaggaaggtcatgtggtggcctatgcctcacgccagctacggcctcatgaaggcaactaccctacccatgatttggagttagccgcggtggttcatgctctaaaaatctggcggcactatctcattgggaatcgctgtgaaatatatactgatcataagagtttgaaatacatcttcacccaatcggatctgaatcttcggcagagaagatggttagagctcatcaaggattatgatgtgggaatccactatcatcctggtaaggccaacgtggtcgccgacgccctaagtcgaaaaagccattgcaacactcttaatgtccgtggcattccacctgaacttaatcaacagatggaagccctgaacctaagcatagttggtcgcggattcttggctgcgttggaagccaagcctaccttgctcgatcaaatccgcgaggctcagaagaatgatccggacatgcgtggactcctcaagaatatgaaacagggtaaagccgctggtttcacagaggatgaacacggaaccctatggaacggaaatcgggaagctcacgaaagtccttattccatccaccctggcagtacgaagatgtacttagacttgaaggagaaatactggtgggttagtatgaagcgggaaattgcagagttcgtggccctttgtgatgtgtgccagcgtgtcaaggcagagcaccaacgaccggccggacttctccaacctctccaagtaccagaatggaaatgggatgaaattgggatggatttcatcaccggacttccaaaaacccaaggtggatatgattctatatgggtagttgtggaccgattaaccaaggtagctcggtttattcctgtgaagaccacctatggagggaacaaactagccgagctctacttcgctaggatcgtgagtctccatggcgttcctaagaaaattgtatctgataggggaagccaattcacctctcacttttggaagaagctccaagaagagctgggtacccgattaaatttcagcaccgcgtatcacccgcagacagatggacagaccgagcgtctaaatcagatcctagaagatatgcttcgcgcatgtgtcctagatttcgggaagacctgggataagagtctcccctatgccgagttctcctacaataacagctaccaagccagcatacaaatggcaccttatgaagcgttgtatgggcgcaaatgccggacaccgctcttgtgggaccaagttggggaaagccaagtgttcgggactgatatactgagagaagctgaagcgaaggtcagaaccattcgggataatctaaaggtggcacagtcccggcagaaaagttatgcagataaccgtcgccgtaacctggaattcgcagtggatgattttgtgtaccttcgggtcacgccattgcgaggtgtacacaggtttcagacgaaagggaagctcgcacctcggttcgtgggtcctttccgtatcattgctcgacgcggagaagtcgcttaccagttggagctgcccgcctccttgggcaacgtgcatgatgtgttccatgtgtcgcaactcaagaaatgccttcgagtgccgtccgagcaggccgactcagagcaaattgaagttcgcgaagacttgacttacgtggagaggccagtgaaaatcctggacaccatggagcacaggaccaggaaccgggtaatccgtttttgcaaggtccaatggagcaaccacgccgaggaagaagctacttgggagcgtgaagacgagctgaaggcagcccatcccgatctcttcgccagttcttccgaatctcggggtcgagattccgtttaa

SEQ ID NO: 14269 - DNA, 5388 bp, Oryza sativa
  Clone ID: TFbOSC900086j.C1.o17.fg
atggatgaagtcgggggtcgatggacattctccagggcaaatgaaggctacacgagctgcggcccgatggccggcagcgttacccgtcgtggtttggacatgactggcttcgtcttggagctgcggggcatgtgcgtggtcttggggtatccacatggagtggattaccaggccaggccgctcccggagcaggagggtgaggatgcagagcctcacgctggttgggaggtcactgcagtgatcctctccggctctcccgagcggatttcgctggcagtcacagcgggtggggactccttccccgccgcttgccagaacgccgctctcctcgccatcggcacccttcaccagcgctacccggacgagttgcagcactcgccctaccgctaccaccctcgtcgcggaggagcccgcgactacgccaccttccgagacgccagctcggaggatgacgctaccgtcgtgcacctggcacgcatggtggaggcgtacgacgcggctcgtatcgacttccatcagatggtgcgtcgtggcatggtggagaacaacctgaagatcctggagctgcgtcaggagaacctgcagctcaagaaggacctcgacgcagtggaggcgcagctgcaccagctcaagatcgcccagggagaggacagccgtcccaagcgtcgccgcgtctgccgcagccagaagatcaccgcccgcaagagcacctccaggcccgagcttgtccgtcagtccctggcgtggacctgcttcgtcgagacccctcgtgccgagcctgcgcccgtggttccccaggagggggaagcctccggcgttggtagctcggaggttttaatcgtcagctctctttctctgcttgctggttctgtgtggggttttcagatggtgacgaccaggagaaatgttaacaccggtgaaggcaaccaacccgagggcagcaaccccaaccaccaaggcaatccacctccaccaccaccaccagacaccaacgccattctcacccaaatcctcgcccagcaagccaacatgatgaccgctttcctccaccacctccaaaacctgccacaacagaatgctccaccaccacctccccaacactctaaactcgccgagttcctccgcatccgcccacctaccttctccagctccaacaaccccgtggatgctttggattggttgcatgccgtggggaagaagctagacacggtgcagtgcagtgacgaagagaaagtcatcttcgccgcccaccagctgcaggggcccgcatctctatggtgggaccacttccaggctacgcagcccgaggggcagccgattacttgggctcgcttcaccgccgctttccggagaacccatgtgcccgccggagtcgtggctctcaagaagagggaattccgggagttgaagcaaggcaaccgctccgtgatggagtatttgcatgagttcaacaatctagcacgttatgccccggaggatgtgcgggaagatgaggagaagcaagagaagttcttggcaggaatggaccctgagctgtctgttcgtctagtctctggagactacccggacttccaacgtctggtggacaagagcatccgcttggaagccaagcacaaggagctggaatcgcacaagcgccgcttggcgaacttccgcaatcagcagggtgctaaccagagggtccgctacaccaatccctacccagggggatcctcctcgcagcagcaacagcagcagcagcaacctcgctccgcgcctcgacctcaatccgtggtgcgcgtcccacagcagcaacagcagcagaatcagcaagggactcgtgcgccccgtcctcctacgccagctgggcagcccgttcaaggccgcagggacgcttcaggtccgcagcggctgtgcttcaactgcttcgagcccgggcactttgcggataaatgcccgaagccaaggcgtcagcaaggccaagcgcctccccgctccaacaacggcgggaaggatgtcattcggggtcgtgtgaatcacgtgacggccgaggacgtgctgacaactccagacgtcatcgttggtacgttcctcgttcattccatccctgctacaattttgttcgactctggagcttcccactcgtttatatctgtgccattcgtggggagaaatcagttgggggtagaaaggcttagaaaccctctgcttatcaccacccctggaggggttatgacagcaaagtactatagccctgccgtccctatagaaattcaggggattccttttccctcggacctgattcttctagacacaaagaacttggatgtgatccttgggatgaattggctggcacaattccaaggagtagtggattgcgcgagacgcactgttactatgtaccgaggaccagaacaaccggttgttttctttgcacctccaacctctgtcagaagttcagaactgcatcagataggtctgtcagaaatccccatcgtcagagagttcggagacgtgtttccggaagaactacctggtatgccgcccaagcgagagattgagttccggatagatcttgctccaggaaccactcctctgcacaagcgaccctaccgtatggcagcaaatgaactggccgaagtaaagaaacagttggaagagttgaaagaaaaggggtacatacgtccgagtacttccccatggggtgctcctgtgatttttgtagagaagaaagacaagacgaagaggatgtgcgtcgactacagagctctcaatgaagtcaccatcaaaaacaagtaccctcttccccggatcgatgatctgttcgatcagcttaaaggtgccactgtattctccaagattgatcttcgttccggatatcaccaattacgtattcgggaagaagatattccgaagaccgcattcaccacgcgatacgggctgtatgaattcacggtgatgtcgttcggcttgaccaatgctcctgccttcttcatgaacttgatgaacaaagtgttcatggaatacttggataagttcgttgtggttttcatcgatgacattctgatatactcacaatcagaggaagaccatcagcaccatctccgtctggtgttgggaaagttgcgggaacatcaattgtatgccaagcttagcaagtgtgagttctggttgtccgaagtcaaattcttgggacacgtgatatctgctaaaggagttgctgtggaccccgaaacagtgaccgccgtcaccgattggaagcaacccaagacagtcactcagattcgcagtttcttgggtttggcaggatactaccggagattcatcgagaacttctccaaaatcgctcgacccatgacacagttgttgaaaaaagaagagaagtttgtgtggagcccgcaatgcgagaaggcgttccaaactctcaaagaaaagctggtttcctcgccagtgttaatcttgccggatactcgtaaggatttcatggtgtactgtgatgcttcgcgccaaggattggggtgcgtgctcatgcaggacggtcatgtggtagcctatgcctcacgccaactacgacctcatgaaggcaactaccctacgcatgacttggagttagcagcggtggttcatgctctaaaaatctggcggcactatctcattgggaaccgctgtgaaatatatactgatcataagagtttgaaatacatcttcacccagtcggatctgaatcttcggcaaaggagatggttagaactcatcaaggattatgatgtgggaatacactatcaccctggtaaggctaacgtggttgccgacgctctaagtcggaagagccattgcaatactctcaacgtccgtagcattccgcccgagcttagtcaacagatggaagccctgaacctaagcatagttggtcgtggatttttggccgcgttggaagccaagcccaccttgctcgatcaaatccgcgaggctcagaagaatgatccggacatgcatggactcctcaagaatatgaaacagggtaaagccgctggtttcacagaggatgaacacggaaccttatggaacggaaagcgggtatgcgtaccagatagcagagaacttaaacagctgatacttcaggaagctcacgaaagtccttattccattcacccgggcagtaccaagatgtacttagacttgaaggagaaatactggtgggtcagcatgaagcgggaaattgcagagtttgtggctctatgtgatgtgtgccagcgtgtcaaggtagagcaccagcgaccggctggacttctccaacctctccaagtgccggaatggaaatgggatgaaattgggatggatttcatcaccggccttccaaaaacccaaggtggatatgactctatatgggtaatagtggatcgattaaccaaggtagctcgattcattcctgtgaagaccacctatggagggaacaaactagcggagctctacttcgctaggatcgtgagtctccatggtattcccaagaaaatcgtatctgataggggaagccaattcacctctcacttttggaagaagctccaagaagagctgggtactcgattgaatttcagcaccgcctatcacccgcagacagatggacagaccgagcgtctaaatcagatcctagaagatatgctccgcgcatgtgtcctagatttcgggaagacttgggataagagtctcccctatgccgagttctcctacaataacagctatcaatccagcatacaaatggcaccctatgaagcgttgtacgggcgcaaatgccggacaccgctattgtgggaccaagttggagaaagccaagtgttcgggactgatatcctgagagaagctgaagctaaagtcagaatcattcgggataatctaaaggtggcacagtctcggcagaaaagttatgcagataaccgacgccgtgatctggaattcgcagtggatgattttgtgtatcttcgggtcacgccattgcgaggtgtgcacaggattcagacaaaagggaagctcgcacctcggtatgtgggtcccttccgtatcatcgctcgacgtggagaagttgcttaccagctggagttgcccgcctccttgggcaacgtgcatgatgtgttccatgtgtcgcaactcaagaaatgtcttcgagtgccatccgagcaggccgactcagagcaaattgaagttcgcgaagacttgacctatgtggagaggccagtgaaaatcctggacaccatggagcgcaggaccaggaaccgagtaatccgtttttgcaaggtccagtggagcaaccacgccgaagaagaagctacttgggagcgcgaagacgagctgaaggcagcccatcccggtctcttcgccagttcttccgaatctcggggtcgagattccgtttaa

SEQ ID NO: 14270 - DNA, 3999 bp, Oryza sativa
  Clone ID: TFbOSC900091j.C1.o28.gm
atgaagatcaccgcccgcaagagtacctccaggcccgagcttgttcgtcagtccttggcatggacctgcttcgtcgagacccctcgcgccgagcccgcgccctcgatggtgacaaccaggagaagtgctgctaccggtgaaggcagtcaccccgaaggcagcaaccacaacaaccatggcagcccacctccacctcctcccccgccaccaccaccaccaccaccagacaccaactccatcctcacccaaatcctcgcccagcaggccaacatgatggctgctttcctccatcacatccaaaatccgccacagcataatgttccacctccatcaccacccccgcaacattctaaactcgccgagttcctccgcatccgtccgcctaccttctctagttccaataaccccgtggatgccttggattggttgcatgccgtggggaaaaagttggataccgtgcagtgcaacgatgaggaaaaagtcatctttgccgctcaccaactgcagggacccgcatctctatggtgggacaacttccaggctatgcagccagaaggacagcctattacttgggcccgcttcaccgccgctttccggaggacccatgtgcccgccggagttatggcccttaagaaaagggaattccgggagttgaagcaaggcaaccgctccgtgatggagtatttgcatgagtttaacgacttggcccggtatgccccagaggatgttcgggaagatgaggaaaagcaggagaagtttttggcaggaatggaccctgagctgtccgtgcgtctggtctccggggattatcctgatttccagcgtctggtggacaagagcatccgcttggaagccaagcacaaggaactggagtcacacaagcgtcgcttggcaaatttccgcaatcaacaaggggctaaccaaaggatccgctacaccaatccctatccagggggatcctcctcgcagcagcagcagcagcagcaaccacgctccgcgccccgacctcaattcgtggtgcgtgtcccacagccgcagcaacagcagagtcagcaagggacccgtgcgccccgtcctcatgtgccagccgtgcagcctggacaaggccgcagagacgctcaaggtcagcagcgtctgtgcttcaactgcttcgagcccgggcactttgcggataaatgcccgaagccgcgacgccagcaaggccaagcgcctccccgccccaacaacggtggtaaggatgtcattcggggtcgtgtgaaccatgtgactgccgaggatgtgctgacgactccggacgtcatcgttggtacgtttctcattcattccatccctgctaccattttgttcgactctggagcttcccactcgtttatatctgtgccattcatggggagaaatcagttgggggtagaaaggcttaggaaccctctgctcatcaccacccctggaggggttatgacagcaaagtattatagccctgccgttcctatagaaatccagggaattcctttcccctcggatttgattcttctagacaccaagaacttggatgtgatcctcgggatgaattggttggcacaattccaaggagtagtggattgcgcaaggcgcactgtcactctgtaccgggggcctgatcaaccggttgttttctttgcacccccaacctctgtcgacaattcagaacttcatcagattggactgtcaaaaatccccatcgtccgtgagttcggagatgtgtttctggaggaactacccggtatgacgcccaagcgagagattgagttccggatagatcttgctccaggaaccactcctctatacaagcgaccctaccgtatggcagccaatgaactggccgaagtcaagagacagttggaagagttgaaagaaaagggagctctcaatgaagttactatcaaaaacaagtaccctcttccccggatcgatgatttgttcgaccagcttaaaggtgccactgtcttttcaaaaatcgatcttcgttccggatatcaccaattgcgtattcgtgaagaagatatcccgaagaccgcattcaccacgcgatacggactgtatgaattcacggtgatgtcgttcggtctgaccaatgctcctgccttcttcatgaacttaatgaacaaagtgttcatggaatacctagataagtttgttgtggttttcattgacgacatcctggtgtactcacaatcagaggaagaccatcagcagcatctctgtctggtgttgggaaagttgcgggaacaccacttgtatgccaagcttagcaagtgtgagttctggttgtccgaagtcaagttcctagggcacgtgatatctgctaaaggagttgctgtggatcccgaaacggtgaccgccgtcactgattggaagcaacccaagacagtcactcaagtccgtagctttttgggtttggccgggtactaccgaagattcatcgagaatttctccaaaattgccagacccatgacgcagttgctgaagaaggaagaaaaatttgtgtggagcccgcaatgcgagaaggcgttccaaactctcaaagagaagctggaaggccacgtggtagcctatgcctcacgccagcttcggccccatgaaggcaactaccctacccatgatttggacttggccgctgtggttcatgctctaaagatctggcggcactatctcattgggaatcgctgtgaaatatatactgatcataagagtttgaaatacatcttcactcagtcggatctgaatcttcggcagaggagatggttagaactcatcaaggattatgatgtgggaattcactatcatcctggtaaggccaacgtggtcgccgactctctaagtcgaaaaagccgttgcaacactctcggcgtccgtggtattccactggaacttaatcaacagatggaagccctgaacctaagcatagttggtcgtggattcttggctacgctggaagccaagcctaccttgcttgatcaaatccgcgaggctcataagaatgatccagatatgcatggactcctcaagaatatgaaacagggtaaagccgctggtttcacagaggatgaacacggaaccctatggaacggaaatcggagttcgtggccctttgtgatgtgtgccagcgtgtcaagggagagcaccaacgaccggccggacttctccaacctctccaagtaccagaatggaaatgggatgaaattgggatggatttcatcaccggacttccaaaaacccagggcgacctgggataagagtctcccctataccgagttctcctacaataacagctaccaagccagcatacaaatggcaccctacgaagcgttgtatggctgcaaatgccggacaccgctattgtgggaccaagttggggaaagccaagtgttcgggactgatatcctgagagaagctgaagataaagtcagaaccattcgggataatctaaaggtggcacagtcccggcagaagagttatgcagataaccgacgccgtaacctggaattcgcagtggacgattttgtgtacctatgggtcacgccattgcgaggagtacacaggtttcagacgaaagggaagctcgcacctcggttcgtgggtcctttccgtatcattgctcgacgcggagaagtagcttaccagttggagctgcccgcctccttcggcaacatgcatgatgtgttccatgtgtcgcaactcaagaaatgtcttcgagtgccatccgagcaggccgattcagagcaaattgaagttcgcgaagacttgacctacgtggagaggacagtgaaaatcctggacaccatggagcgcaggaccaggaactgggtaatccgtttttgcaaggtccaatggagcaaccacgctgaggaagaagcaacttgggaacgtgaagacgagctgaaggcagcccatcccgatctcttcgccaacgctgcagcttcagaagatccgctcttcgtggaggttgaagccgacgtttag

SEQ ID NO: 14271 - DNA, 3813 bp, Oryza sativa
  Clone ID: TFbOSC900113j.C1.o14.gm
atggtgacgaccaggagaaatgctaataccggtgatggcaaccaacctgaaggcagcaaccacaaccaccaaggcaacccacctccacctcctcctccgcctccacctccaccaccagataccaacgccattctcacccaaatcctcgcccagcaagccaacatgatgactgctttcctccaccacctccaaaatccgccacaacataatgctcccccaccacctccccaacactctaaactcgccgagttcctccgcatccgtccacccaccttctctagctccaacaaccccgtggatgcgttggattggttgcatgccgtggggaaaaagctagacactgtgcagtgcagcgatgaggagaaagtcatcttcgccgcccaccagctgcaagggcccgcatctctatggtgggaccatttccaggctacgcagccagcggggcaacctattacttgggctcgcttcaccgccgctttccggagaacccatgtgcccgccggagtcgtggctcttaagaagagggagttccgagagttgaagcaaggcaaccgctccgtgatggagtatttgcatgagttcaacaaccttgcccgttacgccccggaggatgtgcgggaagatgaggagaagcaagagaagttcttggcgggaatggaccctgagctgtccgtttgtctagtctccagggactacccggacttccaacgtctggtggacaagagcatccgcttggaagccaagcacaaggagctggagtcgcacaagcgccgcttggcgaatttccgcaatcaacagggtgctaaccaaagggtccgctacaccaatccctatccagggggatcctcctcgcagcagcaacaacagcagcagcaacctcgctccgcgcctcgacctcaattcgtggtgcgcgtcccacagccgcagcagcagcagaatcaacaagggactcgtgcgccccgtcctcctacgccaactgtgcagcctggtcaaggccgcagggacacacaaggcaattttcccggtcgcgacaagcgtctgtgcttcaactgcttcgagcctgggcactttgcggataaatgcccgaagccaaggcgccagcaaggccaagcgcctccccgctccaacaacggtgggaaggatgtcattcggggtcgtgtgaaccacgtgacggccgaggacgtgctgacaactccagacgtcatcgttggtacgttcctcattcactccatccctgctaccattttgttcgactctggagcttcccactcgtttatatctgtgccattcgtggggagaaatcagttgggggtagaaaggcttaggaaccctctgctcatcaccacccctggaggggttatgacagcaaagtattatagccctgccgtccctatagaaattcaggggataccttttccctcggatctgattctgctagacaccaagaacttggatgtgatccttgggatgaattggttggctcaattccaagggatagggctgtcagaaatccccatagtcagagagttcggagacgtgtttccggaagaactacccggaatgccgcccaagcgagagattgagttccggatagatcttgctccaggaaccactcctctgtacaagcgaccctaccgtatggcagcaaatgaactggccgaagttaagaaacagttggaagagttgaaagaaaaggggtatatacgtccgagtacttccccctggggtgctcctgtgatttttgtggagaagaaagacaagacgaagaggatgtgcgttgactacagagctctcaatgaagtcaccatcaaaaacaagtatcctcttccccggatcgatgacctgttcgatcagcttaaaggtgccactgtattctccaagatcgatcttcgttccggatatcaccaattacgtattcgtgaagaagatattccgaagaccgcattcaccacgcgatacggactgtatgaattcacggtgatgtcgttcggtttaaccaatgcacctgccttcttcatgaacttaatgaacaaagtgttcatggaatacttggacaagtttgttgtgccgcgccgcgccgccgttgcagccgccgtcgtcagtcgccgtcgccaccatcgggttcgcaaggtcgccgccgtccccgtccaccgcttcgccgccgccgaagaccgccggagcaccgtcgccgccgtcgacccgatcttctccgccgccttttcctcgacgccgccgccgtccgttggtcttccgccgacgttttggtcatcggtgagttcgccgcgccgtgatctacgtcttggtgccctccgtttgtgccgtagagccgccgttcgccggcgagcatgcgccgtccgagccgtccgagccgccgagccgccgccggtgctgacgtcgtcgctgaccccctttccgaggtaccgtggtggtactgaggcacatggtgacatgatgtggggctgtgtcttgtgggtacagtggtacacctctggccagagatactaccggaggttcatcgagaacttctccaaaatcgctcgacccatgacacagttgttgaagaaagaagagaaatttgtgtggagcccgcaatgcgagaaggcgttccagactctcaaagaaaagctggtttcctcgccggtgttaatcttgccggatactcgcaaggatttcatggtgtactgtgatgcttcgcgccaaggattggggtgcgtgctcatgcaggatggtcatgtggtggcctatgcctcacgccagctacggcctcatgaaggcaactaccctacccatgatttggagttagcagctgtcacgaccggaaataacccaacgggcattcctcacgtgcgtgcattaatccttgtcccaggaggcaagactgagccacaaactaagccttacccactagacatgtggaagtacggtagtgctttgcaacagaggcccgaagaccgccgggggagagggcgcgcggaccgggtccacgggagtggggcccacgcgtcagcctctcggtccacggcggaccgggagcacgcggctggcggcggccggcgccgtgggtcccacgcgtcagccgtacccgcgggcgcggtcgggttacgtcccgccccctactgggaggcgtgggggcctcccctaaggcttgctccccctttcgtggggccgctgactgtgtgcgtcgcgggcgccggttgggggtctggctattgtgtgggtggtctgaatgtcccatcatgggagagtggtgtggggcgcgccggggttgccggcgggtcgggggggtggcggggacgcgggggggtggggggagtgtgggatgacgggggcgcgtggctcagggttggttttgccggggcgctcaggtcggtgaggttgaggagtgctcatgtgcctatggccgctttcataaattatcgtctggctttgttcgacgttctaggactactgggtgggtgtgtggcggtggttggatgtctgtgtgatggcttctggggctcccccgggtggcgggcgacgacgggaacggcggccgaaacggaggaagccggcggcgcgttcgggacgacgaggacgacggcgttccggcggtcggcgagcgaagcggaggggcggacgaggtcgacgacgacgcggcgaagccgaaggagacgacgccgagaggggaggaagtccggagcgacggcggcggcgaaccggagctcggcggcgacggcggagagaaggtgcgacggcgcgagcacgattccgacggggagagcgagcggcgagcggcggaaacggaggaggagagcacgggggacgtttaaatag

SEQ ID NO: 14272 - DNA, 4680 bp, Oryza sativa
  Clone ID: TFbOSC900113j.C1.o30.fg
atggccggagtcattggcgatggcggcttgagtggcggtgagcctcggcatgccagtgcatacctagttccggctcaattctatggttacgacgaagcagccgtatttgagataggaagtgctttacacttggacaccgcagggtatgatgctcttgttctagttttagccgctcatatgatggtgacgaccaggagaaatgttaacaccggtgaaggcaaccaacccgaaggcagcaaccccaacccccaaggcaacccacctccaccaccaccaccagacaccaacgctattctcactcaaatcctcgcccaacaagccaacatgatgaatgctttcctccaccacctccaaaatccaccacaacagaatgctccaccaccccctccccaacactctaaactcgccgaattcctccgcatccgcccgcccaccttctctagctccaacaaccctgtggatgcgttggattggttgcatgccgtggggaagaagctagacacggtgcggtgcagtgatgaggagaaagtcgtcttcgccgcccaccagctgcagggacccgcatctctatggtgggaccacttccaggctacgcagcccgaggggcaaccgattacttgggcccgcttcaccgccgctttccggagaacccatgtgcccgctggagtcgtggctcttaagaaaagagaattccgagagttgaagcaaggcaaccgctccgtgatggagtatttgcacgagttcaacaacttggcccgttatgctccggaggatgtgcgggaagatgaggagaagcaagagaagttcttggcaggaatggaccccgaactgtctgttcgtctagtctctggggactatcctgatttccaacgtctggtggacaagagcatccgcttggaggccaagcacaaggagctggagtcgcacaagcgccgcttggcgaacttccgcaatcagcagggtgctaaccagagggtccgctacaccaatccctacccagggggaacctcctcgcagcagcagcagcagcagcaacctcgcccagcgccccgacctcaattcgtggtgcgcgtcccacagccgcagcagcagcagaatcagcaagggactcgtgcgccccgtcctcctacgccaactgtgcagcccgttcaaggccgcagggacgctcaaggtccgcagcggctgtgcttcaactgcttcgagcccggacactttgcggataaatgtccaaagccaaggcgtcagcaaggccaagcgcctccccgctccaacaacggcgggaaggatgtcattcggggtcgtgtgaatcacgtgacggccgaggacgtgctgacaactccagacgtcatcgttggtacgttcctcgttcattccatccccgctacaattttgttcgactctggagcttcccactcgtttatatctgtgccattcgtggggagaaatcagttgggggtagaaaggcttagaaaccctctgctcatcaccacccctggaggggttatgacagcaaagtattatagccctgccgtccctatagaaattcaggggattccttttccctcggatctgattctgctagacaccaagaacttggatgtgattcttgggatgaattggttggctcaattccaaggagtagtggattgcgcgcggcgcactgtcactctgtaccgagggccagaacaaccggttgttttctttgcacctccaacctctgtcagaagttcagaactgcatcagataggtctgtcagaaatccccatagtcagagagttcggagacgtgtttccggaagaactacctggtatgccgcccaagcgagagattgagttccggatagatcttgctccaggaaccactcctctgcacaagcgaccctaccgtatggcagcaaatgaactagccgaagtaaagaaacagttggaagagttgaaagaaaaggggtacatacgtccgagtacttccccatggggtgctcctgtgatttttgtagagaagaaagacaagacgaagaggatgtgcgttgactacagagctctcaatgaagtcaccatcaaaaacaagtaccctcttccccggatcgatgatctgttcgatcagcttaaaggtgccactgtattctccaagattgatctccgttccggatatcaccaattacgtattcgtgaagaagatattccgaagaccgcattcactacgcgatatggactgtatgaattcacggtgatgtcgttcggcttgaccaatgctcctgccttcttcatgaacttgatgaacaaagtgttcatggaatacttggacaagtttgttgtggttttcatcgatgacattctgatatactcacaatcagaggaagaccatcagcaccatctccgtctggtgttgggaaagttgcgggaacatcaattgtatgccaagcttagcaagtgtgagttctggttgtccgaagtcaaattcttagggcacgtgatatctgctaaaggagttgctgtggatcccgaaacagtgaccgccgtcaccgattggaagcaacccaagacggtcactcagattcgcagtttcttgggtttggcaggatactaccggaggttcatcgagaacttctccaaaatcgctcgacccatgacacagttgttgaagaaagaagagaagtttgtgtggagcccgcaatgcgagaaggcgtttcaaactctcaaggaaaagctggtttcctcgccagtgttaatcttgccgaatactcgcaaggacttcatggtgtattgtgacgcttcgcgccaaggattggggtgcgtgctcatgcaggacggtcatgtggtagcctatgcttcacgtcagctacgacctcatgaaggcaactaccctacgcatgacttggagttagcagcggtggttcatgctctaaaaatctggcggcactatctcattgggaatcgctgtgaaatctataccgaccataagagcttgaaatacatcttcacccagtcggatctgaatcttcggcaaaggagatggttagaactcatcaaggattatgatgtgggaatacactatcatcctggtaaggccaacgtggttgccgacgctctaagtcggaagagccactgcaacactctcaacgtccgaggcattccacccgagcttaatcaacagatggaagccctgaacctaagcatagttggtcgcggattcttggctgcgttggaagccaagcctaccttgctcgatcaaatccgcgaggctcagaagaatgatccggacatgcatggactcctcaagaatatgaaacagggtaaagccgcaggtttcacagaggatgaacacggaaccttatggaacggaaagcgggtatgcgttccagatagcagagaacttaaacagctgatactccaggaagctcacgaaagtccttattccattcacccgggcagtaccaagatgtacttagacttgaaggagaaatactggtgggttagcatgaagcgggaaattgcagagtttgtggctctatgtgatgtgtgccagcgtgtcaaggcagaacaccaacgaccggccggacttctccaacctctccaagtgccggaatggaaatgggatgaaattgggatggatttcatcaccggccttccaaaaacccaaggtggatatgattctatatgggtaatagtggatcgattaaccaaggtagctcgattcattcctgtgaagaccacctatggggggaataaactagcggagctctacttcgctaggatcgtgagtctccatggtattcccaagaaaatcgtatctgataggggaagccaattcacctctcacttttggaagaagctccaagaagagctgggtactcgattgaatttcagcaccgcctatcacccgcagacagatggacagaccgagcgtctaaatcagattctagaagatatgcttcgcgcatgtgtcctagacttcgggaagacttgggataagagtctcccctatgccgagttctcctacaataacagctatcaagccagcatacaaatggcaccctatgaagcgttgtatgggcgcaaatgccggacaccgctattgtgggaccaagttggagaaagccaagtgttcgggactgatatcctgagagaagctgaagctaaagtcagaatcattcgggataatctaaaggtggcacagtctcggcagaaaagttatgcagataaccgtcgccgtgatctggaattcgcagtggatgactttgtgtatcttcgggtcacgccattgcgaggtgtgcacaggtttcagacaaaagggaagctcgcacctcggtatgtgggtcccttccgtatcattgctcgacgcggagaagtcgcctaccagctggagttgcccgcctccttgggtaacgtgcatgatgtgttccatgtgtcgcaactcaagaaatgtcttcgagtgccatccgagcaggccgactcagagcaaattgaagttcgcgaagacttgacctatgtggagaggccagtgaaaatcctggacaccatggagcgcaggaccaggaaccgagtaatccgtttttgcaaggtccagtggagcaaccacgccgaagaagaagccacttgggagcgtgaagacgagctgaaggcagcccatcccggtctcttcgctagttcttccgaatctcggggtcgagattccgtttaa

SEQ ID NO: 14273 - DNA, 5019 bp, Oryza sativa
  Clone ID: TFbOSC900144j.C1.o3.fg
atgtcatggcacagggccggtgtcctgctgctaggggctcagtcctgcctgcctgtcccgggggttccggccgtaggtgggattgagtcggtactcttgtctatggctaggatgggttggaaactatgtcacgtcttccgtctgtacaccgtggtgatggccggcagcgtcagccgtcgtggtctggacatgactggtttcgtcttggagctgcggggcatgtgcgttgtcctggggtatccacatggagtggactaccagggcaggccgcttccggagcaggagggtgacgatgcagagccccacgctgcttgggaggttactgcagtgatcctcactggctctcccgagcggacttcgttggcagtcaccgcgggtggagattctttccccgccgcttgccagaacgccgctctcctcgccatcggcactcttcaccagcgctacccggacgagttgcagcactcgccctaccgctaccaccctcgccgcggaggagcccgcgactacgccatcttccgggatgctagctcggaggatgacgctaccatcatgcacctggcgcgcatggtggaggcgtacgacgcggctcgtatcgacttccatcagatggtgcgccgtgggatggtcgggaacaacatgaagatcctggagctgcgtcaggagaatctgcagctgaagaaggacctagacgcagtagaggcgcagctgcatcagctcaagatcgcccagggagagatggtgaagaccaggagaaatgctgccaccggtgatggcaaccaacccgaaggcagcaaccacaaccaccagggcagcccacctccacctcctcctccgcctccaccaccaccaccagacaccaacgccattctcacccaaatcctcgcccagcaggccaacatgatgactgctttcctccaccacctccaaaatccgccacaacagaatgcaccaccaccacccccacaacactctaaactcgccgagttcctccgcatccgtccacctaccttctctagctccaacaaccccgtggatgcgttggattggttgcatgccgtggggaaaaagctagacactgtgcagtgcagcgatgaggagaaagtcatcttcgccgcccaccagctgcaggggcccgcatctttatggacccatgtgcccgccggagtcgtggcccttaagaaaagggaattccgagagttgaagcaaggcaaccgctctgtgatggagtatttgcatgagttgaacaacctggcccggtacgccccggaggatgtacgggaagatgaggaaaagcaggagaagttcttggcaggaatggaccctgagctgtccgtgcgcctagtctccggggactatccggatttccaacgtctgatggacaagagcatccgcttggaagccaagcacaaggaactggagtcgcacaagcgccgcttggcgaatttccgcaatcaacagggtgctaaccaaagggtccgctacaccaatccctatccagggggatcctcctcgcagcagcaacaacagcagcagcaacctcgctccgcgccccgacctcaattcgtgcctggtcaaggccgcagggacgctcaaggtccgcagcgtctgtgcttcaactgcttcgagcccgggcactttgcggataaatgcccaaagccgaggcgccagcaaggccaagcgcctccccgctccaacaacggtggtaaggatgtcattcggggtcgtgtgaaccacgtgacggccgaggacgtgctgacaactccagacgtcatcgttggtacgttcctcattcattccatccctgctaccattttgttcgactctggagcttcccactcgtttatatctgtgccattcgtggggagaaaacagttgggggtagaaaggcttaggaaccctctgctcatcaccacccctggaggggttatgacagcaaagtattatagccctgccgtccctatagaaattcaggggattccttttccctcggatctgattcttctagacaccaagaacttggatgtgatccttaggatgaattggttggctcaattccaaggagtagtggattgcgcgagacgcactgtcactctgtaccgagggccggaacaaccggttgttttctttgcacccccaacctctgtcagtagttcagaacttcatcagataggactgtcagaaatccccatcgtcagagagttcggagacgtgtttccggaagaactacccggtatgccgcccaagcgagagattgagttccggatagatcttgctccaggaaccactcctttgtacaagcgaccctaccgtatggcagcaaatgaactggccgaaaagaaagacaagatgaagaggatgtgcgttgactacagagctctcaatgaagtcaccatcaaaaacaagtaccctcttccccgtatcgatgatatgttcgatcagcttaaaggtgccactgtattctccaagattgatcttcgttccggatatcaccaattacgtattcgtgaagaagacattcctaagaccgcattcaccacgcgatacggactgtatgaattcacagtgatgtcgttcggtttaaccaatgcacctgccttcttcatgaacttaatgaacaaagtgttcatggaatacttggataagtttgtggtggttttcattgatgacattctgatatactcacaatccgaggaagaccatcagcaccatctccgtctggtgttgggaaagttgcgggaacatcaattgtatgccaaacttagcaagtgtgagttctggttgtccgaagtcaaattcttaggacacgtgatatctgctaaaggagttgcggtggaccccgaaacagtgaccgccgtcactgattggaagcaacccaagacagtcactcaagttcgcagtttcttaggtttggcaggatactaccggaggtttatcgagaacttctccaaaatcgctcgacccatgacacagttgttgaagaaagaagagaaatttgtgtggagcccgcaatgcgagaaggcgttccaaactctcaaagaaaagctggtttcctcgccggtgttaatcttgccggatactcgcaaggacttcatggtgtattgtgacgcttcgcgccaaggattggggtgcgtgctcatgcaggacggtcatgtggtggcctatgcctcacgccagctacggcctcatgaaggcaactaccctacccatgatctggaattagccgcggtggttcatgctctaaaaatctggcggcactatctcattgggaatcgctgtgaaatatatactgatcataagagtttgaaatacatcttcacccagtcggatctgaatcttcggcagaggagatggttagaactcatcaaggattatgacgtgggaattcactatcatcctggtaaggccaacgtggttgccgacgctctaagtcgaaaaagccattgcaacactcttgacgtccgtggcattccacccgaacttaaccaacagatggaagccctgaacctaagcatagttggtcgtggattcttggctacgctggaagccaagcccaccttgctcgatcaaatccgcgaggctcagaagaacgacccggacatgcgtggactcctcaagaatatgaaacagggtaaagccgctggtttcacagaggatgaacacggaaccctatggaacggaaatcgggtatgcgttccagatgacagagaacttaaacagctgatacttcaggaagctcacgaaagtccttattccatccaccctggcagtacgaagatgtacttagacttgaaggagaaatactggtgggttagtatgaagcgggaaattgcagagttcgtggccctttgtgatgtgtgccagcgtgtcaaggcagagcaccaacgaccggccggacttctccaacctctccaagtaccagaatggaaatgggatgaaattgggatggatttcatcaccggacttccaaaaacccaaggtggatatgattctatatgggtagttgtggatcgattaaccaaggtagctcggtttattcctgtgaagaccacctatggagggaacaaactagccgagctttacttcgctaggatcgtgagtctccatggcgttcccaagaaaatcgtatctgataggggaagccaattcacctctcacttttggaagaagctccaagaagagttgggtacccgattaaatttcagcaccgcgtatcacccgcagacagatggacagaccgagcgtctaaatcagatcctagaagatatgcttcgcgcatgtgtcctagatttcgggaagacctgggataagagtctcccctatgccgagttctcctacaataacagctaccaacccagtatacaaatggcaccttatgaagcgttgtatgggcgcaaatgccggacaccgctattgtgggaccgagttggggaaagccaagtgttcgggactgatatcctgagagaagctgaagcgaaggtcagaaccattcgggataatctaaaggtggcacagtcccggcagaaaagttatgcagataaccgtcgccgtaacctggaattcgcagtggacgattttgtgtaccttcgggtcacgccattgcggggtgtgcacaggtttcagacaaaggggaagctcgcacctcggtatgtgggtcctttccgtatcattgctcggtgcggagaagtcgcttaccagttggagctgcccgcctccttgggcaacgtgcacgatgtgttccatgtgtcgcaactcaagaaatgtcttcgagtgccatccgagcaggccgactcagagcaaattgaagttcgcgaagacttgacctacgtggagaggccagtgaaaatcctggacacaatggaacgcaggaccaggaaccgggtaatccatttttgcaaggtccagtggagcaaccacgccgaggaagaagctacttgggagcgtgaagacgagctgaaggcagcccatcccgatctcttcgctagttcttccgaatctcggggtcgagattccgtttaa

SEQ ID NO: 14274 - DNA, 5412 bp, Oryza sativa
  Clone ID: TFbOSC900175j.C1.o10.fg
atgggttggaaactatgtcacgtcttccgcccgtataccgtggtgatggccggcagcgtcacccgtcgtggtttgagcatgactggcttcgtcttggagctgcggggcatgtgcgtggtcttggggtatccacatggagtggattaccaggccaggccgctcccggagcaggagggtgaggatgcagagcctcacgctggttgggaggtcactgcagtgatcctctccggctctcccgagcggacttcgctggcagtcaccgcgggtggagattccttccccgccgcttgccagaacgccgctctcctcgccatcggcacccttcaccagcgctacccggacgagttgcagcactcgccctaccgctaccaccctcgtcgcggaggagcccgcgactacgccaccttccgagacgccagctcggaggatgacgccaccgtcgtgcacctggcacgcatggtggaggcgtacgacgcggctcgtatcgacttccatcagatggtgcgccgtggcatggtggagaacaacctgaagatcctggagctgcgtcaggagaatctgcagctcaagaaggacctcgacgcgttggaggcgcagctgcatcagctcaagatcgcccagggagaggacagccgccccaagcgtcgccgcgtctgccgcagccagaagatcaccgcccgcaagagcacctccaggcccgagcttgttcgtcagtccctggcgtggacctgcttcgtcgagacccctcgtgccgagcctgcgcccgtggttccccaggagggggaagcctccggcgttggtagctcggagggtgcgctgttgctcaccttccgtcctggcccgtcgcagcgctctctttctctgtttgctggttctgtgtggggttttcagatggtgacgaccaggagaaatgttaacaccggtgaaggcaaccaacccgaaggcagcaaccacaaccaccaaggcaatccacctccacctccacctccgcctccaccaccaccgccagacaccaacgccattctcacccaaatcctcgcccagcaagccaacatgatgaccgctttcctccaccacctccaaaacccgccacaacagaatgctccaccaccacctccccaacactctaaactcgccgagttcctccgcatccgcccacctaccttctccagctccaacaaccccgtggatgctttggattggttgcatgccgtggggaagaagctagacacggtgcagtgcagtgatgaggagaaagtcgtcttcgccgcccatcagctgcagggacccgcatctctctggtgggaccacttccaggctacgcagccagagggacagccgattacttgggctcgcttcaccgccgctttccggagaacccatgtgcccgctggagtcgtggctcttaagaaaagggaattccgagagttgaagcaaggcaaccgctccgtgatggagtatttgcatgagttcaacaatctggcccggtacgctccgcaggatgtgcgggaagacgaggagaagcaggagaagttcttggcaggaatggaccctgagctgtccgttcgtctagtctctggggactatcctgattttcaacgactggtggacaagagcatccgcttggaagccaagcacaaggagctggaatcgcacaagcgccgcttggcgaatttccgcaatcaacagggtgctaaccagagggtccgctacaccaatccctacccagggggatcctcctcgcagcagcagcagcagcagcagcaacctcgctccgcgcctcgacctcaattcgtggtgcgcatcccacagccgcagcagcagcagaatcagcaagggactcgtgcaccccgtcctcctacgccaactgtgcagcccgttcaaggccgcagggacgctcaaggtcagcagcgtctgtgcttcaactgcttcgagcccgggcactttgcggataaatgcccaaagccaaggcgtcagcaaggccaagcgcctccccgctccaacaacggcgggaaggatgtcattcggggccgtgtgaatcatgtgacggccgaggacgtgctgacaactccagacgtcatcgttggtacgttcctcgttcattccatccctgctactattttgttcgactctggagcttcccactcgtttatatctgtgtcattcgtggggagaaatcagttgggggtagaaaggcttagaaaccctctgctcatcaccacccctggcggggttatgacagcaaagtattatagccctgccgttcctatagaaattcaggggattccttttccctcggatctgattctgctagacaccaagaacttggatgtgattcttgggatgaattggttggcacaattccaaggagtagtggattgcgcgagacgcactgttactctgtaccgagggccagaacaaccggttgttttctttgcacctccaacctctgtcagaagttcagaactgcatcagataggtctgtcagaaatccccatagtcagagagttcggagacgtgtttccggaagaactacctggtatgccgcccaagcgagagattgagttccggatagatcttgctccaggaaccactcctctgcacaagcgaccctaccgtatggcagcaaatgaactggccgaagtaaagaaacagttggaagagttgaaagaaaaggggtacatccgtccgagtacttccccatggggtgctcctatgatttttgtagagaagaaagacaagacgaagaggatgtgcgtcgactacagagctctcaatgaagtcaccatcaaaaacaagtaccctcttccccggatcgatgatctgttcgatcagcttaaaggtgccactgtattctccaagattgatcttcgttccggatatcaccaattacgtattcgggaagaagatattccgaagaccgcattcaccacgcgatacgggctgtatgaattcacggtgatgtcgttcggcttgaccaatgctcctgccttcttcatgaacttaatgaacaaagtgttcatggaatacttggacaagtttgttgtggttttcatcgatgacattctgatatactcacaatcagaggaagaccatcagcaccatctccgtctggtgttgggaaagttgcgggaacatcaattgtatgccaagcttagcaagtgtgagttctggttgtccgaagtcaaattcttaggacacgtgatatctgctaaaggagttgctgtggaccccgaaacagtgaccgccgtcactgaatggaagcaacccaagacagttactcaagtccgcagtttcttaggtttggcaggatactaccggagattcatcgagaacttctccaaaatcgctcgacccatgacacagttgttgaaaaaagaagagaaatttgtgtggagcccgcaatgcgagaaggcgttccaaactctcaaagaaaagctggtttcctcgccagtgttaatcttgccggatactcgcaaggatttcatggtgtactgtgatgcttcgcgccaaggattggggtgcgtgctcatgcaggacggtcatgtggtagcctatgcctcacgccaactacgacctcatgaaggcaactaccctacacatgacttggagttagcagcggtggttcatgctctaaaaatctggcggcactatctcattgggaaccgctgtgaaatatatactgatcataagagtttgaaatacatcttcactcagtcagatctgaaccttcggcaaaggagatggttagaactcatcaaggattatgatgtgggaattcactatcatcctggtaaggctaacgtggttgccgacgctctaagtcggaagagccattgcaatactcttaacgtccgtagcattccgcccgagcttaatcaacagatggaagccctgaacctaagcatagttggtcgcggattcttggctgcgttggaagccaagcctaccttgctcgatcaaatccgcgaggctcagaagaatgatccggacatgcatggactcctcaagaatatgaaacagggtaaagccgcaggtttcacagaggatgaacacggaactctatggaacggaaagcgggtgtgcgttcccgataacagggaacttaaacagctgatacttcaggaagctcacgaaagtccttattccattcacccgggcagtaccaagatgtacttagacctgaaggagaaatactggtgggttagcatgaagcgggaaattgcagagtttgtggctctatgtgatgtgtgccagcgtgtcaaggcagaacaccaacgaccggccggacttctccaacctctccaagtgccagaatggaagtgggatgaaattgggatggatttcatcaccggacttccaaaaacccaaggtggatatgattctatatgggtaattgtggatcgactaacaaaggtagctcgatttattcctgtgaagaccacttacggagggaacaaactagcggagctctacttcgctaggatcgtgagtctccatggtattcccaagaaaatcgtatctgataggggaagccaattcacctctcacttttggaagaagctccaagaagagctgggtactcgattgaatttcagcaccgcctatcacccgcagacagatggacagaccgagcgtctaaatcagatcctagaagatatgctccgcgcatgtgtcctagatttcgggaagacttgggataagagtctcccctatgccgagttctcctacaataacagctaccaagccagcatacaaatggcaccctatgaagcgttgtacgggcgcaaatgccggacaccgctattgtgggaccaagttggagaaagccaagtgttcgggactgatatcctgagagaagctgaagctaaagtcagaatcattcgggataatctaaaggtggcacagtctcggcagaaaagttatgcagataaccgtcgccgtgatctggaattcgcagtggatgactttgtgtatcttcgggtcacgccattgcgaggtgtgcacaggtttcagacaaaagggaagctcgcacctcggtatgtgggtcccttccgtatcatcgctcgacgcggagaagttgcttaccagctggagttgcccgcctccttgggcaacgtgcatgatgtgttccatgtgtcgcaactcaagaaatgtcttcgagtgccatccgagcaggccgactcagagcaaattgaaattcgcgaagacttgacctatgtggagaggccagtgaaaatcctggacaccatggagcgcaggaccaggaaccgagtaatccgtttttgcaaggtccagtggagcaaccacgccgaagaagaagctacttgggagcgtgaagacgagctgaaggcagcccatcccgatctcttcgccagttcttccgaatctcggggtcgagattccgtttaa

SEQ ID NO: 14275 - DNA, 5361 bp, Oryza sativa
  Clone ID: TFbOSC900176j.C1.o13.fg
atggatgaagtcgggggtcgatggacattctccagggcaaatgaaggctacacgagctgcggcccgatggccggcagcgtcacccgtcgtggtttggacatgactggcttcgtcctggagctgcggggcatgtgcgtggtcttggggtatccacatggagtggattaccaggccaggccgctcccggagcaggagggtgaggatgcagagcctcacgctgggtgggaggtcactgcagtgatcctctctggctctcccgagcggacttcgctggcagtcaccgcgggtggggattcttctcccgccgcttgccagaacgccgctctcctcgccatcggcaccctccaccagcgctacccggacgagttgcagcactcgccctatcgctaccaccctcgtcgcggaggagcccgcgacttcgccaccttccgagatgctagcttggaggatgacgctaccgtcgtgcatctggcacgcatggtggaggcatacgacgcggctcgtatcgacttccatcagatggtgcgtcgcgggatggttgagaacaacctgaagatcctggagctgcgtcaggagaacctgcagctcaagaaggacctcgacgcattggaggcgcagctgcaccagctcaagatcgcccagggagaggacagccgccccaagcgtcgccgcgtctgccgcagccagaagatcaccgcccggaagagcacctccaggcccgagcttgttcgtcagtccctggcgtggacttgcttcgtcgagacccctcgtgccgagcctgcgcccgtggttccccaggagggggaagcctccggcgttggtagcacggaggatgcgctgttgctcaccttccgccctggcccgtcgcagcggagaaatgttagcaccggtgaaggcaaccaacccgaaggcagcaaccccaacccccaaggcaatccacctccaccaccaccaccagacaccaacgccattctcacccaaatcctcgcccagcaagccaacatgatgaccgctttcctccaccacctccaaaatccgccacaacagaatgctccaccaccacctccacaacactctaagctcgccgagttcctccgcatccgcccacccaccttctctagctccaacaatcccgtggatgcgttggattggttgcatgccgtggggaagaagctggacactgtgcagtgcagtgatgaagagaaagtcatcttcgccgcccatcagctgcaggggcccgcatctctatggtgggaccatttccaggctacgcagccagaggggcaaccgattacttgggcccgcttcaccgccgctttccggagaacccatgtgcccgccggagtcgtggctcttaagaagagggagttccgggagttgaagcaaggcaaccgctccgtgatggagtatttgcacgagttcaacagtctggcccggtacgctccggaggatgtgcgggaagatgaggagaagcaagagaagttcttggcgggaatggaccctgagctgtccgttcgcctagtctctggggactatccggacttccaacgtctggtggacaagagcatccgcttggaggccaagcacaaggagctggagacgcacaagcgccgcttggcgaacttccgcaatcagcagggcgctaaccagagggtccgctacaccaatccctatccagggggatcctcctcgcagcagcaacaacagcagcagcaacctcgctccgcgcctcgacctcaattcgtggtgcgcgtcccacagccgcagcagcagcagagtcagcaagggactcgtgtagcccgtcctcctacgccagttgtgcagcccgttcaaggccgcagggacgctcaaggtcagcagcgtttgtgcttcaactgcttcgagcccgggcactttgcggataaatgcccaaagccaaggcgtcagcaaggccaagcgcctccccgctccaacaacggtggcaaggacgtcattcggggtcgtgtgaaccacgtgacggccgaggacgtgctgacaactccagacgtcatcgttggtacgttcctcgttcattccatcccagctactattttgttcgactctggagcttcccactcgtttatatctgtgccattcgtggggaaaaatcagttgggggtagaaaggcttaggaaccctctactcatcaccacccctggaggggttatgacagcaaagtactatagccctgccgttcctatagaaattcaagggattccttttccctcggatctgattctgctagacaccaagaatttggatgtgattcttgggatgaattggttggctcaattccagggagtagtggattgcgcgagacgcactgtcactctgtaccgaggaccggaacaaccggttgttttctttgcacccccaacctctgtcagaagttcaaaactgcatcaaatagaactatcagaaatccccattgtcagagagttcggagatgtgtttccggaagaactacctggtatgccgcctaagcgagagattgagttccggatagatcttgctcctggaaccactcctctgcacaagcgaccctaccgtatggcagcaaatgaactggccgaagttaagaaacagttggaagagttgaaagaaaaggggtacatacgtccgagtacttccccttggggtgctcctgtgatctttgtggagaagaaagacaagacgaagaggatgtgcgttgactaccgagctctcaatgaggtcaccatcaaaaacaagtaccctcttccccggatcgatgatctgttcgaccagcttaaaggtgccactgtattctccaagattgaccttcgttccggatatcaccaattacgtattcgtgaagaagatattccgaagaccgcattcaccacgcgatatgggctgtatgaattcacggtgatgtcgttcggtctaaccaatgcacctgcattcttcatgaacttgatgaacaaagtgttcatggaatacttggacaagtttgttgtggttttcattgatgacatcctgatatactcacagtcagaagaagaccatcagcaccatctccgtctggtgttgggaaagctgcgggaacatcaattatatgccaagcttagcaagtgtgagttctggttgtccgaagtaaaattcttggggcacgtgatatctgctaaaggagttgccgtggaccccgaaacagtgaccgccgtcactgaatggaagcaacccaagacagtcactcaaattcgcagtttcctgggtttggcaggatattaccggagattcatcgagaacttctccaaaatcgctcgacccatgacacagttgttgaagaaagaagagaaatttgtgtggagcccgcaatgcgagaaggcattccaaactctcaaagaaaagctggtctcctcgccagtgttaatcctgccagatactcgcaaggatttcatggtgtactgtgatgcttcgcgccaaggattggggtgcgtactcatgcaggacggtcatgtggtagcctatgcctcacgccagctacgacctcatgaaggcaactaccctacacatgacttggaattagcagcggtggttcatgctctaaaaatctggcggcactatctcattgggaatcgctgtgaaatatatacagatcataagagtctgaaatacatcttcacccagtcggatctgaaccttcggcaaaggagatggttagaactcatcaaggattacgatgtgggaattcactatcatcctggtaaggccaacgtggtcgccgacgctctaagtcgaaaaagccattgcaacactctcaacgtccgtggcattccacccgagcttaaccaacagatggaagccctgaacctaagcatagttggtcgtgggttcttggccgcgttggaagccaagcctaccttgctcgaccaaatccgcgaggctcagaagaatgatccggacatgcatggactcctcaagaatatgagacagggtaaagccgctggtttcacggaggatgaacacggaaccctatggaacggaaagcgggtatgcgttccagatagcagagaacttaaacagttgatacttcaggaagctcacgaaagtccttattccattcacccgggcagtacgaagatgtacctagacttgaaggagaaatactggtgggttagcatgaagcgggaaattgcagagttcgtggctctatgtgatgtgtgccagcgtgtcaaggcagaacaccaacgaccggccggacttctccaacctctccaagtaccagaatggaaatgggatgaaattgggatggatttcatcaccggacttccaaaaacccaaggtggatatgattctatatgggtaattgtggatcgactaacaaaggtagctcgatttattcctgtgaagaccacctatggagggaacaaactagcggaactctacttcgctaggatcgtgagtctccatggtatccccaagaaaatcgtatctgataggggaagccaattcacctctcacttttggaagaagctccaagaagagctgggtacccgtttaaatttcagcaccgcctatcacccgcagacagatggacagaccgagcgtctaaatcagatcctagaagatatgcttcgcgcgtgtgtcctagattttgggaagacttgggataagagtctcccctatgccgagttctcctacaacaacagctatcaagccagcatacaaatggcaccttatgaagcgttgtacgggcgcaaatgccggacaccgctattgtgggaccaagtcggagaaagccaagtgttcggaactgatatcctgagggaagctgaagctaaagtcagaatcattcgggataatctaaaggtggcacagtcccggcagaaaagttatgcagataaccgacgccgtgacctggaattcgcagtggacgattttgtgtaccttcgggtcacgccattgcgaggggtacacaggtttcagacaaaagggaagctcgcacctcggtatgtgggtcccttccgtatcatcgctcgacgcggagaagtcgcttatcagctagagttgcccgcctccttgggtaacgtgcacgatgtgttccatgtgtcgcaactcaagagatgtcttcgagtgccatccgagcaggccgactcagagcaaattgaagttcgcgaagatttgacctacgtggagaggccagtgaaaatcctggacaccagggagcgcaggaccaggaaccgggtaatccgtttttgcaaggtccagtggagcaaccatgccgaagaagaagctacttgggagcgtgaagacgagctgaaggcagcccatcccgacctcttcgccagttcttccgaatctcggggtcgagattccgtttaa

SEQ ID NO: 14276 - DNA, 5409 bp, Oryza sativa
  Clone ID: TFbOSC900179j.C1.o13.fg
atggatgaagtcgggcgtcgatggacattctccagggcaaatgaaggctacacgagctgcggcccgatggccggcagcgttacccgtcgtggtttggacatgaccggcttcgtcttggagctgcgaggcatgtgcgtggtcttgggatatccacatggagtggattaccaggccaggccgctcccggagcaggagggtgaggatgcagagcctcacgctggatgggaggtcactgcagtgatcctctccggctctcccgagcggacttcgctggcagtcaccgcgggcggagactccttccccgccgcttgccagaacgccgctctcctcgccatcggcactcttcaccagcgctacccggacgagttgcagcactcgccctaccgctaccaccctcgtcgcggaggagcccgcgaccacgccaccttccgagacgccagctcggaggatgacgctaccgtcgtgcacctggcacgcatggtggaggcgtacgacgcggctcgtatcgacttccatcagatggtgcgtcgtggcatggtggagaacaacatgaagatcctggagctgcgtcaggagaatctgcagctcaagaaggacctcgatgcgttggaggcgcagctgcatcagctcaagatcgcccagggagagggcagccgccccaagcgtcgccgcgtctgccgcagccagaagatcaccgcccgcaagagcacctccaggcctgagcttgtccgtcagtccttggcgtggacttgcttcgtcgagacccctcgtgccgagcctgcgcccgtggttccccaggagggggaagcctccggcgttggtagctcggagggtgcgctgttgctcaccttccgtcctggcccgtcgcagcgctctccttctctgtttgctggttctgtgtggggttttcagatggtgacgaccaggagaaatgttaacaccggtgaaggcaaccaacccgagggcagcaaccccaacccccaaggcaacccacctccaccaccaccaccagacaccaacgccattctcacccaaatcctcgcccaacaagccaacatgatgaatgctttcctccaccacctccaaaacccgccacaacagaatgctccaccaccacctccccaacactctaaactcgccgagttcctccgcatccgcccacctaccttctctagctccaacaaccctgtggatgctttggattggttgcatgccgtggggaagaagttagacacggtgcagtgcagcgacgaagagaaagtcgtcttcgccgcccatcagctgcagggacccgcgtctctctggtgggaccacttccaagctacgcagcccgaggggcaaccgattacttggactcgcttcaccgccgctttccggagaacccatgtgcccgccggagtcgtggccctcaagaaaagagaattccgggagctgaagcaaggcaaccgctccgtgatggagtatttgcatgagttcaacaatctagcccgttacgccccagaggatgtgcgggaagatgaggagaagcaggagaagttcttggcaggaatggaccctgagctgtctgttcgtctagtctctggagactatccggatttccaacgactggtggacaagagcatccgcttggaggccaagcacaaggaactggaatcgcacaagcgccgcctggcgaatttccgcaatcaacagggtgctaaccagagggtccgctacaccaatccctacccagggggatcctcctcgcagcagcagcagcagcaacctcgcccagcgccccgacctcaattcgtggtgcgcgtcccacagcagcaacagcagcagaatcaacaagggactcgtgcaccccgtcctcctacgccagcggtgcagcccgttcaaggccgcagggacgcttcaggtccgcagcggctgtgcttcaactgcttcgagcccgggcactttgcggataaatgcccgaagccaaggcgtcagcaaggccaagcgcctccccgctccaacaacggcgggaaggatgtcattcggggtcgtgtgaatcacgtgacggccgaggacgtgctgacaactccagacgtcatcgttggtacgttcctcgttcattccatccctgctacaattttgttcgactctggagcttcccactcgtttatatctgtgccattcgtggggaaaaatcagttgggggtagaaaggcttagaaaccctctgctcatcaccacccctggcggggttatgacagcaaagtattatagccctgccgtccctatagaaattcaggggattccttttccttcggacctgattcttctagacacaaagaacttggatgtgattcttgggatgaattggttggcacaattccaaggagtagtggactgcgcgagacgcactgttactctgtaccgagggccagaacaaccagttgttttctttgcacctccaacctctgtcagaagttcagaactgcatcagataagtctgtcagaaatccccatagtcagagagttcggagacgtgtttccggaagaactacctggtatgccgcccaagcgagagattgagttccggatagatcttgctccaggaaccactcctctgcacaagcgaccctaccgtatggcagcaaatgaactggccgaagtaaagaaacagttggaagagttgaaagaaaaggggtatatacgtccgagtacttccccatggggtgctcctgtgatttttgtagaaaagaaagacaagacgaagaggatgtgcgtcgactacagagctctcaatgaggtcaccatcaaaaacaagtaccctcttccccggatcgatgatctgttcgatcagcttaaaggtgccactgtattctccaagattgatcttcgttccggatatcaccaattacgtattcgtgaagaagatattccgaagaccgcattcactacgcgatatggactgtatgaattcacggtgatgtcgttcggcttaaccaatgctcctgccttcttcatgaacttgatgaacaaagtgttcatggaatacttggataagttcgttgtggttttcattgatgacattctgatatactcacaaacagaggaagaccatcagcaccatctccgtctggtgttgggaaagttgcgggaacatcaattgtatgccaagcttagcaagtgtgagttctggttgtccgaagtcaaattcttggggcacgtgatatctgctaaaggagttgctgtggaccccgaaacagtgaccgccgtcaccgaatggaagcaacccaagacagttactcagattcgcagtttcttgggtttggcaggatactatcggagattcatcgagaacttctccaaaatcgctcgacccatgacacagttgttgaagaaagaagagaagtttgtgtggagcccgcaatgcgagaaggcgttccaaactctcaaagaaaagctggtttcctcgcccgtgttaatcttgccggatactcgcaaggatttcatggtgtactgtgatgcttcgcgccaaggattggggtgcgtgctcatgcaggacggtcatgtggtagcctatgcctcacgccagctacgtcctcatgaaggcaactaccctacacatgacttggagttagcagcggtggttcatgctctaaaaatctggcggcactatctcattgggaaccgctgtgaaatatatactgatcataagagtttgaaatacatcttcacccagtcggatctgaatcttcggcaaaggagatggttagaactcatcaaggattatgatgtgggaattcactatcaccctggtaaggccaatgtggttgccgacgctctaagtcgaaagagccactgcaacactctcaatgtccgaggcattccacccgagcttaatcaacagatggaagccctgaacctaagcatagttggtcgcggatttttggccgcgttggaagccaagcccaccttgctcgatcaaatccgcgaggctcagaagaatgatccggacatgcatggactcctcaagaatatgaaacagggtaaagccgctggtttcacagaggatgaacacggaaccttatggaacggaaagcgggtatgcgttccagaaagcagagagcttaaacagctgatacttcaggaagctcatgaaagtccttattccattcacccgggtagtacaaagatgtacttagacttgaaggagaaatactggtgggttagcatgaagcgggaaattgcagagtttgtggctctatgtgatgtgtgccagcgtgtcaaggcagagcaccagcgaccggctggacttctccagcctctccaagtgccggaatggaaatgggatgaaattgggatggatttcatcaccggccttccaaaaacccaaggtggatatgattctatatgggtagtcgtggatcgattaaccaaggtagctcgattcattcctgtgaagaccacttatggagggaacaaactagcggagctctacttcgctaggatcgtgagtctccatggtattcccaagaaaatcgtatctgataggggaagccaattcacctctcacttttggaagaagctccaagaagagctgggtactcgattgaattttagcaccgcctatcacccgcagacagatggacagaccgagcgtctaaatcagatcctagaagatctgctccgcgcatgtgtactagatttcgggaagacttgggataagagtctcccctatgccgagttctcctacaataacagctatcaagccagcatacaaatggcaccttatgaagcgttgtacgggcgcaaatgccgaacaccgctattgtgggaccaagttggagaaagccaagtgttcgggactgatatcctgagagaagctgaagctaaagtcagaatcattcgggataatctaaaggtggcacagtctcggcagaaaagttatgcagataaccgtcgccgtgatctggaattcgcagtggatgattttgtgtaccttcgggtcacgccattgcgaggtgtgcacaggtttcagacaaaagggaagctcgcacctcggtatgtgggtcccttccgtatcatcgctcgacgtggagaagttgcttaccagctggagctgcccgcctccttgggtaacgtgcatgatgtgttccatgtgtcgcaactcaagaaatgtcttcgagtgccatccgagcaggccgactcagagcaaattgaagttcgcgaagacttgacctacgtggagaggccagtgaaaatcctggacaccatggagcgcaggaccaggaaccgggtaatccgtttttgcaaggtccagtggagcaaccacgccgaagaagaagctacttgggagcgcgaagacgagctgaaggcagcccatcccgatctcttcgccagttcttccgaatctcggggtcgagattccgtttaa

SEQ ID NO: 14277 - DNA, 6729 bp, Oryza sativa
  Clone ID: TFbOSC900186j.C1.o18.gm
atggccgagcaagcaaaggtgcacgacctctctccgagtgtgagcggcgacgacggggagccgaacccacgccgtcgagctcgtactcccccacctccactccaaagtcctaagcagggggaggcgctcgagagagttgataaatccgcagcatcaccgattgcgggtgatgcaggggaacggcgagatggggagcgtcgcctcctcgtctacggcgacggcagcacgcctcagggcgcgcttcaggctgctggcgcgctcctacgtcacccgcccgtcgtccatgaccctgagtctccagctcagcgatggctggacgacgtggccaacttggtcatgatggcccagcagcgcctgggtgctggtggacggtccgccactaccaagacctccggcgccgccaccaccggttccgtgtcatcaaggcggagggcgcggcgagcggcggcggctgcacggcattcggctgccactccctcgtcgacaccttcgactcgggaggatcagcatggggagccggatgcccgcctcaacatcgagcgccggcgtaatagccggcgtactccccgtgcaacggagggcgcctcctcgtccagagtgtcacctcgacatggacgtgaggaccagccctccgtgcccccggttggtggtgttggctgtagagcctttgtggcgagtcttcggaatgtccgttggcccccaaggttccggcccaccatcaccgagaagtatgatgggagcgtcaaccccaccgagtttctccagatctatacgaccgggatcgaggccgctgggggagacgacagggtcatggctaatttctttcccatggccctgaagggacaggcgcggggttggctaatgaacctgccacccgcgtcgcggttttgccaagtccgcaatactataccatgcatccctgcacacgcggtgatctacgcgttcagggggggcgtgcggcacaaccgcatgctcgaaaagatcgcttccaaagagccccagactaccgcggagctttttcagctcgcggaccgagtggctcgcaaggaggaggcctggacctggaacccctccggttccggtgtggcagcttcggccgcccccggatccgccgctcagacagggcggcgtgacaggaggaggaagaaaaggtcggcccattccggcgacgagggtcacgtcctcgccgtcgagggcgctccgcgggccacccgaaaggggaggcctgcgagcgacaaaaagaaagaggctggtactcccagcagggagcgcccggccagcaagtggtgctccgtccacaacacctccctccacgatctcgcggactgtcgcgcagtcaaaaatttggctgagcgaacgaggaagtgggaggaggacaggaggcaggaacgccgtgagggcaagtctgcggcagttccctccggtaaacggcgaagtgaggccagacagaaggcccccgccgttggcatcgatgatggtgatgatgacctaggtttccaagaacctggggccaccattgccactgtcgacgggggagcgtgtgctcacgtttctcgccggagtttcaaggccatgaggcgagagcttctcgccgcggcccctactcatgaggcgacgcgtcgggcgcggtggtcggaggtggccctcacctttgaccagaccgaccacccaccgtgcgttgcccggggagggcaggttgcgatggtggtttcccccaccatctgcaatgtgaagttggggcgtgtcctcatagatggaggagcggctctcaacatcctttcccccgcggcctttgatgctatcaaggccccggggatggtgctccagccgtctcaaccgatcattggtgtgacgccggggcacacatggccgttaggtcacatcgacctaccggtcacctttggtggatcagccaacttccgcacggagcgggtgaacttcgatgtggcggaccttagtctgccctacaacgcggttctgggaaggcccgcgttggtgaagtttatggcggcggtccactacgcctacctccagatgaagatgccgggccccagtggccccatctctgtccgtggcgaccttaaagtcgcgctcgcttgcatggagcagcgcgcggaccacctcgctgctgcgaccaagcccgagggtggtgacgagaggctcggcacctccgcccccaccgccccgaggcagcggattgccacatgcgacgaggtcccggaagacgcgctcgtctccttcctgcgggcaaacgctgacgtcttcgcatggagaccagcggacatgcccggggtccccagggaggtgattgagcaccgtctcgctgtgcggccgggcgcaaggccggtccggcagaaagtgcggcggcaggccccggaacgtcaagccttcatccgcgaggaggtggcgaggcttctcgaggccggattcatccgtgaagtcatccatccggagtggctggcgaacccggtggtcgttcccaaggcgaacggcaagcttcggatgtgcatcgactacaccgaccttaacaaggcatgtcctaaggatccttaccccctgcctcgcatagatcagatcgtcgactccactgcggggtgcgaccttttgtgttttctagatgcatactctggttaccatcagattcgcatggctagggaggatgaggaaaaaactgcgttcattacccccgtaggaacctattgttatacatcaatgcccttcgggttaaagaatgcaggtcctacttttcaacgtactactcgaatttctttgggtagccaaataggacgtaatgttgaggcttatgtcgatgacttggttgtaaaaacgcgcaaccaagaaactttacttttagatctagcggaaacttttgagaacctccgctccgcctgcataaagctgaaccccgataagcgggcccgcccgccactctcgctgacgggtggggcccacctgtcatcttcctcctcctgccgcgcccgccgccgcgcccgtgccctagcgccgccgccgccgcggattgcgccgcatcccgccgtccccgcgcgcattaaagagaggggaatcattccccgtgattccctctcccgtttcccccgatttcccctctctctctccctcggattcgttcgaatcgtggccgcattcgtcgccggcgcaatcaatggcggccgagatcttcgcggccggtttccttcctccccggccgcgctctccccctcccgttgctatatattcgttgcccgagctccgctcttccgtttccgccgctcaccgctcgctctcgccgtcggaatcgtgctagcgccgtgctcctctctctccgccgtcgccgtcgaccttcggttcgccgccgccgccgctccggacttcctccttactcggcgacccctccgtccgcttcgccgtgttgtcgccgaccccgtccgccgctccgcttcgcccgccgaccgccggagcaccgtcgccctcgtcatcccgagccgcgccgccgtcttcctccgctccgtccgccgtttcaccgccttcgccgtctcgggggcaaatgaagactacacgagctgcggcccgatggccggcagcattacccgtcgtggtttgagcatgactggcttcgtcttggagttgcggggcatgtgcgtggtcttggggtatccacatggagtggattaccaggccaggccgctcccggagcaggagggtgaggatgcagagcctcacgctggttgggaggtcactgcagtgatcctctccggctctcccgagcggacttcgctggcggtcacagcgggtggggactccttccccgccgcttgccagaacgccgctctcctcgccatcggcactcttcaccagcgctacccggacgagttgcagcactcgccctaccgctaccaccctcgtcgcggaggagcccgcgactacgccaccttccgagacgccagctcggaggatgacgctaccgtcgtgcatctggcacgcatggtggaggcgtacgacgcggctcgtatcgacttccaccagatggtgcgtcgtggcatggtggagaacaacatgaagatcctggagctgcgtcaggagaatctgcagctcaagaaggacctcgacgcgttggaggcgcagcttcaccagctcaagatcgcccagggagaggacagccgtcccaagcgtcgccgcgtctgccgcagccagaagatcaccgcccgcaagagcacctccaggcctgagcttgtccgtcagtccctggcgtggacttgcttcgtcgagacccctcgtgccgagcctgcgcccgtggttccccaggagggggaagcctccggcgttggtagctcggagggtgcgctgttgctcaccttccgtcctggcccgtcgcagcgctctccttctctgtttgctggttctgtgtggggttttcagatggtgacgaccaggagaaatgttagcaccggtgaaggcaaccaacccgagggcagcaaccccaacccccaaggcaacccacctccaccaccaccaccagacaccaacgccattctcacccaaatcctcgcccagcaagccaacatgatgaatgctttcctccaccacctccaaaatccgccacaacagaatgctccaccaccacctccccaacactccaaactcgccgaattcctccgcatccgtccacctaccttctctagctccaacaaccccgtggatgcgttggattggttgcatgccgtggggaagaagttagacacggtgcagtgcagtgatgaggagaaagtcatcttcgccgcccaccagctgcaggggcccgcatctctatggtgggaccatttccaggccacgcagccagaagggcaacctattacttggactcgcttcaccgccgctttccggaaaacccatgtgcccgccggagtcgtggctcttaagaaaagggaatttcgggagttgaagcaaggcaaccgctccgtgatggagtacttgcatgagttcaacaacctggcccgttacgctccggaggatgtgcgggaggatgaggagaagcaagagaagttcttggcaggaatggaccccgagctgtctgttcgtctagtctctggagactacccggacttccaacgtctggtggacaagagcatccgcttggaagccaagcacaaggagctggaatcgcacaagcgccgcttggcgaatttccgcaatcaacagggtgctaaccagagggtccgctacaccaatccctatccagggggatcctcctcgcagcagcagcaacagcagcagcaacctcgcccagcgccccgacctcaatttgtggtgcgcgtcccacagccgcagcagcagcagaatcaacaagggactcgtgcaccccgtcctcctacgccagctgtgcagcccgttcaaggccgcagggacgctcaaggtcagcagcgtctgtgcttcaactgcttcgagcccgggcactttgcggataaatgcccaaagccaaggcgtcagcaaggccaagcgcctccccgctccaacaacggtggcaaggacgtcatccgtggtcgtgtgaatcacgtgacggccgaggacgtgctgacaactcccgacgtcatcgttggtacgttcctcgtccattccatccctgctacaattttgttcgactctggagcttcccactcgtttatatctgtgccattcgtggggagaaatcagttgggggtagaaaggcttagaaaccctctgctcatcaccacccctggcggggttatgacagcaaagtattatagccctgccgttcctatagaaatccaggggattccttttccctcggatctgattctgctagacaccaagaatttggatataggtctgtcagaaatccccatagtcagagagttcggagacgtgtttccggaagaactacctggtatgccgcccaagcgagagattgagttccggatagatcttgctccaggaaccactcctctgtacaagcgaccctaccgtatggcagcaaatgaactggccgaagtaaagaaacagttggaagagttgaaagaaaaggggtacatacgtccgagtacttccccttggggtgctcctgtgatttttgtggagaagaaagataaaacgaagaggatgtgcgttgactacagagctctcaatgaagtcaccatcaaaaacaagtaccctcttccccggatcgatgatctgttcgaccagcttaaagatgccactgtattctccaagattgatcttcgttccggatatcaccaattacgtattcgtgaagaagatattccgaagaccgcattcactacgcgatatggactgtatgaattcacggtgatgtcgttcggcttaaccaatgctcctgccttcttcatgaacttgatgaacaaagtgttcatggaatacttggataagttcgttgtggttttcatcgatgacattctgatatactcacaatcagaggaagaccatcagcaccatctccgtctggtgttgggaaagttgcgggaacatcaattgtatgccaagcttagcaagtgtgagttctggttgtccgaagtcaaattcttggggcacgtgatatctgctaaaggagttgctgtggaccccgagacagtgaccgccgtcaccgattggaagcaacccaagacagcgggcccgcccgccactctcgctgacgggtgggacccacctgtcatccccctcctctcgccgcgcccgccgccaacgcccgtgccctag

SEQ ID NO: 14278 - DNA, 5214 bp, Oryza sativa
  Clone ID: TFbOSC900186j.C1.o7.fg
atggatgaagtcgggcgtcgatggacattctccagggcaaatgaaggctacacgagctgcggcccgatggccggcagcgttacccgtcgtggtttggacatgactggcttcgtcttggagctgcgaggcatgtgcgtggtcttggggtatccacatggagtggattaccaggccaggccgcttccggatcaggagggagacgacgcagagccccacgctgcgtgggaggtcacagcagtgatcctctccggctctcccgagcggacttcgctggcagtcaccgcgggcggagactccttccccgccgcttgccagaacgccgctctcctcgccatcggcacccttcaccagcgctacccggacgagttgcagcactcgccctaccgctaccaccctcgtcgcggaggagcccgcgaccacgccaccttccgagacgccagctcggaggatgacgctaccgtcgtgcatctggcacgcatggtggaggcgtacgacgcggctcgtatcgacttccaccagatggtgcgtcgtggcatggtggagaacaacctgaagatcctggagctgcgtcaggagaacctgcagctcaagaaggacctcgacgcgttggaggcgcagctgcaccagctcaagatcgcccagggagaggacagccgtcccaagcgtcgccgcgtctgccgcagccagaagatcaccgcccgcaagagcacctccaggcccgagcttgttcgtcagtccctggcgtggacctgcttcgtcgagacccctcgtgccgcacctgcgcccgtggttccccaggagggggaagcctccggcatggtgacgaccaggagaaatgttaacaccggtgaaggcaaccaacccgagggcagcaaccccaacccccaaggcaacccacctccaccaccaccaccagacaccaacgccattctcacccaaatcctcgctcagcaagccaacctgatgactgctttcctccaccacctccaaaatccgccacaacagaatgctccaccaccccctccccaacactccaaactcgccgaattcctccgcatccgcccacccaccttctctagctccaacaatcccgtagatgcgttggattggttgcatgccgtggggaagaagctagacacggtgcagtgcagcgacgaagagaaagtcatcttcgccgcccaccagctgcaggggcccgcatctctctggtgggaccacttccaggctacgcagccagaggggcagccgatcacttgggctcgcttcaccgccgctttccggagaacccatgtgcccgccggagtcgtggctctcaagaagagggaattccgagagttgaagcaaggcaaccgctccgtgatggagtatttgcacgagttcaacaacttggcccgttacgcccctgaggatgtgcgggaagatgaggagaagcaagagaagttcttggcaggaatggaccccgagctgtctgttcgtctagtctctggggactatccggattttcaacgactggtggacaagagcatccgcttggaggccaagcacaaggagctggaatcgcacaagcgccgcttggcgaacttccgcaatcagcagggtgctaaccagagggtccgctacaccaatccctatccagggggatcctcctcgcaacagcaacaacagcagcagcaacctcgcccagcgccccgacctcaattcgtggtgcgcgtcccacagccgcagcagcagaatcagcaagggactcgtgcatcccgtcctcctacgccagctgtgcagcccgttcaaggccgcagggacgcttcaggtccgcagcggctgtgcttcaactgcttcgagcccggacactttgcggataaatgcccaaagccaaggcgtcagcaaggccaagcgcctccccgctccaacaacggcgggaaggatgtcattcggggccgtgtgaatcatgtgacggccgaggacgtgctgacaactcccgacgtcaccgttggtacgttcctcgtccattccatccctgctacaattttgttcgactctggagcttcccactcgtttatatctgtgccattcgtggggaaaaatcagttgggggtagaaaggcttagaaaccctctgctcatcaccacccctggaggggttatgacagcaaagtattatagccctgccgtccctatagaaattcaggggattccttttccctcggatctgattctgctagacaccaagaacttggatgtgatccttgggatgaattggttggcccaattccaaggagtagtggattgcgcgaggcgcactgtcactctgtaccgaggaccagaacaaccggttgttttctttgcacccccaacctctgtcagaagttcagaacttcatcagatagaactgtcagaaattcccatcgtcagagagttcggagacgtgtttccggaagaactacctggtatgccgcccaagcgagagattgagttccggatagatcttgctccaggaaccactcctctgtacaagcgaccctaccgtatggcagcaaatgaactggccgaagtaaagaaacagttggaagagttgaaagaaaaggggtacatacgtccgagtacttccccatggggtgctcctgtgatttttgtagagaagaaagacaagacgaagaggatgtgcgtcgactacagagctctcaatgaagtcaccatcaaaaacaagtaccctcttccccggatcgatgatctgttcgatcaactcaaaggtgccactgtattctccaagattgatctccgttccggatatcaccaattacgtattcgtgaagaagatattccgaagaccgcattcactacgcgatatggactgtatgaattcacggtgatgtcgttcggcttgaccaatgctcctgccttcttcatgaacttaatgaacaaagcgttcatggaatacttggataagttcgttgtggttttcatcgatgacattctgatatactcacaatcagaggaagaccatcagcaccatctccgtctggtgttgggaaagttgcgggaacatcaattgtatgccaagcttagcaagtgtgagttctggttgtccgaagtcaaattcttggggcacgtgatatctgctaaaggagttgctgtggaccccgaaacagtgaccgccgtcaccgattggaagcaacccaagacagtcactcagattcgcagtttcttgggtttggcaggatactaccggaggttcatcgagaacttctccaaaatcgctcgacccatgacacagttgttgaagaaagaagagaagtttgtgtggagcccgcaatgcgagaaggcgttccaaactctcaaagaaaagctggtttcctcgccagtgttaatcttgccggatactcgcaaggatttcatggtgtattgtgatgcttcgcgccaaggattggggtgcgtgctcatgcaggacggtcatgtggtagcctatgcttcacgtcagctacgacctcatgagggcaactaccctacgcatgacttggagttagcagcggtggttcatgctctaaaaatctggcggcactatctcattgggaaccgctgtgaaatatatactgatcacaagagcttgaaatacatattcacccagtcggatctgaatcttcggcaaaggagatggttagaactcatcaaggattatgacgtgggaatacactatcaccctggtaaggctaacgtggttgccgacgctctaagtcggaagagccattgcaatactctcaacgttcgaggcattccacccgagcttaatcaacagatggaagccctgaacctaaacatagttggtcgtggattcttggctgcgttagaagccaagcccaccttgctcgatcaaatccgcgaggctcagaagaatgatccggacatgcatggactcctcaagaatatgaaacagggtaaagccgctggtttcacagaggatgaacacggaaccttatggaacggaaagcgggtatgcgttccagatagcagagaacttaaacagctgatacttcaggaagctcacgaaagtccttattccattcacccgggcagtaccaagatgtacttagacttgaaggagaaatactgcgtgtcaaggcagagcactagcgaccggctggacttctccaacctctccaagtaccagaatggaaatgggatgaaattgggatggatttcatcaccggacttccaaaaacccaaggtagctcgattcattcctgtgaagaccacctatggaggacacaagctagccgagctctacttcgctaggatcgtgagtctccatggcgttcccaagaaaatcgtatctgataggggaagccaattcacctctcacttttggaagaagctccaagaagagcttggtacccgactaaatttcagcaccgcgtatcacccgcagacagatggacagaccgagcgtctaaatcagatcttagaagatatgcttcgcgcatgtgtcctggacttcgggaagacttgggataagagtctcccctatgccgagttctcctacaataacagctatcaagccagcatacaaatggcaccttatgaagcgttgtatgggcgcaaatgccgaacaccgctattgtgggaccaagttggagaaagccaagtgttcgggactgatatcctgagagaagctgaagctaaagtcagaatcattcgggataatctaaaggtggcacagtctcggcagaaaagttatgcagataaccgtcgccgtgatctggaattcgcagtggatgattttgtgtaccttcgggtcacgccattgcgaggtgtgcacaggtttcagacaaaagggaagctcgcacctcggtatgtgggtccctttcgtatcactgctcgacgcggagaagtcgcttaccagctggagctgcccgcctccttgggcaacgtgcatgatgtgttccatgtgtcgcaactcaagaaatgtcttcgagtgccatccgagcaggccgactcagagcaaatcgaagttcgcgaagatttgacgtatgtggagaagccagtgaaaatcctggacaccatggagcgcaggaccaggaaccgggtaatccgtttttgcaaggtccagtggagcaaccacgccgaagaagaagctacttgggagcgtgaagacgagctgaaggcagcccatcccgatctcttcgccagttcttccgaatctcggggtcgagattccgtttaa

SEQ ID NO: 14279 - DNA, 5481 bp, Oryza sativa
  Clone ID: TFbOSC900190j.C1.o21.fg
atggaggtggatgaagtcgggggtcgatggacattctccagggcaaatgaaggctacacgagctgcggcccggtagtcgagatgtcatggcacagggccggtgtcctgctgctaggggctcagtcctgcctgcctgtcccgggggttccggccgtaggtgggattgggtcggtactcttgtctatggctaggatgggttggaaactatgtcacagcttccgtctgtataccgtggtgatggccggcagcgtcacccgtcgtggtttggacatgactggcttcgtcttggagctgcggggcatgtgcgtggtcttggggtatccacatggagtggattaccaggccaggccgctcccggagcaggagggtgaggatgcagagccccacgctggttgggaggttactgcagtgatcctctctggctctcccgagcggacttcgctggcagtcaccgcgggtggagattccttccccgccgcttgccagaacgccgctctcctcgccatcggcactcttcaccagcgctacccggacgagttgcagcactcgccctaccgctaccaccctcgtcgcggaggagcccgcgactacgccaccttccgggatgctagctcggaggatgacgctaccatcgtgcacctggcgcgcatggtggaggcgtacgacgcagctcgtatcgacttccaccagatggtacgccgtgggatggtcgagaacaacatgaagatcctggagctgcgtcaggagaacctgcagctcaagaaggacctagacgcggtggaggcgcagctgcagcagctcaagatcgcccagggggaggactgccgtcccaagcgtcgccgcgtctgccgcagccagaagatcaccgcccgcaagagcacctccaggcccgagcttgttcgtcagtccctggcgtggacttgcttcgtggagacccctcgtgccgagcccgcgcccgtggttccccaggagggggaagcctccggcgttggtagcacggaggatgcgctgttgctcaccttccgtcctggcccgtcgcagcggagaaatgctaacaccggtgatggcaatcaacctgaaggcagcaaccacaaccgccagggcaacccacctccacctcctcctccgcctccaccaccaccaccagataccaacgccattctcacccaaatcctcgcccagcaagccaacatgatgacggctttcctccaccacctccaaaatccgccacaacataatgctccaccaccacctccccaacactctaaactcgccgagttcctccgcatccgtccacccaccttctccagctccaacaaccccgtggatgcgttggattggttgcatgccgtggggaaaaagctagacactgtgcagtgcagcgatgaggagaaagtcgtcttcgccgcccaccagctgcaggggcccgcatctctatggtgggaccatttccaagctacgcagccagaggggcagcctattacttgggcccgcttcaccgccgctttccggagaacccatgtgcccgccggagtcgttgctcttaagaagagggagttccgagagttgaagcaaggcaaccgctccgtgatggagtatttgcatgagttcaacaatctggcccgttacgccccggaggatgtgcgggaagatgaggagaagcaagagaagttcttggcaggattggaccctgaactgtccgtccgtctagtctctggggactatccggatttccaacgtctggtggacaagagcatccgcttggaggccaagcacaaggaactggagtcgcacaagcgccgcttggcgaatttccgcaatcaacagggtgctaaccaaagggtccgctacaccaacccctatccagggggatcctcctcgcaacagcaacaacagcagcagcaacctcgctccgcgccccgacctcaattcgtggtgcgcgtcccacagccgcagcagcagcagaatcagcaagggactcgtgcgccccgtcctcctacgccaactgtgcagcctggtcaaggccgcagggacgctcaaggtcagcagcgtctgtgcttcaactgcttcgagcccgggcactttgcggataaatgcccgaagccaaggcgtcagcaaggtcaagcgcctccccgctccaacaacggtgggaaggatgtcattcggggtcgtgtgaatcacgtgacggccgaggacgtgttgacaactccagacgtcatcgttggtacgttcctcgttcattccatccctgctaccattttgttcgactctggagcttcccactcgtttatatctgtgccattcgtggggagaaatcagttgggggtagaaaggcttaggaaccctctgctcatcaccacccctggaggggttatgacagcaaagtattatagccctgccgtccctatagaaattcaggggattccttttccctcggatctgattctgctagacaccaagaacttggatgtgattcttgggatgaattggttggctcaattccaaggagtagtggattgcgcgagacgcactgtcactctgtaccgagggccggaacaaccggttgttttctttgcacccccaacctctgtcagtagttcagaactgcatcagataggactgtcagaaatccccatagtcagggagttcatagatgtgtttccggaagaactacccggtatgccgcccaagcgagagattgagttccggatagatcttgctccaggaaccactcctctgcacaagcgaccctaccgtatggcagcaaatgaactggccgaagtaaagaaacagttggaagagttgaaagaaaaggggtatatacgtccgagtacttccccctggggtgctcctgtgatttttgtggagaagaaagacaagacgaagaggatgtgcgttgactacagagctctcaatgaagtcaccatcaaaaacaagtaccctcttccccggatcgatgatctgttcgatcagcttaaaggtgccactgtattctccaagattgatcttcgttccggatatcaccaattacgtattcgtgaagaagatattccgaagaccgcattcaccacgcgatacgggctgtatgaattcacggtgatgtcattcggtctaaccaatgcacctgccttcttcatgaacttaatgaacaaagtgttcatggaatacttggataagtttgttgtggttttcattgatgacattctgatatactcacaatcagaggaagaccatcagcaccatctccgtctggtgttgggaaagctgcgggaacatcaattgtatgccaagcttagcaagtgtgagttctggttgtccgaagtcaaattcttaggacacgtgatatctgctaaaggagttgctgtggaccccgaaacagtgaccgccgtcgccgattggaagcaacccaagacagttactcaagtccgcagtttcttaggtttggcaggatactaccggagattcatcgagaacttctccaaaatcgctcgacccatgacacagttgttgaagaaagaagagaaatttgtgtggagcccgcaatgcgagaaggcgttccaaactctcaaggaaaagctggtttcctcgccggtgttaatcttgccggatactcgcaaggacttcatggtgtattgtgacgcttcgcgccaaggattggggtgcgtgctcatgcaggacggtcatgtggtagcctatgcctcgcgtcagctgcgacctcatgaaggcaactaccctacacatgatttggagttagccgcggtggttcatgctctaaaaatctggcggcactatctcattgggaatcgctgtgaaatatataccgatcataagagtttgaaatacatcttcacccagtcggatctaaatcttcggcaaaggagatggttagaactcatcaaggactatgatgtgggaattcactatcatcctggtaaggccaacgtggttgccgacgctctaagtcgaaagggccattgcaacactcttaacgtccttggcattccacccgaacttaatcaacagatggaagccctgaacctaagcgtagttggtcgcggattcttggctgcgctagaagccaagcctaccttgctcgatcaaatccgcgaggctcagaagaatgatccggacatgcatggactcctcaagaatatgaaacaggataacagagaacttaaacagctgatacttcaggaagctcacgagagcccttattccattcacccgggcagtacaaagatgtacttagacttgaaggagaaatactggtgggttagtatgaagcgggaaattgcagagttcgtggccctttgtgatgtgtgccagcgtgtcaaggcagagcaccaacgaccggccggacttctccaacctctccaagtaccagaatggaaatgggatgaaattgggatggatttcatcacaggacttccaaaaacccaaggtggatatgattctatatgggtagttgtggatcgattaaccaaggtagctcgatttattcctatgaagaccacctatggagggaacaaactagccgagctctacttcgctaggatcgtgagtctccatggcgttcccaagaaaatcgtatctgataggggaagccaattcacctctcatttctggaagaaactccaagaagagttgggaacccgattaaatttcagcaccgcgtatcacccgcagacagatggacagaccgagcgtctaaatcaaatcctagaagatatgctccgcgcatgtgtactagatttcgggaagacctgggataagagtctcccctatgccgagttctcctacaataacagttatcaagccagcatacaaatggcaccttatgaagcgttgtacgggcgcaaatgccggacaccgctcttgtgggaccaagttggagaaagccaagtgttcgggactgatatcctgagagaagctgaagctaaagtcagaatcattcgggataatctaaaggtggcacagtcccggcagaaaagttatgcggataaccgacgccgtgatctggaattcgtagtggatgactttgtgtatcttcgggtcacgccattgcgaggtgtacacaggtttcagacaaaagggaagctcgcacctcggtatgtgggtcctttccgtatcgttgctcgacgcggagaagtcgcttaccagctggagctgcccgcctccttgggcaacgtgcatgatgtgttccatgtgtcgcaactcaagaaatgccttcgagtgccatccgagcaggccgactcagagcaaattgaagttcgcgaagatttgacctatgtggagaggccagtgaaaatcctggacaccatggagcgcaggaccaggaaccgggtaatccgtttttgcaaggtccagtggagcaaccatgctgaagaagaagctacttgggagcgtgaagacgagctgaaggcagcccatcccgacctcttcaccagttcttccgaatctcggggtcgagattccgtttaa

SEQ ID NO: 14280 - DNA, 2754 bp, Oryza sativa
  Clone ID: TFbOSC900190j.C1.o22.fg
atggacatctctaggacaaatgaaggctacacgagctatggcccggtagtcgagatgtcatggcacagggccggtgtcctgctgctaggggctcagtcctgtctacctgtcccgggggttccggccatggccggcagcatcaactgtcgtggtctggacctgactggcttcgttttggagctgcggggcatgtgcgttgtcctggggtatccgcatggagtggactaccagggcaagcagctcccggagcaggagggtgacgatgcagagccccacgctgcttgggaggttactgcagtgatcctcactggctcacccgagaggacttcgttggcagtcaccgcgggagcccgtgactacgccaccttccgggatgctggctcggaggatgactctacaatcatgcacctggcgcgcatggtggaggcgtacgacgcggcccgtatcgacttccatcagatggtgcgtcgcgggttggtcgagaacaacatgaagatcctggagctgcgtcaggagaatctgcagttgaagaaggacctagacgcagtggaggcgcagctgcgtcagctcaaggtcgcccagggagaggtctgccgtcccaagcgccgccgcgtctgccgcagccagaagatcaccgcccgcaagagtacctccaggcccgagcttgttcgtcagtccctagcgtggacctgcttcgtcgagacccctcgtgccgagcccgtgctcgtgatggtgacgaccaggagaagtgctgctaccggtgaaggcagtcaccccgaaggcagcaaccacaacaaccatggcagcctacctccacctcctcccccgcctccaccaccaccaccagacaccaacgccattctcacccaaatcctcgcccagcaggccaacatgatggctgctttcctccaccacatccaaaatccgccacaacataatgctccaccaccgcccccacaacactctaaactcgccgagttcctccgcatccgtccacctaccttctctagctccaataaccccgtggatgcgttggattggttgcatgccgtggggaaaaagttagacaccgtgcagtgcagcgatgaggagaaagtcatcttcaccgcccaccaactgcaggggcccgcatctctatggtgggaccatttccaggctacgcagccagaagggcagcctactacttgggcccgcttcaccgccgctttctggagaacccatgtgcccgccggagtcatggcccttaagaaaagggaattccgagagttgaaacaaggcaactgctctgtgatggagtatttgcatgagtttaacaacctggcccgatacgccccggaggatgtacgggaagatgaggagaagcaagagaagttcttggcaggaatggaccctgagctgtccgtgcgtctggtctccggggactatccggatttccaacatctggtggacaagagcatccgcttggaagccaagcacaaggaacgggagtcgcacaagcgtcgtttggcgaatttccgcaaccaacagggggctaaccaaaggcagcaacagcagcagcaacctcgctccgcgccccgacctcaattcgtggtgcgcgtcccacagccgcagcaacagcagagtcaacaagggactcgtgcgccccgtcctcctacgccagccgtgcagcctagtcaaggccgcagggacgttcaaggtcagcagcgtctgtgcttcaactgcttcgagcctgggcactttgcggataaatgcccaaagccgaggcgccagcaaggccaagcgcctccccactccaacaatggtggtaaggatgtcattcggggtcgggtgaaccacgtgacggccgaggatgtgctgacaactccagacgtcatcgttggtacgttcctcattcattccatccctgctaccattttgttcgactctggagcttcccactcatttatatatgtgccattcgtggggagaaatcagttgggggtagaaaggcttaggaaccctctgctcatcaccacccctggaggggttatgacagcaaagtattatagccctgtcgttcctatagaaattcagggaattccttttccctcggatctgattcttttagacaccaagaacttggatgtgatccttgggatgaattggttagctcaattccaaggagtagtggattgtgcaagacgcactgtcactctgtaccgagggccggaacaaccggttgttttctttgctcccccaacctctgtcggtagttcagaacttcatcagataggactgtcagaaatccccatcgtcagagggttcggagacgtgtttccggaagaactacccggtatgccaccgaagcgagagattgagttccggatagatcttgctccaggaaccactccccagtacaagcgaccctaccgtatggcagcaaatgaactggccaaagtcaagaaacagttggaagagttgaaagaaaaggggtatatacggccgagtacttccccctggggtgctcctgtgatttttgtggagaagaaagacaagacgaagaggatgtgcattgactacagagctctcaatgaagttaccatcaaaaacaagtaccctcttccccggatcgatgatctgttcgatcagcttaaaggtgccattgtattctccaagattgatcttcgttctggatatcacaattacgtattcgtgaagaagatatccctaagaccgcattcaccacgcgatacggactgtatgaattcacggtga

SEQ ID NO: 14281 - DNA, 5361 bp, Oryza sativa
  Clone ID: TFbOSC900190j.C1.o6.fg
atggatgaagtcgggggtcgatggacattctccagggcaaatgaaggctacacgagctgcggcccgatggccggcagcgttacccgtcgtggtttggacatgtctggcttcgtcttggagctgcgaggcatgtgcgtggtcttggggtatccacatggagtggattaccaggccaggccgctcccggagcaggagggtgaggatgcagagcctcacgctggttgggaggtcactgcagtgatcctctccggctctcccaagcggacttcgctggcagtcaccgcgggcggagactccttccccgccgcttgccagaacgccgctctcctcgccatcggcaccctgcaccagcgctacccggacgagttgcagcactcgccctaccgctaccaccctcgtcgcggaggagcccgcgacttcgccaccttccgagacgccagctcggaggatgatgccaccgtcgtgcatctggcacgcatggtggaggcatacgacgcagctcgtattgacttccaccagatggtgcgtcgcggcatggtggagaacaacatgaagatcctggagctgcgtcaggagaacctgcagctcaagaaggacctcgacgcgttggaggcgcagctgcatcagctcaagatcgcccagggagaggacagccgtcccaagcgtcgccgcgtctgccgcagccagaagatcaccgcccgcaagagcacctccaggcccgagcttgttcgtcagtccctggcgtggacttgcttcgtcgagacccctcgtgccgagcctgcgcccgtggttccccaggagggggaagcctccggcgttggtagctcggagggcgcgctgttgctcaccttccgccctggcccgtcgcagcggagaaatgttaacaccggtgaaggcaaccaacccgagggcagcaaccccaacccccaaggcaatccacctccaccaccaccaccagacaccaacgccattctcacccagatcctcgcccaacaagccaacatgatgaatgctttcctccaccacctccaaaacccgccacaacagaatgctccaccaccacctccccaacactccaaactcaccgaattcctccgcatccgcccacccaccttctccagctccaacaatcccgtggatgcgttggattggttgcatgccgtggggaagaagctagacacggtgcagtgcagcgatgaggagaaagtcgtcttcgccgcccatcagctgcaggggcccgcatctctatggtgggaccacttccaggctacgcagcccgaggggcaaccgattacttgggctcgcttcaccgccgctttccggagaacccatgtgcccgccggagtcgtggctctcaagaagagggaattccgagagttgaagcaaggcaaccgctccgtgatggagtatttgcacgagttcaacaatctggcccgttacgctccggaggatgtgcgggaagatgaggagaagcaagagaagttcttggcaggaatggaccctgagctgtctgttcgtctagtctctggggactatccggattttcaacgattggtggacaagagcatccgcttggaagccaagcacaaggagctggagtcgcacaagcgccgcttggcgaacttccgcaatcaacagggtgctaaccagagggtccgctacaccaatccctacccagggggatcctcctcgcagcagcaacaacagcagcagcaacctcgcccagcgcctcgacctcaattcgtggtgcgcgtcccacagcagcaacagcagcagaatcagcaagggactcgtgcgccccgtcctcctacgccagctgggcagcccgttcaaggccgcagggacgcttcaggtccgcagcggctgtgcttcaactgcttcgagcccgggcactttgcggataaatgcccgaagccaaggcgtcagcaaggccaagcgcctccccgccccaacaacggtgggaaggacgtcatccgtggccgtgtgaatcacgtgacggccgaggacgtgctgacaactcccgacgtcatcgttggtacgttcctcgttcattccatccctgctacaattttgttcgactctggagcttcccactcgtttatatctgtgccattcgtggggaaaaatcagttgggggtagaaaggcttagaaaccctctgctcatcaccacccctggaggggttatgacagcaaagtattatagccctgccgtccctatagaaattcaggggattccttttccctcggacctgattcttctagacactaagaacttggatgtgatccttgggatgaattggctggcacaattccaaggagtagtggattgcgcgaggcgcactgtcactctataccgaggaccagaacaaccggttgttttctttgcacctccaacctctgtcagaagctcagaacttcatcagatagaactgtcggaaatccccatagtcagagagttcggagacgtgtttccggaagaactacctggtatgccgcccaagcgagagattgagttccggatagatcttgctccaggaaccactcctctgcacaagcgaccctaccgtatggcagcaaatgaactggccgaagttaagaaacagttggaagagttgaaagaaaaggggtatatacgtccgagtacttccccttggggtgctcctgtgatttttgtggagaagaaagacaaaacgaagaggatgtgcgttgactacagagctctcaatgaagtcaccatcaaaaacaagtaccctcttccccggatcgatgatctgttcgatcagcttaaaggtgccactgtattctccaagattgatcttcgttccggatatcaccaattacgtattcgggaagaagatattccgaagaccgcattcactacgcgatatggactgtatgaattcacggtgatgtcgttcggcttaaccaatgctcctgccttcttcatgaacttgatgaacaaagtgttcatggaatacttggataagttcgttgtggttttcatcgatgacattctgatatactcacaatcagaggaagaccatcagcaccatctccgtctggtattgggaaagttgcgggaacatcaattgtatgccaagcttagcaagtgtgagttctggttgtccgaagtcaaattcttggggcacgtgatatctgctaaaggagttgctgtggaccccgaaacagtgaccgccgtcaccgattggaagcaacccaagacagtcactcagattcgcagtttcttgggtttggcaggatactaccggaggttcatcgagaacttctccaaaatcgctcgacccatgacacagttgttgaagaaagaagagaagtttgtgtggagcccgcaatgcgagaaggcgttccaaactctcaaagaaaagctggtttcctcgccagtgttaatcttgccggatactcgcaaggatttcatggtgtactgtgatgcttcgcgccaaggattggggtgcgtgctcatgcaggacggtcatgtggtagcctatgcttcacgccagctacgacctcatgaaggcaactaccctacacatgacttggagttagcagcggtggttcatgctctaaaaatctggcggcactatctcattgggaaccgctgtgaaatatatactgatcataagagtttgaaatacatcttcacccagtcggatctgaatcttcggcaaaggagatggttagaactcatcaaggattatgatgtgggaatacactatcatcctggtaaggccaacgtggttgccgacgctctaagtcgaaagagccactgcaacactctcaacgtccgaggcattccacccgagcttaatcaacagatggaagcactgaacctaagcatggttggtcgcggattcttggctgcgttggaagctaagcccaccttgctcgatcaaatccgcgaggctcagaagaatgatccggacatgcatggactcctcaagaatatgaaacagggcaaagccgctggtttcacagaggatgaacacggaaccttatggaacggaaagcgggtatgcgttccagatagcagagaacttaaacagctgatacttcaggaagctcacgaaagtccttattccattcacccgggcagtaccaagatgtacttagacttgaaggagaaatactggtgggtcagcatgaagcgggaaattgcagagtttgtggcactatgtgatgtgtgccagcgtgtcaaggcagagcaccagcgaccggccggacttctccagcctctccaagtgccggaatggaaatgggatgaaattgggatggatttcatcaccggccttccaaaaacccaaggtggatatgattctatatgggtaattgtggatcgactaacaaaggtagctcgatttattcctgtgaagaccacttatggagggaacaaactagcggagctctacttcgctaggatcgtgagtctccatggtattcccaagaaaatcgtatctgataggggaagccaattcacctctcacttttggaagaagctccaagaagagctgggtactcgattgaatttcagcaccgcctatcacccgcagacagatggacagaccgagcgtctaaatcagatcctagaagatatgctccgcgcatgtgtcctagacttcgggaagacttgggataagagtctcccctatgccgagttctcctacaacaacagctatcaagccagcatacaaatggcaccctatgaagcgttgtacgggcgcaaatgccggacaccgctattgtgggaccaagttggagaaagccaagtgttcgggactgatatcctgagagaagctgaagctaaagtcagaatcattcgggataatctaaaggtggcacagtcccggcagaaaagttatgccgataaccgacgccgtgatctggaattcgcagtggatgattttgtgtaccttcgggtcacgccattgcgaggggtgcacaggtttcggacaaaagggaagctcgcacctcggtatgtgggacctttccgtatcgtcgctcgacgcggagaagtcgcttaccagctggagttgcccgcctccttgggcaatgtgcatgatgtgttccatgtgtcgcaactcaagaaatgtcttcgagtgccatccgagcaggccaactcagagcaaattgaagttcgcgaagacttgacgtatgtggagaagccagtgaaaatcctggacaccatggagcgcaggaccaggaaccgggtaatccgtttttgcaaggtccagtggagcaatcacgccgaagaagaagctacttgggagcgcgaagacgagctgaaggcagcccatcccgatctcttcgccagttcttccgaatctcggggtcgagattccgtttaa

SEQ ID NO: 14282 - DNA, 5832 bp, Oryza sativa
  Clone ID: TFbOSC900219j.C1.o9.fg
atggatgaagtcgggggtcgatggacattctccagggcaaatgaaggctacacgagctgcggcccgatggccggcagcgttacccgtcgtggtttggacatgactggcttcgtcttggagctgcgaggcatgtgcgtggtcttggggtatccacatggagtggattaccaggccaggccgctcccggagcaggagggtgaggatgcagagcctcacgctggttgggaggtcactgcagtgatcctctccggctctcccgagcggacttcgctggcagtcaccgcgggcggagattccttccccgccgcttgccagaacgccgctctcctcgccatcggcaccctgcaccagcgctacccggacgagttgcagcactcgccctaccgctaccaccctcgtcgcggaggagcccgcgacttcgccaccttccgagacgccagctcggaggatgacgccaccgtcgtgcatctggcacgcatggtggaggcatacgacgcagctcgtattgacttccaccagatggtgcgtcgcggcatggtggagaacaacatgaagatcctggagctgcgtcaggagaacctgcagctcaagaaggacctcgacgcgttggaggcgcagctgcatcagctcaagatcgcccagggagaggacagccgtcccaagcgtcgccgcgtctgccgcagccagaagatcaccgcccgcaagagcacctccaggcccgagcttgttcgtcagtccctggcgtggacttgcttcgtcgagacccctcgtgccgagcctgcgcccgtggttccccaggagggggaagcctccggcgttggtagctcggaggctccttctcggtttgctggttctgtgtggggttttcagatggtgacgaccaggagaaatgttaacaccggtgaaggcaaccaacccgagggcagcaaccccaacccccaaggcaatccacctccaccaccaccaccagacaccaacgccattctcacccagatcctcgcccaacaagccaacatgatgaatgctttcctccaccacctccaaaacccgccacaacagaatgctccaccaccacctccccaacactccaaactcgccgaattcctccgcatccgcccacccaccttctccagctccaacaatcccgtggatgcgttggattggttgcatgccgtggggaagaagctggacactgtgcagtgcagtgatgaagagaaagtcatcttcgccgcccaccagctgcaggggcccgcatctctatggtgggaccacttccaggctacgcagcccgagggacaaccgatcacttgggctcgcttcaccgccgctttccggagaacccatgtgcccgccggagtcgtggctctcaagaagagggaattccgagagttgaagcaaggcaaccgctccgtgatggagtatttgcacgagttcaacaatctggcccgttacgctccggaggatgtgcgggaagatgaggagaagcaagagaagttcttggcaggaatggaccctgagctgtctgttcgtctagtctctggagactatccggatttccaacgactggtggacaagagcatccgcttggaggccaagcacaaggaactggagtcgcacaagcgccgcttggcgaacttccgcaatcagcagggtgctaaccagagggtccgctacaccaatccctacccagggggatcctcctcgcagcagcaacaacagcagcagcaacctcgcccagcgcctcgacctcaattcgtggtgcgcgtcccacagcagcaacagcagcagaatcagcaagggactcgtgcgccccgtcctcctacgccagctgggcagcccgttcaaggccgcagggacgcttcaggtccgcagcggctgtgcttcaactgcttcgagcccgggcactttgcggataaatgcccaaagccaaggcgtcagaaaggccaagcgcctccccgctccaacaacggtggcaaggatgtcattcggggtcgtgtgaatcacgtgacggccgaggacgtgctgacaactccagacgtcatcgttggtacgttcctcgtccattccatccctgctacaattttgttcgactctggagcttcccactcgtttatatctgtgccattcgtggggaaaaatcagttgggggtagaaaggcttagaaaccctctgctcatcaccacccctggcggggttatgacagcaaagtattatagccctgccgtccctatagaaattcaggggattccttttccctcggacctgattcttctagacactaagaacttggatgtgatccttgggatgaattggctggcacaattccaaggagtagtggattgcgcgagacgcactgttactctgtaccgaggaccagaacaaccggttgttttctttgcacctccaacctctgtcagaagctcagaacttcatcagatagaactgtcggaaatccccatagtcagagagttcggagacgtgtttccggaagaactacctggtatgccgcccaagcgagagattgagttccggatagatcttgctcctggaaccactcctctgtacaagcgaccctaccgtatggcagcaaatgaactggccgaagttaagaaacagttggaagagttgaaagaaaaggggtatatacgtccgagtacttccccttggggtgctcctgtgatttttgtagagaagaaagacaagacgaagaggatgtgcgtcgactacagagctctcaatgaagtcaccatcaaaaacaagtaccctcttccccggatcgatgatctgttcgatcagcttaaaggtgccactgtattctccaagattgatcttcgttccggatatcaccaattacgtattcgggaagaagatattccgaagaccgcattcactacgcgatatggactgtatgaattcacggtgatgtcgttcggcttaaccaatgctcctgccttcttcatgaacttgatgaacaaagtgttcatggaatacttggataagttcgttgtggttttcatcgatgacattctgatatactcacaatcagaggaagaccatcagcaccatctccgtcaggtgttgggaaagttgcgggaacatcaattgtatgccaagcttagcaagtgtgagttctggttgtccgaagtcaaattcttggggcacgtgatatctgctaaaggagttgctgtggaccccgaaacagtgaccgccgtcaccgaatggaagcaacccaagacagttactcaagtccgcagtttcttgggtttggcaggatactatcggagattcatcgagaacttctccaaaatcgctcgacccatgacacagttgttgaagaaagaagagaagtttgtgtggagcccgcaatgcgagaaggcgttccaaactctcaaagaaaagctggtttcctcgccagtgttaatcttgccggatactcgcaaggatttcatggtgtattgtgatgcttcgcgccaaggattggggtgcgtgctcatgcaggatggtcatgtggtagcctatgcatcacgccaactacgacctcatgaaggcaactaccctacgcatgacttggaattagccgcagtggttcatgctctaaaaatctggcggcactatctcattgggaatcgctgcgaaatatataccgatcataagagtttgaaatacatcttcacccagtcggacctgaatcttcggcaaaggagatggttagaactcatcaaggattatgatgtgggaatacactatcatcctggtaaggccaacgtggttgccgacgctctaagtcgaaagagccattgcaacacccttaacgtccgtggcattccacccgaacttaaccaacagatggaagccctgaacctaaacatagttggtcgtggatttttggccgcgttggaagccaagcccaccttgctcgatcaaatccgcgaggctcagaagaatgatccggacatgcatggactcctcaagaatatgaaacagggcaaagccgctggtttcacggaggatgaacacggaaccttatggaacggaaagcgggtatgcgttccagatagcagagaacttaaacagctgatacttcaggaagctcacgaaagtccttattccattcacccgggcagtaccaagatgtacttagacttgaaggagaaatactggtgggtcagcatgaagcgggaaattgcagagtttgtggcactatgtgatgtgtgccagcgtgtcaaggcagagcaccagcgaccggccggacttctccagcctctccaagtgccggaatggaaatgggatgaaattgggatggatttcatcaccggccttccaaaaacccaaggtggatatgattctatatgggtaattgtggatcgactaacaaaggtagctcgatttattcctgtgaagaccacttatggagggaacaaactagcggagctctacttcgctaggatcgtgagtctccatggtattcccaagaaaatcgtatctgataggggaagccaattcacctctcacttttggaagaagctccaagaagagctgggtactcgattgaatttcagcaccgcctatcacccgcagacagatggacagaccgagcgtctaaatcagatcctagaagatatgctccgcgcatgtgtcctagacttcgggaagacttgggataagagtctcccctatgccgagttctcctacaacaacagctatcaagccagcatacaaatggcaccctatgaagcgttgtacgggcgcaaatgccggacaccgctattgtgggaccaagttggagaaagccaagtgttcgggactgatatcctgagagaagctgaagctaaagtcagaatcattcgggataatctaaaggtggcacagtcccggcagaaaagttatgccgataaccgacgccgtgatctggaattcgcagtggatgattttgtgtaccttcgggtcacgccattgcgaggggtgcacaggtttcggacaaaagggaagctcgcacctcggtatgtgggacctttccgtatcgtcgctcgacgcggagaagtcgcttaccagctggagttgcccgcctccttgggcaatgtgcatgatgtgttccatgtgtcgcaactcaagaaatgtcttcgagtgccatccgagcaggccaactcagagcaaattgaagttcgcgaagacttgacgtatgtggagaagccagtgaaaatcctggacaccatggacggcctcctgggcagcctcctcggcttctcggaggcggatgttggcgcactccagatcgcagcagagggggaggaccccttgggggatgagggatgcctccacggagctgagattcagcacccgttggaccaccatcctgaagtcctcagggtcccagtcctatttgcgcccctggtgggtcctcatgatgtcctcgggcccggagtactcccaggcgccccgggcgcgccgctggagcggcgcgatccggcgacgaaggtagtcgccgaacaccatggcccctgtgagcccctgggatcgcaggcccgccaggcggtcaagaacggcgtcgtagccgtctcccagatctaccgtcgaccgccagctggaggcctgcgccgggggctggctcggaagtcggaggcgcgcttcgtcgacgaggggggtgtagaaccagtcgctcttccagtcgtcccactttttgcggaggacgcagggaatgtagcggttcagcacctgcccccgcggctggaagtagcagccaccgactaccgtcggcggcgacaccggctgaacggtgaagaaccaccggaacagccggagagatggccaacgtcattatcgcgttgggggtga

SEQ ID NO: 14283 - DNA, 7845 bp, Oryza sativa
  Clone ID: TFbOSC900232j.C1.o8.gm
atggctatgacaatagggctgacgtcagcacggagggggtgcggcgccggcaagcggggcccactggtcagcggctcaggggagagcggttcaccgtggaccgggaccacgcgggtggtccaccgccgttccacggaaccaacggcccagatcgccctcggggccgatcggacgggcggcgatagaggcggagatgtgggcgcggcggcggttgcgggcgcggtggcgcggcgggaggttggggaagggcccgacaggcttggaaggagaacttcagggtgtgacacccgcccccgggcggagggaggccacgacgcgtcggggcacgacgccgcctcacttacggtgacggcggctcgccccgaggcgcgcttcaggcggcgggtgtccttctgcggcatcccccccgaggaggagggcccatcgatcggccacggccttgaggcggtccacggctccaacatcgtcgggggcctcgggaagccggaggcgtcccgacggtctctacggggagcaggacgctcgaatcaatatcgagcgacgccgggacgagcgccgagctgcccgcatggggaaggcgcctcctcatctggagtgccgcgttcctccccacgagacggccctccccccacgctcagccctggagggactggttgtagggcattcgtggcgagtcttcggaatgtccggtggcccccgaagtttcgccccaacctcacggagaagtatgatggcagcatcaatccctccgagttcctccagatctacaccacgatcatcgtggcggcagggggcgacgaccgggtcatggcgaattatttccaaatggccctcaagggtcaggcgcgcggctggctgatgacccagccccccgacttcatccactcctgggaggacctgtgccagcagttcgtcacgaactttcagggcacatatccccgcccaggagaagaggcggacctacacgctgtgcggtggaaggacgacgagtccctccgctcgtacatacagcgcttctgccaggtccgcaacactattccatgcattccggcccacgcagtcgtttatgcgttttggaatggcatgcggcataaccgcatgctggagaagatcgcctccaaggagcccaagaccaccgccgagctgttcgagctggcggacaaggtggcttggaaggaggcgtgggcctggaactcccccggcaccgctgatgggccctcatgggccccgtgcaagggaaaggccaccggcgataagccaagctccactgctccatccggtgagggccggtcggcagacaagtggtgcttgggtcgacgagagggcaaagcccccgcgaccccagccgatgaccgacgaggggaagcgaagaagaaggcccccaccgatgatggtgataacagcgaggatctggagttccagatacctcagggaaccgtcgccacgctcgacctggggggagggggggcttgcgctcacacctcccgccgaggcttcaaggccataaggcgagagcttctagccaccgtcccaacccacgaagcggctcggaaggcgcactggtcggaggtgaagctcacctttgaccagagcgaccatttgacagtgctcgctcgaggtgggaagttggccctcgtggtctccccgaccattcacaacgttaggatgaagcgagtcctggttgacgggggggccagcttgagcatcatctccccagccgccttcaatgcgctcaaggccccggggatgaagctccagccgtcgctgccgatcatcggcgtgactccgggacacacgtggcccctcggccacgtcgagctcccgataaccttcggcgactccaccaacttccgtaccgagcggatcgacttcgatgtggcggacctcaatctgccctacaacgcggtcctgggcagacctgcgttggtgaagttcatggccgccacccactacgcctacctccagatgaagataccgggccctagtggtcccatcaccgtctttggcgatgtcaaagtcaccctcgcctgcgcggagcagcgcgccgacaacctggcagtggccacggagccacaggccccggaggcctccgcgtcccacgcctccaagaagcgcctcacctcggctgacgaggaaagcgcgctcgtctccttcctgcgggcaaactccgacgtcttcgaatggaagccgtcggacatgcccggggtccctagggaggtgatcgagcaccgcctcgccatgcggctggatgcgcgacccgtccggcaaaaagtgcggtgtcaagccccggagcggcaggccttcatccgagaggaagtggcgcggctcctggaggctgactttatccgcgaggttatccatccggagtggttggcgaacccggtggtcgtcccgaaggccaacggtaagctccggatgtgcattgactacacggacctcaacaaggcatgccctaaagatcccttccctttaccacgcatagatcagatagtcgactccactgcgggatttactctcccgaaatcttcgccggcgcatcaatggagcccgagatcgccgcgccgatttccttcccctccggccgccctctctcactcccaaccctatttaaacgctccccgtgcctccctcctccgtttccgccgtccgccgctcgctctccccgtcggattcgagctcgcgccgtcgtcctctctctccgccgtcgccgccgagctccggttcgccgccgtcgtcgccccggacctcctcccgcttcggcgtcgcctccttcggcttcgccgcgttctcgtcgacctcgtccactcctccgtttcgcccgccgaccgccggagcaccatcgtcctcgtcgacccgagccgcgccgccgcctctctccgcttcggtcgccgttcccgtcgtcgccgtcaacccgggatggccggcagcgtcacccgtcgtggtttggacatgactggtttcgtcttggagctgcggggcatgtgcgtggtcctggggtatccacatggagtggactaccaggccaggccgcttccggagcaggagggggacgatgcagagccccacgctgcttgggaggtcactgcagtgatcctcgctggctctcccgagcggacttcgctgacagtcaccgcgggtggagactctttccccgccgcctgccagagcgccgctctcctcgccatcggcactcttcaccagcgctacccggacgagttgcagcactcgccctaccgctaccaccctcgtcgcggaggagcccgcgaccacgccaccttccgggatgctagctcggaggatgacgctaccatcgtgcacttggcgcgcatggtggaggcgtacgacgcggctcgtatcgacttccatcagatggtgcgccgtgggatggtcgagaacaacttgaagatcctggagctgcgtcaggagaacctgcagctcaagaaggacctagacgcggtggaggcgcagctgcatcagctcaagatcgcccagggagagatctgccgccccaagcgtcgccgcgtctgccgcagccagaagatcaccgcccgcaagagcacctccaggcctgagcttatggtgatgaccaggagaaatgctaacaccggtgatggcaaccaacctgaaggcagcaaccacaaccatcagggcaacccacctccacctcctcccccgcctccacccccaccaccagataccaacgccattctcacccaaatcctcgcccagcaggccaacatgatgactgctttcctccaccacctccaaaatccgccacaacttaatcctccaccaccacccccacaacactctaaactcgccgagtttctccgtatccgcccacctaccttctctagctccaacaaccccgtggatgcgttggattggttgcatgccgtggggaaaaagctagacactgtgcagtgcagcgatgaggagaaagtcatcttcgccgcccaccagctgcatggacccgcatctctatggtgggaccatttccaggctatgcagccggagggacagcctgttacttgggcccgcttcaccgccgctttccggagaacccatgtgcccgccggagtcgtggcccttaagaaaagagaattccgagagttgaagcaaggcaaccgctccgtgatggagtatttgcacgagttcaacaacctggcccgttacactccggaggatgtgcggaaagatgaggagaagcaagaaaagttcctggcaggaatggaccctgagctgtccgtccgtctagtctctggggactatccggatttccaacgtctggtggacaagagcatccgcttggaagccaagcacaaggaactggagtcgcacaagcgccgcttggcgaatttccgcaaccaacagggtgctaaccaaagggtccgctacaccaatccctatccagggggatcctcctcgcagcagcaacaacagcagcagcaacctcgctccgcgcctcgacctcaattcgtggtgcgcgtcccacagccgcagcagcaacagaatcaacaagggactcgagcgccccgtcctcctacgccaactgtgcagcctggtcaaggccgcagggacgcttcaggtccgcagcgtctgtgcttcaactgcttcgagcccgggcactttgcggataaatgcccgaagccaaggcgtcagcaaggccaagcgcctccccgccccaacaacggtggtaaggacgtcagtcggggtcgtgtgaaccatgtgacggccgaggacgtgctgacaactccagacgtcatcgttggtacgttcctcattcattccatccctgctaccattttgttcgactctggagcttcccactcgtttatatctgtgccattcgtggggagaaatcagttgggggtagaaaggcttagaaaccctctgctcatcaccacccctggaggggttatgacagcaaagtattatagccctgccgtccctatagaaattcaggggattccttttccctcggatctgatcctgctagacaccaagaacttggatataggactgtcagaaatccccatcgtcagagagttcggagacgtgtttccggaagaactacctggtatgccgcctaaacgagagattgagttccggatagatcttgctccaggaaccactcctctgtacaagcgaccctaccgtatggcagcaaatgaactggccgaagttaagaaacagttggaagagctgaaagaaaaggggtatatacgtccgagtacttccccctggggtgctcctgtgatttttgtggagaagaaagacaagacgaagaggatgtgcgttgactacagagctctcaatgaagtcaccatcaaaaacaagtaccctcttccccggatcgacgatctgttcgatcagcttaaaggtgccactgtattctccaagattgatcttcgttccggatatcaccaattacgtattcgcgaagaagatattccgaagaccgcattcaccacgcgatacggactgtttgaattcacggtgatgtcgttcggtttaaccaatgcccctgccttcttcatgaacttaatgaacaaagtgttcatggaatacttggataagtttgtggtggttttcattgatgacattctgatatactcacaatcagaggaagaccatcagcaccatctccgtctggtattgggaaagttgcgggaacatcaattatatgccaaacttagcaagtgtgagttctggttgtccgaagtcaaattcttagggcacgtgatatctgctaaaggagttgctgtggaccccgaaacagtgaccgccgtcaccgattggaagcaacccaagacagtcactcaagttcgcagtttcttaggtttggcaggatactaccggaggttcatcgagaacttctccaaaatcgctcgacccatgacacagttgttgaagaaagaagagaaatttgtgtggagcccgcaatgcgagaaggcgtttcaaactctcaaagaaaagttggtttcctcgccagtgttaatcttgccggatactcgcaaggacttcatggtgtattgtgacgcttcgcgccaaggattggggtgcgtactcatgcaggatggtcatgtggtggcctatgcctcacgccagctacggcctcatgaaggcaactaccctacccatgatttggagttagcagcggtggttcatgctctaaaaatctggcggcattatctcattgggaatcgctgtgaaatatatactgatcataagagtttgaaatacatcttcacccagtcggatctgaatcttcggcaaaggagatggttagaactcatcaaagattatgatgtgggaattcactatcatcctggtaaggccaacgtggttgccgacgctctaagtcggaaaagccactgcaacactcttaacgtccgtggcattccactcgaacttaatcaacagatggaagccctgaacctaagcatagttggtcgcggattcttgactacgttggaagccaagcccaccttgctcgatcaaatccgcgaggctcagaagaatgatccagacatgcatggactcctcaagaatatgaaacagggtaaagccgctggtttcacagaggatgaacacggaaccctatggaacggaaatcgagtatgcgttccagataacagagaacttaaacagttgatacttcaggaagctcacgaaagtccttattccatccaccctggcagcacgaagatgtacttagacttgaaggagaaatactggtgggttagtatgaagcgggaaattgcagagttcgtggccctttgtgatgtgtgccagcgtgtcaaggcagagcaccaacgaccggccggacttctccaacctctccaagtacctgaatggaaatgggatgaaattgggatggatttcatcaccggacttccaaaaacccaaggtggatatgattctatatgggtagttgtggatcgattaaccaaggtagctcgattcattcctgtgaagaccacctatggagggaacaaactagccgagctctacttcgctaggatcacagatgggcagaccgagcgtctaaatcagatcctagaagatatgcttcgcgcatgtgtcctagatttcgggaagacctgggataagagtctcccctatgccgagttctcctacaataacagctaccaagccagcatacaaatggcgccttatgaagcgttgtatgggcgcaaatgccggacaccgctcctgtgggaccaagttggggaaagccaagtgttcgggactgatatcctgagagaagctgaagcgaaagtcagaaccattagggataatctaaaggtggcacagtcccagcagaaaagttatgcagataaccgtcgccgtgacctggaattcgcagtggatgattttgtgtaccttcgggtcacgccattgcggggtgtacacaggtttcagacaaaggggaagctcgcacctcggtatgtgggtcctttccgtatcgttgctcgacgcggagaagtcgcttaccagttggagctgcccgcctccttgggcaacgtgcatgatgtgttccatgtgtcgcaactcaagaaatgccttcgagtgccatccgagcaggccgactcagagcaaattgaagttcgcgaagacttgacctacgtggagaggccagtgaagatcctggacaccatggagcgcaggaccaggaaccgggtaatccgtttttgcaaggtccagtggagcaaccacgccgaagaagaagctacctgggagcgcgaagacgagctgaaggcagcccatcccgacctcttcgccaggcccacccgtcatcccctacctcgcgccgcgcccgccgcctcgcccgtgccctag

SEQ ID NO: 14284 - DNA, 5604 bp, Oryza sativa
  Clone ID: TFbOSC900247j.C1.o14.gm
atggatgaagtcgggggtcgatggacattctccagggcaaatgaaggctacacgagctgcggcccggtagtcgagatgtcgtggcagagggttggtgccctgctgcttggggctcagtcctgcctgcctgtcccggaggttccggccgtaggcgggattgggtcgatggccggcagcgtcacccgtcgtggtttggacatgactggcttcgtcttggagctgcggggcatgtgcgtggccctggggtatccacatggagtggactaccaggccaggccgcttccggatcaggagggtgacgacgcggagccccacgctggttgggaggtcaccgcagtgatcctctctggctctcccgagcggacttcgctggcagttaccgcgggtggagattccttccccgccgcttgccagaacgccgctctcctcgccatcggcactcttcaccagcgctacccggacgagttgcagcactcgccctaccgctaccaccctcgtcgcggaggagcccacgactacgccaccttccgggatgctagctcggaggatgacgctaccatcgtgcacctggcgcgcatggtggaggtgtacgacgcggctcgtatcgacttccatcagatggtgcgtcgcgggatggtcgagaacaatctgaagatcctggagctgcgtcaggagaacctgcagctcaagaaggacctagacgcggtggaggcgcagctgcatcagctcaagatcgcccagggagaggtctgccgccccaagcgtcgccgcgtctgccgcagccagaagatcaccgcccgcaagagcacctccaggcccgagcttgttcgtcagtccctggcgtggacttgcttcgtcgagacccctcgtgccgagcccgcgcccgtggttccccaggagggggaagcctccggcattggtagcacggaggctctttctctgtttgctggttctgtgtggggttttcagatggtgacgaccaggagaaatgctgccaccggtgatggcaaccaacccgaaggcagcaaccacaaccatcagggcaacccacctccacctcctcctccgcctccaccaccaccaccagacaccaacgccattctcacccaaatcctcgcccagcaagccaacatgatgactgctttcctccaccacctccaaaatccaccacaacataatgctccaccaccacccccacaacactctaaactcgccgagttcctccgtatccgcccacctaccttctctagctccaacaaccccgtggatgcgttggattggtttcatgccgtggggaaaaagctagacacggtgcagtgcagcgatgaggagaaagttatcttcgccgcccaccaactgcaggggcccgcatctctatggtgggaccatttccaggctacgcagccagaggggcagcctattacttgggcccgcttcaccgccgctttccggagaacccatgtgcccgccggagtcgtggcccttaagaaaagggaattccgagagttgaagcaaggcaaccgctccgtgatggagtatttgcatgagttcaacaacctagcccgttacgccccggaggatgtgcgggaagatgaggagaagcaagaaaagttcttggcaggaatggaccctgaactgtccgtccgtctagtctctggggactatccggattttcaacgattggtggacaagagcatccgcttggaagccaagcacaaggagctggagtcgcacaagcgccgcttggcgaatttccgcaatcaacagggtgctaatcaaaggggccgctacaccaatccctatccagggggatcctcctcgcagcagcaacaacagcagcagcaacctcgccccgcgccccgacctcaattcgtggtgcgcttcccacagccgcagcaacagcagaatcaacaagggactcgtgcgccccgtcctcctacgccaacggtgcagcctggtcaaggccgcagggacgctcaaggtcagcagcgtctgtgcttcaactgcttcgagcccgggcactttgcggataaatgcccaaagccaaggcgtcagcaaggccaagcgcctccccgctccaacaacggcgggaaggatgtcattcggggtcgtgtgaatcacgtgacggccgaggacgtgctgacaactccagacgtcatcgttggactgtcagaaatccccatcgtcagggagttcggagatgtgtttccggaagaactacccggtatgccgcccaagcgagagattgagttccggatagatcttgctccaggaaccactcctctgcacaagcgaccctaccgtatggcagcaaatgaactggccgaagtaaagaaacagttggaagagttgaaagaaaaggggtacatacgtccgagtacttccccatggggtgctcctgtgatttttgtagagaagaaagacaagacgaagaggatgtgcgtcgattacagagctctcaatgaagtcaccatcaaaaacaagtaccctcttccccggatcgatgatctattcgatcagcttaaaggtgccactgtattctccaagattgatcttcgttccggatatcaccaattacgtattcgtgaagaagatattccgaagaccgcattcaccacgcgatacggactgtatgaattcacggtgatgtcattcggtttaaccaatgctcttgcattcttcatgaacttaatgaacaaagtgttcatggaatacttggataagtttgttgtggtgttcattgatgacattctgatatactcacaatccgaggaagaccatcagcaccatctccgtctggtgttgggaaagttgcgggaacatcaattgtatgccaagcttagcaagttcatcgagaacttctccaaaatcgctcgacccatgacacagttgttgaagaaagaagagaaatttgtgtggagcccgcaatgcgagaaggcgtttcaaactctcaaggaaaagctggtttcctcgccggtgttaatcttgccggatactcgcaaggacttcatggtgtattgtgacgcttcgcgccaaggattggggtgcgtgctcatgcaggacggtcatgtagtagcctatgcctcacgtcagctacgacctcatgaaggcaactaccctacacatgacttggagttagccgcggtggttcatgctctaaaaatctggcggcactatctcattgggaatcgctgtgaaatatataccgaccataggagtttgaaatacatcttcacccagtcggatctgaatcttcggcaaaggagatggttagaactcatcaaagactatgatgtgggaattcactatcatcctggtaaggccaacgtggttgccgacgctctaagtcgaaagagccattgcaacactcttaacgtccgtggcattccacccgaacttagtcaacagatggaagccctgaacctaagcatagttagtcgcggattcttggctgcgttagaagccaagcctaccttgctcgatcaaatccgcgaggctcagaagaatgatccggacatgcatggactcctcaagaatatgaaacagggtaaagccgctggttttacagaggatgaacacagaaccctatggaacggaaagcgggtatgcgttccagataacagagaacttaaacagctgatacttcaggaagctcacgagagcccttattccattcacccgggcagtacaaagatgtacctagacttgaaggagaaatactggtgggttagcatgaagcgggaaattgcagagtttgtggccctatgtgatgtgtgccagcgtgtcaaggcagagcaccaacgaccggccggacttctccaacctctccaagtaccagaatggaaatgggatgaaattgggatggatttcatcaccggacttccaaaaacccaaggtggatatgattctatatgggtagttgtggatcgattaaccaaggtagcacggttcattcccgtaaagaccacctatggagggaacaaactagccgagctctacttcgctaggatcgtgagtctccatggcgttcccaagaaaatcgtatctgataggggaagccaattcacctctcacttttggaagaagctccaagaagagctgggtactcgattgaatttcagcaccgcctatcacccgcagaaagatggacagaccgagcgtctaaatcagatcctagaagatatgctccgcgcatgtgtactagatttcgggaagacctgggataagagtctcccctatgccgagttctcctacaataacagctatcaagccagcatacaattggcaccttatgaagcgttgtacgggcgcaaatgccggacaccgctattgtgggaccaagttggagaaagccaagtgttcgggactgatatcctgagagaagctgaagctaaagtcagaatcattcgggataatctaaaggtggcacagtcccggcagaaaagttatgcagataatcgtcgccgtgacctggaattcgcagtgggtgattttgtgtaccttcgggtcacgccattgcgaggtgtacacaggtttcagacaaaagggaagctcgcacctcggtatgtgggtcctttccgtatcgttgctcgacgcggagaagtcgcttaccagttggagctgcccgcctccttgggcaacgtgcatgatgtgttccatgtgtcgcaactcaataaatgccttcgagtgccatccgagcaggccgactcagagcagattgaagttcgcgaagatttgacctacgtggagaggccagtgaaaatcctggacaccatggagcgcaggaccaggaaccgggtaatccgtttttgcaagctccagtggagcaaccatgccgaagaagaagctacctgggagcgtgaagacgagctgaaggcagcccatcccgatctcctcgccaccgcccgcgcccgcgggtgcggtgacgcgtgggacccacggcgccggccggcgtcagccgcgtgcgcccggtccaccgtggaccgtgagggtgacgcgtgggccccactcccgtggacccgccccacggtccacggtggaccgggcgcacgcggctggcggcggtcggcgccgtgggtcccgcgcgtcagccgcacccgcgggcgcgggcggctgacggccgggcccacttggcagccgcgagggcgcgcccgagggcggcctcgccggcgcggccgacgggagcggcgcgcccgcgccccgatggtcaccgccggcgaccaccggcgcggcggagcggcgcccgagagagaggagggaagggggaaggcgaacggcggtcctcggctcaccccgggacaacgacgacgacgagaacggcggccggagcggaggaagacggcggcgcggctcgggatgacgatggcgacggcgctccgacggtcggcgagcgaaacggaggcgcggacgaggtcgacggcgatgcggcgatgccgagggaggtggcgccgagtaaggaggaagtccggagcggcggcggcggcggaacggagctcggcggcgatggcggagagagcggagcacggcgcgagcacgaatccgacggcgagagcgagcggcgagcggcggaaacggaagagcggagctcgggcaacgtttaaatag

SEQ ID NO: 14285 - DNA, 5283 bp, Oryza sativa
  Clone ID: TFbOSC900255j.C1.o19.fg
atggaggtggatgaagtcgggggtcgatggacattctccagggcaaatgaaggctacacgagctgcggcccggtagtcgagatgtcatggcacagggccggtgtcctgctgctaggggctcagtcctgcctgcctgtcccgggggttccggccgtaggtgggattgggtcggtactcttgtctatggctaggatgggttggaaactatgtcacgtcttccgtctgtatatcgtggtgatggccggcagcgtcacccgtcgtggtttggacatgactggtttcgtcttggagctgcggggcatgtgcgtggccctggggtatccacacggagtggactaccaggccaggccgcttccagagcaggagggtgacgatgcagagccccacgctgcttgggaggtcactgcagtgatcctcgctggctctcccgagcggacttcgctgacagtcaccgcgggtggagactccttccccgccgcttgccagagcgccgctctcctcgccatcggcactcttcaccagcgctacccggacgagttgcagcactcgccctaccgctaccaccctcgtcgcggaggagcccgcgaccacgccaccttccgggatgctagctcggaggatgacgctaccatcatgcacttggcgcgcatggtggaggcgtacgacaaggctcgtatcgacttccatcagatggtgcgccgtgggatggtcgagaacaacctgaagatcctggagctgcgtcaagagaacctgcagctcaagaaggacctggacgcagtggaggcgcagctgcatcagctcaagatcgcccagggagagatctgccgccccaagcgccgccgcgtctgccgcagccagaagatcaccgcccgcaagagcacctccaggcccgagcttgttcgtcagtccctggcgtggacttgcttcgtcgagacccctcgtgccgagcctgcgcccgtggttccccaggagggggaagcctccggcgttggtagcacggaggatatggtgatgaccaggagaagtgctaacaccggtgatggcaaccaacctgaaggcagcaaccacaaccatcagggcaacccacctccacctcctcctccgcctccaccaccaccaccagacaccaacgccattctcacccaaatcctcgcccagcaggccaacatgatgactgctttcctccaccacctccaaaatccgccacaacttaatgctccaccaccacccccacaacactctaaactcgccgagtttctccgcatccgcccacctaccttctctagctccaacaaccccgtggatgcgttggattggttgcatgccgtgggaaaaaagctagacactgtgcagtgcagcgatgaggagaaagtcatcttcgccgcccaccagctgcagggacccgcatctctatggtgggaccatttccaggctacgcagccagagggacagcctattacatgggctcgcttcaccgccgctttccgaagaacccatgtgcccgccggagtcgtggctcttaagaaaagggaattccgagagttgaagcaaggcaaccgctccgtgatggagtatttgcacgagttcaacaacctggcccgttacgctccggaggatgtgcgggaagatgaggagaagcaagagaagttcctggcaggaatggaccctgagctgtccgtccgtctagtctccagggattatccggatttccaacatctggtggacaagagcatccgcttggaagccaagcacaaggaactggagtcgcacaagcgccgcttggcgaatttccgcaaccaacagggtgctaaccaaagggtccgctacaccaatccctatccagggggatcctcctcgcagcagcaacagcagcagcagcaacctcgctccgcgcctcgacctcaattcgtggtgcgcgtcccacagccgcagcagcagcagaatcaacaagggactcgtgcgccccgtcctcctccaccgattgtgcagcctggtcaaggccgcagggacgctcaaggtccgcagcgtctgtgcttcaactgcttcgagcccgggcactttgcggataaatgcccgaagccaaggcgtcagaaaggccaagcgcctccccgccccaacaatggtggtaaggacgtcattcggggtcgtgtgaatcatgtgacggccgaggacgtgctgacaactccagacgtcatcgttggtacgttcctcattcattccatccctgctaccattttgttcgactctggggcttcccactcgtttatatctgtgccattcgtggggagaaatcagttgggggtagaaaggcttagaaaccctctgctcatcaccacccctggaggggttatgacagcaaagtattatagccctgccgtccctatagaaattcaggggattccttttccctcggatctgattctgctagacaccaagaacttggatgtgatccttgggatgaattggttggctcaattccaaggagtagtggattgcgcgagacgcactgtcactctgtaccgagggccggaacaaccggttgttttctttgcacccccaacctcagtcagaagttcagaacttcatcagatagaactgtcagaaattcccatcgtcagagagttcggagacgtgtttccggaagaactacctggtatgccgcctaagcgagagattgagttccggatagatcttgcttcaggaaccgctcctctgtacaagcgaccctaccgtatggcagcaaatgaactggccgaagttaagaaacagttggaagagttgaaagaaaaggggtatatacgtccgagtacttccccctggggtgctcctgtgatttttgtggagaagaaagacaagatgaaaaggatgtgcgttgactacagagctctcaatgaagtcaccatcaaaaacaagtaccctcttccccggatcgatgatctgttcgatcagcttaaagaggaagaccatcagcaccatctccatctggtattgggaaagctgcgggaacatcaattgtatgccaaacttagcaagtgtgagttctggttgtccgaagtcaaattcttagggcacgtgatatctgctaaaggagttgctgtggaccccgaaacagtgaccgccgtcaccgattggaagcaacccaagacagtcactcaagttcgcagtttcttaggtttggcaggatactacaggagattcatcgagaacttctccaaaatcgctcgacccatgacacaattgttgaagaaagaagagaaatttgtgtggagcccgcaatgcgagaaggcgttccaaactctcaaagaaaagctggtttcctcgccggtgttaatcttgccggatactcacaaggacttcatggtgtattgtgacgcttcgcgccaaggattggggtgcgtgctcatgcaggatggtcatgtggtggcctatgcctcacgccagctacggcctcatgaaggcaactaccctacccatgatttggagttagccgcggtggttcatgctctaaaaatctggcggcactatctcattgagaatcgctgtgaaatatatactgatcataagagtttgaaatacatcttcactcagtcggacctgaatcttcgacaaaggagatggttagaactcatcaaggattatgatgtgggaattcactatcatcctggtaaggccaacgtggttgccgacgctctaagtcaaaaaagccattgcaacactcttaacgtccgtggcattccacccgaacttaatcaacagatggaagccctgaacctaagcatagttagtcgcggattcttggctgcgctggaagccaagcccaccttgctcgatcaaatccgtgaggctcagaagaatgatccagacatgcatggactcctcaagaatatgaaacagggtaaagccgctggtttcacagaggatgaacacgggaccctatggaacggaaatcgagtatgcgttccagataacagagaacttaaacagttgatacttcaggaagctcacgaaagtccttattccatccaccctggcagcacgaagatgtacttagacttgagggagaaatactggtgggttagtatgaagcgggaaattgcagagttcgtggccctttgtgatgtgtgccagcgtgtcaaggcagagcaccaacgaccggccggacttctccaacctctccaagtacctgaatggaaatgggatgaaattgggatggatttcatcaccggacttccaaaaacccaaggtggatatgattctatatgggtagttgtggatcgattaaccaaggtagctcgattcattcctgtgaagaccacctatggagggaacaaactagccgaactctacttcgctaggatcgtaagtctccatggcgttcctaagaaaatcgtatctgataggggaagccaattcacctctcacttttggaagaagctccaaaaagagctgggtacccgattaaactttagcaccgcgtatcacccgcagacagatgggcagaccgagcgtctaaatcagatcctagaagatatgcttcgcgcatgtgtcctagatttcgggaagacctgggataagagtctcccctatgccgagttctcctacaacaacagctatcaagccagcatacaaatggcaccttatgaagcgttgtatgggcgcaaatgccggacaccgctaatgtgggatcaagttggggaaagccaagtgttcgagactgatatcctgagagaagctgaagctaaagtcagaaccattcgggataatctaaaggtggcacagtctcggcagaaaagttatgcagataaccgtcgccgtgacctggaattcgcagtggacgattttgtatatcttcgggtcacgccattgcgaggtgtacacaggtttcggacaaaagggaagctcgcacctcggtatgtgggtcctttccgtatcgttgctcgacgcggagaagtcgcttaccaattggagctgcccgcctccttgggcaacgtgcatgatgtgttccatgtgtcgcaactcaagaaatgccttcgagtgccatccgagcaggccgactcagagcaaattgaagttcgcgaagacttgacctacgtggagaggccaatgaagatcctggacaccatggagcgcaggaccaggaaccgggtaatccgtttttgcaaggtccagtggagcaaccacgccgaagaagaagctacctgggagcgcgaagacgagctgaaggcagcccatccagatctcttcgccagttcttccgaatctcggggtcgagattccgtttaa

SEQ ID NO: 14286 - DNA, 5418 bp, Oryza sativa
  Clone ID: TFbOSC900260j.C1.o1.fg
atggatgaagtcgggggtcgatggacattctccaggacaaatgaaggctacacgagctgcggcccgatggccggcagcgttacccgtcgtggtttgcacatgactggcttcgtcttggagctgcggggcctgtgcgtggtcttggggtatccacatggagtggattaccaggccaggccgctcccggagcaggagggtgaggatgcagagcctcacgctggttgggaggtcactgcagtgatcctctccggctctcctgagcggacttcgctggcagtcaccgcgggcggagattccttccccgccgcttgccagaacgccgctctcctcgccatcggcacccttcaccagcgctacccggacgagttgcagcactcgccctaccgctaccacccccgtcgcggaggagccagcgaccacgccaccttccgagacgccagctcggaggatgacgctaccgtcgtgcatctggcacgcatggtggaggcgtacgacgtggctcgtatcgacttccaccagatggtgcgtcgtggcatggtggagaacaacatgaagatcctggagctgcgtcaggagaacctgcagctcaagaaggacctcgacgcgttggaggcgcagctgcaccagctcaaggtcgcccagggtgagatctgccgtcccaagcgtcgccgcgtctgccgcagccagaagatcaccgcccgcaagagcacctccaggcccgagcttgttcgtcagtccctggcatggacttgcttcgtcgagacccctcgtgccgagcctgcgcccgtggttccccaggagggggaagcctccggcgttggtagctcggagggtgcgctgttgctcaccttccgccctggcccgtcgcagcgctctccttctctgtttgctggttctgtgtggagtttacagatggtgtcgaccaggagaaatgttaacaccggtgaaggcaaccaacccgaaggcagcaaccccaacccccaaggcaatccacctccaccaccaccaccagacaccaacgccattctcactcaaatcctcgcccagcaagccaacatgatgaatgctttcctccaccacctccaaaatccaccacaacagaatgctccaccaccacctccccaacactccaaactcgccgaatttctccgcatccgcccacccaccttctctagctccaacaatcctgtagatgcgttggattggttgcatgccgtggggaagaagctggacacggtgcagtgcagcgacgaagagaaagtcatcttcgccgcccatcagctgcagggacccgcatctctatggtgggaccatttccaggccacgcagccagagggacaaccgattacttgggctcgcttcaccgccgccttccggagaacccatgtgcctgccggagtcgtggctctcaagaagaaggaattccgagagttgaagcaaggcaaccgctccgtaatggagtatttgcatgagttcaacaatctagcccgttacgctccggaggatgtgcgggaagatgaggagaagcaagagaagttcttggcaggaatggaccccgagctgtctgttcgtctagtctctggagactatcctgattttcaacgactggtggacaagagcatccgcttggaagccaagcacaaggagctggaatcgcacaagcgccgcttggcgaatttccgcaatcaacagggtgctaaccagagggtccgctacaccaatccctacccagggggatcctcctcgcagcagcagcagcagcagcagcagcaatctcgctccgcgcctcgaccccaattcgtggtgcgcgtcccacagccgcagcagcagcagaatcagcaagggactcgtgcgccccgtcctcctactccagctgggcagcccgttcaaggccgcagggacgcttcaggtccgcagcgtctgtgcttcaactgcttcgagcccgggcactttgcggataaatgcccgaagccaaggcgtcagcaaggccaagcgcctccccgctccaacaacagtggcaaggacgtcctccgtggtcgtgtgaaccacgtgacggccgaggacgtgctgacaactccagacgtcatcgttggtacgttcctcgtccattccatccctgctacaattttgttcgactctggagcttcccactcgtttatatctgtgccattcgtggggaaaaatcagttgggggtagaaaggcttagaaaccctctgctcatcaccacccctggcggggttatgacagcaaagtattatagccctgccgttcctatagaaattcaggggattccttttccttcggatctgatcctgctagacacaaagaacttggacgtgatccttgggatgaattggttggctcaattccaaggagtagtggattgcacgagacgcactgtcactctgtatcgagggccagaacaaccggttgttttctttgcacctccaacctctgtcagaagttcagaactgcatcagataggtccgtcagaaatccccatagtcagagagttcgaagatgtgtttccagaagaactacctggtatgccgcccaagcgagagattgagttccggatagatcttgttccaggaaccactcctctgcacaagcgaccctaccgtatggcagcaaatgaactggccgaagtcaagaaacagttggaagagttgaaagaaaaggggtatatacgtccgagtacttccccatggggtgctcctgtgatttttgtagagaagaaagacaaaacgaagaggatgtgcgttgactacagagctctcaatgaagtcaccatcaaaaacaagtaccctcttccccggatcgatgatctgttcgatcagcttaaaggtgccactgtattctccaagattgatcttcgttccggatatcatcaattacgtattcgtgaagaagatattccgaagaccgcattcactacgcgatatgggctgtatgaattcacggtgatgtcgttcggtttgaccaatgcacctgccttcttcatgaacttaatgaacaaagtgttcatggaatacttggataagtttgttgtggttttcatcgatgacattctaatatactcacaatcagaagaagaccatcagcaccatctccgtctggtattgggaaaactgcgggaacatcaattgtatgccaagcttagcaagtgtgagttctggttgtccgaagtcaaattcttagggcacgtgatatctgctaagggagttgctgtggaccccgaaacagtgaccgccgtcaccgattggaagcaacccaagacagtcactcagattcgcagtttcttaggtttggcaggatattaccggagattcatcgagaacttctccaaaatcgctcgacccatgacacagttgttgaagaaagaagagaaatttgtgtggagcccgcaatgcgagaaggcgttccaaactctcaaggaaaagctggtttcctcgccagtgttaatcttgccggatactcgtaaggatttcatggtgtattgtgatgcttcgcgccaaggattggggtgtgtgctcatgcaggacggtcatgtggtagcctatgcttcacgtcagctacgtcctcatgaaggcaactaccctacgcatgatttggagttagcagcggtggttcatgctctaaaaatctggcggcactatctcattgggaaccgctgcgaaatatatactgatcacaagagcttgaagtacatcttcacccagtcggatctgaatcttcggcaaaggagatggttagaactcatcaaggattatgatgtgggaatacactatcatcctggtaaggccaacgtggttgccgacgctctaagtcgaaagagccactgcaacactctcaacgtccgaggcattccgcccgagcttaatcaacagatggaagccctgaacctaagcatagttggtcgcggattcttggccgcgttggaagccaagcctaccttgctcgatcaaatccgcgaggctcagaagaatgatccggacatgcatggactcctcaagaatatgaaacagggtaaagccgcaggtttcacagaggatgaacacggaactctatggaacgggaagcgggtatgcgttcccgataacagagaacctaaacagctgatacttcaggaagctcacgaaagtccttattccattcacccgggcagtaccaagatgtacttagacttgaaggagaaatactggtgggtcagcatgaagcgggaaattgcagagtttgtggctctatgtgatgtgtgccagcgtgtcaaggcagaacaccaacgaccggctggacttctccaacctctccaagtgccggaatggaaatgggatgaaattgggatggatttcatcaccggccttccaaaaacccaaggtggatatgattctatatgggtaatagtggatcgattaaccaaggtagctcgatttattcctgtgaagaccacctatggagggaacaagctagcggagctctacttcgctaggatcgtgagtctccatggcgttcccaagaaaatcgtatctgataggggaagccaattcatctctcacttttggaagaagctccaagaagagctgggtactcggttgaatttcagcaccgcctatcacccgcagacagatggacagaccgagcgtctaaatcagatcctagaagatatgctccgcgcatgtgtcctagatttcgggaagacttgggataagagtctcccctatgccgagttctcctacaataacagctaccaagccagcatacaaatggcaccttatgaagcgttgtacgggcgcaaatgccgaacaccgctattgtgggaccaagtcggagaaagtcaagtgttcgggaccgatatcctgagagaagctgaagctaaagtcagaatcattcgggataatctaaaggtggcacagtcccggcagaaaagttatgcagataaccgacgccgtgatctggaattcgcagtggatgattttgtgtatcttcgggtcacgccattgcgaggtgtgcacaggtttcagacgaaagggaagctagcacctcggtatgtgggtcccttccgtatcatcgctagacgcggagaagttgcttaccagctggagttgcccgcctccttgggtaacgtgcatgatgtgttccacgtgtcgcagctcaagaaatgtctccgagtgccatccgagcaggccgactcagagcaaattgaagttcgcgaagacttgacctatgtggagaggccagtgaaaatcctggacaccatggagcgcaggaccaggaaccgagtaatccgtttttgcaaggtccagtggagcaaccacgccgaagaagaagctacttgggagcgcgaagacgagctgaaggcagcccatcccgatctcttcgccagttcttccgaatctcggggtcgagattccgtttaa

SEQ ID NO: 14287 - DNA, 5337 bp, Oryza sativa
  Clone ID: TFbOSC900286j.C1.o20.fg
atgtcatggcacagggccggtgtcctgctgctaggggctcagtcctgcctgcctgtcccgggtgttccggccgtaggtgggattgggtcggtactcttgtctatggctaggatgggttggaaactatgtcacgtctttcgtctgtataccgtggtgatggccggcagcgtcacccgtcgtggtttggacatgactggtttcgtcttggagctgcggggcatgtgcgtggtcctggggtatccacatggagtggactaccaggccaggccgcttccggagcaggagggggacgatgcagagccccacgctgcttgggaggtcactgcagtgatcctcgctggctctcccgagcggacttcgctgacagtcaccgcgggtggagactctttccccgccgcctgccagagcgccgctctcctcgccatcggcactcttcaccagcgctacccggacgagttgcagcactcgccctaccgctaccaccctcgtcgcggaggagcccgcgaccacgccaccttccgggatgctagctcggaggatgacgctaccatcgtgcacttggcgcgcatggtggaggcgtacgacgcggctcgtatcgacttccatcagatggtgcgccgtgggatggtcgagaacaacttgaagatcctggagctgcgtcaggagaacctgcagctcaagaaggacctagacgcggtggaggcgcagctgcatcagctcaagatcgcccagggagagatctgccgccccaagcgtcgccgcgtctgccgcagccagaagatcaccgcccgcaagagcacctccaggcctgagcttatggtgatgaccaggagaaatgctaacaccggtgatggcaaccaacctgaaggcagcaaccacaaccatcagggcaacccacctccacctcctcccccgcctccacccccaccaccagataccaacgccattctcacccaaatcctcgcccagcaggccaacatgatgactgctttcctccaccacctccaaaatccgccacaacttaatcctccaccaccacccccacaacactctaaactcgccgagtttctccgtatccgcccacctaccttctctagctccaacaaccccgtggatgcgttggattggttgcatgccgtggggaaaaagctagacactgtgcagtgcagcgatgaggagaaagtcatcttcgccgcccaccagctgcatggacccgcatctctatggtgggaccatttccaggctatgcagccggagggacagcctgttacttgggcccgcttcaccgccgctttccggagaacccatgtgcccgccggagtcgtggcccttaagaaaagagaattccgagagttgaagcaaggcaaccgctccgtgatggagtatttgcacgagttcaacaacctggcccgttacactccggaggatgtgcggaaagatgaggagaagcaagaaaagttcctggcaggaatggaccctgagctgtccgtccgtctagtctctggggactatccggatttccaacgtctggtggacaagagcatccgcttggaagccaagcacaaggaactggagtcgcacaagcgccgcttggcgaatttccgcaaccaacagggtgctaaccaaagggtccgctacaccaatccctatccagggggatcctcctcgcagcagcaacaacagcagcagcaacctcgctccgcgcctcgacctcaattcgtggtgcgcgtcccacagccgcagcagcaacagaatcaacaagggactcgagcgccccgtcctcctacgccaactgtgcagcctggtcaaggccgcagggacgcttcaggtccgcagcgtctgtgcttcaactgcttcgagcccgggcactttgcggataaatgcccgaagccaaggcgtcagcaaggccaagcgcctccccgccccaacaacggtggtaaggacgtcagtcggggtcgtgtgaaccatgtgacggccgaggacgtgctgacaactccagacgtcatcgttggtacgttcctcattcattccatccctgctaccattttgttcgactctggagcttcccactcgtttatatctgtgccattcgtggggagaaatcagttgggggtagaaaggcttagaaaccctctgctcatcaccacccctggaggggttatgacagcaaagtattatagccctgccgtccctatagaaattcaggggattccttttccctcggatctgatcctgctagacaccaagaacttggatgtgatccttgggatgaattggttggctcaattccaaggagtagtggattgcgcgagacgcactgtcactctgtaccgagggccggaacaaccggttgttttctttgcacccccaacctcagtcagaagttcagaacttcatcagataggactgtcagaaatccccatcgtcagagagttcggagacgtgtttccggaagaactacctggtatgccgcctaaacgagagattgagttccggatagatcttgctccaggaaccactcctctgtacaagcgaccctaccgtatggcagcaaatgaactggccgaagttaagaaacagttggaagagctgaaagaaaaggggtatatacgtccgagtacttccccctggggtgctcctgtgatttttgtggagaagaaagacaagacgaagaggatgtgcgttgactacagagctctcaatgaagtcaccatcaaaaacaagtaccctcttccccggatcgacgatctgttcgatcagcttaaaggtgccactgtattctccaagattgatcttcgttccggatatcaccaattacgtattcgcgaagaagatattccgaagaccgcattcaccacgcgatacggactgtttgaattcacggtgatgtcgttcggtttaaccaatgcccctgccttcttcatgaacttaatgaacaaagtgttcatggaatacttggataagtttgtggtggttttcattgatgacattctgatatactcacaatcagaggaagaccatcagcaccatctccgtctggtattgggaaagttgcgggaacatcaattatatgccaaacttagcaagtgtgagttctggttgtccgaagtcaaattcttagggcacgtgatatctgctaaaggagttgctgtggaccccgaaacagtgaccgccgtcaccgattggaagcaacccaagacagtcactcaagttcgcagtttcttaggtttggcaggatactaccggaggttcatcgagaacttctccaaaatcgctcgacccatgacacagttgttgaagaaagaagagaaatttgtgtggagcccgcaatgcgagaaggcgtttcaaactctcaaagaaaagttggtttcctcgccagtgttaatcttgccggatactcgcaaggacttcatggtgtattgtgacgcttcgcgccaaggattggggtgcgtactcatgcaggatggtcatgtggtggcctatgcctcacgccagctacggcctcatgaaggcaactaccctacccatgatttggagttagcagcggtggttcatgctctaaaaatctggcggcattatctcattgggaatcgctgtgaaatatatactgatcataagagtttgaaatacatcttcacccagtcggatctgaatcttcggcaaaggagatggttagaactcatcaaagattatgatgtgggaattcactatcatcctggtaaggccaacgtggttgccgacgctctaagtcggaaaagccactgcaacactcttaacgtccgtggcattccactcgaacttaatcaacagatggaagccctgaacctaagcatagttggtcgcggattcttgactacgttggaagccaagcccaccttgctcgatcaaatccgcgaggctcagaagaatgatccagacatgcatggactcctcaagaatatgaaacagggtaaagccgctggtttcacagaggatgaacacggaaccctatggaacggaaatcgagtatgcgttccagataacagagaacttaaacagttgatacttcaggaagctcacgaaagtccttattccatccaccctggcagcacgaagatgtacttagacttgaaggagaaatactggtgggttagtatgaagcgggaaattgcagagttcgtggccctttgtgatgtgtgccagcgtgtcaaggcagagcaccaacgaccggccggacttctccaacctctccaagtacctgaatggaaatgggatgaaattgggatggatttcatcaccggacttccaaaaacccaaggtggatatgattctatatgggtagttgtggatcgattaaccaaggtagctcgattcattcctgtgaagaccacctatggagggaacaaactagccgagctctacttcgctaggatcgtaagtctccatggcgttcccaagaaaatcgtatctgataggggaagccaattcacctctcacttttggaagaagctccaagaagagctgggtacccgattaaacttcagcaccgcgtatcacccgcagacagatgggcagaccgagcgtctaaatcagatcctagaagatatgcttcgcgcatgtgtcctagatttcgggaagacctgggataagagtctcccctatgccgagttctcctacaataacagctaccaagccagcatacaaatggcgccttatgaagcgttgtatgggcgcaaatgccggacaccgctcctgtgggaccaagttggggaaagccaagtgttcgggactgatatcctgagagaagctgaagcgaaagtcagaaccattagggataatctaaaggtggcacagtcccagcagaaaagttatgcagataaccgtcgccgtgacctggaattcgcagtggatgattttgtgtaccttcgggtcacgccattgcggggtgtacacaggtttcagacaaaggggaagctcgcacctcggtatgtgggtcctttccgtatcgttgctcgacgcggagaagtcgcttaccagttggagctgcccgcctccttgggcaacgtgcatgatgtgttccatgtgtcgcaactcaagaaatgccttcgagtgccatccgagcaggccgactcagagcaaattgaagttcgcgaagacttgacctacgtggagaggccagtgaagatcctggacaccatggagcgcaggaccaggaaccgggtaatccgtttttgcaaggtccagtggagcaaccacgccgaagaagaagctacctgggagcgcgaagacgagctgaaggcagcccatcccgacctcttcgccagttcttccgaatctcggggtcgagattccgtttaa

SEQ ID NO: 14288 - DNA, 5379 bp, Oryza sativa
  Clone ID: TFbOSC900290j.C1.o5.fg
atgtcatggcacagggccggtgtcctgctgctaggggctcagtcctgcctgcccgtcccgggtgttccggccgtaggtggggttgggtcggtactcttgtctatggctaggatgggttggaaactatgtcacgtcttccgtctgtataccgtggtgatggccggcagcgtcacccgtcgtggtttggacatgactggtttcgtcttggagctgcggggcatgtgcgtggtcctggggtatccacacggagtggactaccaggccaggccgcttccggagcaggagggtgacgatgcggagccccacgctgcttgggaggtcactgcagtgatcctcgctggctctcccgagcggacttcgctaacagtcaccgcgggtggagactccttccccgccgcttgccagagcgccgctctcctcgccatcggcactcttcaccagcgctacccggacgagttgcagcactcgccctaccgctaccaccctcgtcgcggaggagcccgcgaccacgccaccttccgggatgctagctcggaggatgacgctaccatcgtgcacttggcgcgcatggtggaggcatacgacgcggctcgtatcgacttccatcagatggtgcgccgtgggatggtcgagaacaacttgaagatcctggagctgcgtcaagagaacctgcagctcaagaaggacctagacgcggtggaggcgcagctgcatcagctcaagatcgcccagggagaggtctgccgccccaagcgtcgccgcgtctgccgcagcctgaagatcaccgcccgcaagagcacctccaggcctgagcttgttcgtcagtccctggcgtggacctgcttcgtcgagacccctcgtgccgagcctgcgcccgtggttccccaggagggggaagcctccggcattggtagcacggaggatgcgctgttgctcaccttccgtcctggcccgtcgcagcggagaaatgctaacaccggtgatggcaaccaacctgaaggcagcaaccacaaccatcagggcaacccacctccacctcctcctccgcctccacccccaccaccagataccaacgccattctcacccaaatcctcgcccagcaggccaacatgatgactgctttcctccaccacctccaaaatccgccacaacttaatgctccaccaccacccccacaacactctaaactcgccgagtttctccgcatccgcccacctaccttctctagctccaacaaccccgtggatgcgttggattggttgcatgccgtgggaaaaaagctagacactgtgcagtgcagcgatgaggagaaggtcatcttcaccgcccaccagctgcagggacccgcatctctatggtgggaccatttccaggctacgcagccagagggacagcctattacatgggctcgcttcaccgccgctttccgaagaacccatgtgcccgccggagtcgtggcccttaagaaaagggaattccgagagttgaagcaaggcaaccgctccgtgatggagtatttgcacgagttcaacaacctggcccgttacgctccggaggatgtgcgggaagatgaggagaagcaagagaagttcctggcaggaatggaccctgagctgtccgtccgtctagtctctggggactatccggatttccaacgtctggtggacaagagcatccgcttggaagccaagcacaaggaactggagtcgcacaagcgccgcttggcgaatttccgcaatcaacagggtgctaaccaaagggtccgctacacaaatccctatccagggggatcctcctcgcagcagcagcaacctcgctccgcgcctcgacctcaattcgtgcctggtcaaggccgcagggacgctcaaggtccgcagcgtctgtgcttcaactgcttcgagcccgggcactttgcggataaatgcccgaagccaaggcgtcagcaaggccaagcgcctccccgccccaacaacggtggtaaggacgtcgttcggggtcgggtgaaccacgtgacggccgaggacgtgctgacaactccagacgtcatcgttggtacgttccccattcattccatccctgctaccattttgttcgactctggagcttcccactcgttcatatctgtgccattcgtggggagaaatcagttgggggtagaaaggcttagaaaccctctgctcatcaccacccctggaggggttatgacagcaaagtattatagccctgccgtccctatagaaattcaggggattccttttccctcggatctgattctgctagacaccaagaacttggatgtgatccttgggatgaattggttggctcaattccaaggagtagtggattgtgcgaggcgcactgtcactctgtaccgagggccggaacgaccggttgttttctttgcacccccaacctcagtcagaagttcagaacttcatcagatagaactgtcagaaattcccatcgtcagagagttcggagacgtgtttccggaagaactacctggtatgccgcctaagcgagagattgagttccggatagatcttgctccaggaaccgctcctctgtacaagcgaccctaccgtatggcagcaaatgaactggccgaagtcaagaaacagttggaagagttgaaagaaaaggggtatatacgtccgagtacttccccctggggtgctcctgtgatctttgtggagaagaaagacaagacgatgaggatgtgcgttgactacagagctctcaatgaagtcaccatcaaaaacaagtaccctcttccccggatcgatgatctgttcgatcagcttaaaggtgccactgtattctccaagatcgatcttcgttccggatatcaccaattacgtattcgtgaagaagatattccgaagaccgcattcaccacgcgatacggactgtatgaattcacggtgatgtcgttcggtttaaccaatgctcctgccttcttcatgaacttaatgaacaaagtgttcatggaatacttggataagtttgtggtggttttcattgatgacattctgatatactcacaatcagaggaagaccatcagcaccatctccgtctggtattgggaaagctgcgggaacatcaattgtatgccaaacttagcaagtgtgagttctggttgtccgaagtcaaattcttagggcacgtgatatctgctaaaggagttgctgtggaccccgaaacagtgaccgccgtcaccgattggaagcaacccaagacagtcactcaagttcgcagtttcttaggattggcaggatactaccggagattcatcgagaacttctccaaaatcgctcgacccatgacacagttgttgaagaaagaagagaaatttatgtggagcccgcaatgcgagaaggcgtttcaaactctcaaagaaaagctggtttcctcgccagtgttaatcttgccggatactcgcaaggacttcatggtgtattgtgacgcttcgcgccaaggattggggtgcgtgctcatgcaggatggtcatgtggtggcctatgcctcacgccagctacgacctcatgaaggcaactaccctacccatgatttggagttagcagcggtggttcatgctctaaaaatctggcggcactatctcattgggaatcactgtgaaatatatactgatcataagagtttgaaatacatcttcacccagtcggatctgaatcttcggcaaaggagatggttagaactcatcaaggattatgatgtgggaattcactatcatcctggtaaggccaacgtggttgccgacgctctaagtcgaaaaagccattgcaacactcttaacgtccgtggcattccacccgaacttaatcaacagatggaagccctgaacctaagcatagttagtcgtggattcttagctgcgctggaagccaagcccaccttgctcgatcaaatccgcgaggctcagaagaatgatccagacatgcatggactcctcaagaatatgaaacagggtaaagccgctggtttcacagaggatgaacacggaaccctatggaatggaaatcgggtatgcgttccagacgttcgggaacttaaacagttgatacttcaggaagctcacgaaagtcgttattccatccaccctggcagtacgaagatgtacttagacttgaaggagaaatactggtgggttagcatgaagcgggaaattgcagagtttgtggccctgtgtgatgtgtgccagcgtgtcaaggcagagcaccaacgaccggccggacttctccaacctctccaagtacctgaatggaaatgggatgaaattgggatggatttcatcaccggacttccaaaaacccaaggtggatatgattctatatgggtagttgtggatcgattaaccaaggtagctcgattcattcctgtgaagaccacctatggagggaacaaactagccgaactctacttcgctaggatcgtaagtctccatggcgttcccaagaaaatcgtatctgataggggaagccaattcacctctcacttttggaagaagctccaagaagagctgggtacccgattaaacttcagcaccgcgtatcacccgcagacagatgggcagaccgagcgtctaaatcagatcctagaagatatgcttcgcgcatgtgtcctggatttcgggaagacctgggataagagtctcccctatgccgagttctcctacaataacagctaccaagccagcatacaaatggcaccttatgaagcgttgtatgggcgcaaatgccggacaccgctaatgtgggatcaagttggggaaagccaagtgttcgggactgatatcctgagagaagctgaagctaaagtcagaaccattcgggataatctaaaggtggcacagtcccggcagaaaagttatgcagataaccgtcgccgtgacctggaattcgcagtggacgattttgtatatcttcgggtcacgccattgcgaggtgtacataggtttcggacaaaagggaagctcgcacctcggtatgtgggtcctttccgtatcgttgctcgacgcggagaagtcgcttaccaattggagctgcccgcctccttgggcaacgtgcatgatgtgttccatgtgtcgcaactcaagaaatgccttcgagtgccatccgagcaggccgactcagagcaaattgaagttcgcgaagatttgacctacgtggagaggccagtgaaaatcctggacaccatggagcgcaggaccaggaaccgggtaatccgtttttgcaaggtccagtggagcaaccacgccgaagaagaagctacctgggagcgcgaagacgagctgaaggcagcccatcccgatctcttcgccagttcttccgaatctcggggtcgagattccgtttaa

SEQ ID NO: 14289 - DNA, 4695 bp, Oryza sativa
  Clone ID: TFbOSC900319j.C1.o26.fg
atggatactacgtcacttccctgccacgagctcattgagggtaccccatctcatccactgcacatgtgctcctacctccttgatgccacaggttggggagaagggcaacaaggtaggaggaggtcgtcggcaagccaaaatatgaccggtgagaggctaacccatcgtgtggagtctgttatgagggtatccgagtttagctcgttgcccgcgtcttgtgctgggagctcggatcacgtcgtgtggttgtggggatggacgcagctagagcatggcgtgagaagtggtcttggtggtttagccacacgatcgctggggaaattcctaacaattggtatcagagcacggtttaggaagtggactcgtgaccgcgcattggaaggcgtcttcatgccgcgtcgtcgctcgtcgtcaccgatcgtgcgcactcctcatgactccggcggccgcgccacgggcagcggcgggggtgaccgcgggctggtgatccaccgcgtggtgaaagaaggaggcggctcggtgaactacccgctgctgaccaagaccaactacaacgactgggcgctactgatgaagatcaagctgcaggctcgctgcctgtgggcggcgatcgagcccgacggcgtggacgtccctctgcatgaggaccggatggctcttgacgctatctgcagtgccgtgccgccggagatgattggcaccctggcgaccaaagcgtcggcccgggaagcctgggaatgcatcaagacaatgcgagtcggcaacgaccggattcgcaaggcgagtgcacagaaagtgcgctctgagtatgaatcgcttgcgttccgcggtgacgagaccgtggaagatttcgctctacggctcacaaccatcgtcaaccaacttgcaaccctcggtgatcctgaacctgctgataaagtcgtcgaaaagtaccttcgggtagctcgtcccaggttcaatcaactcatcttgtctattgaaactcttctcgatatctctactctgtccatggaggaagttactggcagactaaaagccgctgaggattctgggcaatcctcgtcgcacaccgccgatgggaagctgtacctaactgaggaggagtgggctgaacgtcagaagaagaaggatcaagaggcaaagcggggtgactcgggcggctctggcggccgcggcaagcgccgtggcgggagagggcgcactggtggcggcgggactgcgagccccgagagcacgaactctggttcggcgcgcaagggagacaaattccgaaattgcggcaaacttgggcactgggcgaaggactgcaggagcaagtccaagcgcgaagaacaggctcacgtcgcccaggaggatgaagaagagcacaccttgatgttgctcaccggcggctgcgttgacacggtcgacgcggcggcaccggagggcgacacgcccacaccgccccaccaagccgtggtggaactcgtggagatgaaagtatttgcagcgctcgacgacgcggctgaccatgatcccgggcgctggattatggattccggcgcgtcaaaccatatgacgggcagcaggatggcgttcgccgacctcgacacgaacatcaccgggaacgtgcgactcggcgatggatccgtggtccggatcgcaggacggggcacaattctctttgcctgcaagaatggtgagcaccgcactctgtcgaacacctattatcttccccgtcttgctgccaatattatcagcattgggcaattggatgagaccggcttcaaagtgctggcagaggatggcatcatgcgggtctgggatgagcagcggcgtctgcttgcccggatccctcgcaccccagggcgactgtacatgcttgacatcaacctggcgcgcccggtctgtttggcggcacacgccgacgaagacgcgtggcgctggcatgctcgcctcgggcacataaacttcagggcgctctgcaagatgggaaaggaggagctggtacgtggtctaccatgtttgtcacaggttgatcaggtctgtgaggcctgtctcgccaggaaacaccggaggtcgccgttcccgcggcaggcactttgccggtctgacgagccgctggcgctgctacatggagatctctgtggaccgatcacgccggcgacacccagtggcaaccgctatttccttctactcgtcgacgactacagccggtacatgtgggtcgccctcctctccaccaaagatgcggcgccggctgccatcaagcgtattcaggcggtggcagaaaggaagagtggacgcaagctccgcgcgttgcggacggatcgcgggggagaattcacgtctacacagttcgccgagtactgcgccgagctgggaatgcggcgcgagctcacggcgccctactctccgcaacagaacggcgttgtcgagcggcgaaaccaatccgtggtgggcacggcgcggagtatgctcaaggtgaaggggctgccaggtatgttttggggagaggcgataaataccgccgtgtatctgctcaacaggtcgtcgtccaagggtatcggcggcaagaccccgtacgcgctgtggaacggcgttccgccggccgtgcaccatctgcgcacgtttgggtgtgtggcacacgtgaagacgaccaccccgaacctgaagaaactggatgacaggagtcgtccaatgatctttgtcggctacgagccggggtccaaggcgtatcgcgcctatgatccggctactcggcgtgttcacatctcccgtgacatcgtcttcgacgaagcagcccagtgggactgggatgctgaggcggccgctgatctcgacaccgacttcgtcgttgagtacaccacggtgtaccatcctggctcgctgtcaggaacacgccaagacgctggggagccgcctgctcgatcttcatcatcgccgcaaacgccatcagactcaccgacagccggccgaacaccttcggtgcatggcgatgcgccggcggttgaatttgtgtcgccaccaactggagcagctgctaatcttgatgcagaccacgacgacgcaccactccgtttccgcacgatggacaatgtgctggggccggccatgctgccaggtctcgctaatcgtgaggtccaggaagagctgatgatggtgagcggagaagaaccggcaacgttcgctcaagctgaacgcgacgaggattggcgtcgggcaatgctcgatgaaatctcttcgatagaggagaacaagacctggaggctcgtcgatctgccttcgggacatcggccaattgggctgaaatgggtgtataaactgaagaaagatgctcagggcgtcgtcgtcaaacacaaggcgagattggtggcaaagggctacgtgcagagggctggaattgactttgatgaggtattcgctcctgttgctcgtcttgattctgttcgtttgttgctcgctctcgctgcgcaggaaggttggatggtgcatcatatggacgttaaatcagcgttcctcaatggggaactgattgaggaggtgtatgttgttcagccaccggggtttgagatcgatggacaggagaacaaggtttacaggcttgataaggcgctgtatggtcttcgccaagcacccagagcttggaacaccaagctagactgcacactgaagaaacttggcttcaagcagagcccgttggagcatgggctgtacgcgcgcggcgatggcagtgggcgactgctcgtcggtgtgtatgtggatgatctggtaattgtcgggggtgacagtggcatgatcaagggattcaaagagcagatgaaggctgaatttaagatgagtgatcttggtcctttgagtttttatcttgggatcgaggtacatcaagaagctggaatcatcactttaaagcaagcagcgtatgcgtcgcgtattgtggagaaggctgggctcaccggctgcaacccctgtgcaacaccgatggaaccacgtctaaagctgagcaaggaaagtgcaggatcgctagttgatgcgacagaatacagaagtctagtgggaagcttgcgctatctggtgaacacccgaccagaccttgcatattcggttggttatgtcagtcgtttcatggagaaacccacggacgaacacttggcggcagtgaagcgcatcataaggtatgttgctggtaccattcatcttgggtgccgctatgtgaaggaagttgaaggaggactgcagggttacagtgacagtgatatggctggagacattgacactcgcaagagcaccacaggagtaattttctttctcggcaaaaatcctgttagctggcagtctcaaaaacagagagttgtagcactctcctcctgtgaatctgagtatattgcagctgcaacagctgcatgccagggcatttggcttgcccggctcctcggtgacctcaggaatgcagcaactgaagtcgtcgatctcagggtggacaaccaatccgctctggccctgatgaagaaccctgtttttcacgatcgaagtaagcacattcaaacaaaatttcatttcattcgtgaagccgtggagaatggggaaatcacaccgagttacatcggcacagaagggcaacttgcagatatcctgacgaagccgctttctcgaatcaagtttcaggagctgcgggaaaaaagaaggaactatatacatacatgtgtattctcctaa

SEQ ID NO: 14290 - DNA, 4158 bp, Oryza sativa
  Clone ID: TFbOSC900321j.C1.o10.fg
atgtcgtggcacagggccggtgtcctgctgctaggggctcagtcctgcctgcctgtccagggggttccggccgtaggtgggattgggtcggtactcttgtctatggctaggatgggttggaaactatgtcacgttttccgtctgtataccgtggtggctacgcagccagaggggcagcctattacttgggcccgcttcaccgccgccttccggaggacccatgtgcccgccggagtcatggcccttaagaaaagggagttccgagagttgaagcaaggcaaccgctccgtgatggagtatttgcatgagtttaacaacttggcccggtacgccccggaggatgtgcgggaagatgaggagaagcaagagaagttcttggcaggaatggacccggagctgtctgtccgtctagtctccggtgactatccggatttccaacgtctggtggacaaaagcatccgcttggaagccaagcacaaggaactggagtcgcacaagcgtcgcttggcgaatttccgcaaccaacagggtgctaaccaaaggatccgctacaccaatccctatccagggggatcttcctcgcagcagcagcaacctcgctccgcgcctcgacctcaattcgtggtgcgcgtcccacagccgcagcaacagcagagccagcaagggacccatgcgccccgtcctcctacgccagccgcgcagtctggtcaaggccgcagggacgttcaaggtccgcagcgtctgtgcttcaactgcttcgagcccgggcactttgcggataaatgcccgaagtcgaggcgccagcaaggccaagcgcctccctgctccaacaacggtggtaaggatgtcattcggggtcgtgtgaaccacgtgacggccgaggacgtgctgacaactccagacgtcatcgttggtacgttcctcatccattccatccctgctaccattttgttcgactctggagcttcccactcgtttatatctgtgccattcgtggggagaaatcagttgggggtagaaaggcttaggaaccctctactcatcaccacccctggaggggttatgacagcaaagtattatagtcctgccgtccctatagaaattcaggggattccttttccctcggatctgattcttctagacaccaagaacttggatgtgatccttgggatgaattggttggctcaattccaaggagtagtggattgtgcaagacgcactgtcactctgtaccgagggccggaacaaccggttgttttctttgcacctccaacctctgtcagtagttcagaacttcatcagataggactgtcagaaatccccattgtcagagagttcggagacgtgtttccggaagaactacccggtatgccgcccaagcgagagattgagttccggatagatcttgctccaggaaccactcctctgtacaagcgaccctaccgtatggcagcaaatgaactggccgaagttaagaaacagttggaagagttgaaagaaaaggggtatatacatccgagaacttccccctggggtgctcctgtgatttttgtggagaagaaagacaagacgaagaggatgtgcgttgactacagagctctcaatgaagtcaccatcaaaaacaagtaccctcttccccggatcgatgatctgttcgatcagcttaaaggtgccacggtattctccaagattgatcttcgttctggatatcaccagttgcgcatccgtgaagaagatattccgaagaccgcattcaccacgcgatacggactgtatgaattcacggtgatgtcgttcggtttaaccaatgctcctgccttcttcatgaacttaatgaacaaagtgttcatggaatacttggataagtttgttgtggttttcattgatgacattctggtatactcacaatcagaggaagaccatcagcaccatctccgtctggtgttgggaaagttgcgggaacatcaattgtacgccaaacttagcaagtgtgagttctggttgtccgaagtcaaattcttagggcacgtgatatccgctaaaggagttgctgtggatcccgaaacagtgaccgccgtcaccgattggaagcaacccaagacagtcactcaaattcgcagtttcttaggtttggcaggatactaccggaggttcatcgagaacttctccaaaatcgctcgacccatgacacagttgttgaagaaagaggagaaatttgtgtggagcccgcaatgcgagaaggcgttcaaaactctcaaagaaaagctggtttcctcactagtgttaatcttgccggatactcgcaaggacttcatgctacggcctcatgaaggcaactaccctacccatgatttggagttacccgcggtggttcatgctctaaaaatctggcggcactatctcattgggaatcgctgtgaaatatatactgatcataagagtttgaaatacatcttcacccagtcggatctgaatcttcggcagaggagatggttagaactcatcaaggattatgatgtgggaattcactatcatcctggtaaggccaacgtggtcgccgacgctctaagtcgaaaaagccattgcaacactcttaacgtccgtggcattccacccgaacttaatcaacagatggaagccctgaatctaagcatagtgggtcgcggattcttggctgcgttggaagccaagcccaccttgctcgatcaaatccgcgaggctcagaagaacgatccggacatgcatggactcctcaagaatatgaaacaaggtaaagccgctggtttcacagaggatgaacacggaaccctatggaacggaaatcgggtatgcgttccagataacagagaacttaaacagctgatacttcaggaagctcacgaaagtccttattccatccaccctggcagtacgaagatgtacttagacttgaaggagaaatactggtgggttagtatgaagcgggaaattgcagagttcgtggccctttgtgatgtgtgccagcgtgtcaaggcagagcaccaacgaccggccggacttctccaacctctccaagtaccagaatggaaatggaatgaaattgggatggatttcatcaccggacttccaaaaacccaaggtggatatgattctatatgggtagttgtggatcgattaaccaaggtagctcgatttattcatgtgaagaccacctatggagggaacaaactagccgagctctacttcgctaggatcgtgagtctccatggcgttcctaagaaaattgtatccgataggggaagccaattcacctctcacttttggaagaagctccaagaagagctgggtacccgattaaatttcagcaccgcgtatcacccgcagacagatggacagaccgagcgtctaaatcagatcctagaagatatgcttcgcgcatgtgtcctagatttcgggaatacctgggataagagtctcccctatgccgagttctcctacaataacagctaccaagccagcatacaaatggcaccttatgaagcgttgtatgggcgcaaatgccggacaccgctattgtgggaccaagttggggaaagccaagtgttcgggaccgatatcctgagagaagctgaagctaaagtcagaaccattcgggataatctaaaggtggcccagtctcggcagaagagttatgcagacaaccgacgccgtgacctggaattcgcagtggatgactttgtgtatcttcgggtcacgcccttgcgaggtgtacacaggtttcagacaaaggggaagctcgcacctcggtttgtgggtcctttccgtatcattgctcggcgcggagaagtcgcttaccagttggagctgcccgcctccttgggcaacgtgcatgatgtgttccatgtgtcgcaactcaagaaatgtcttcgagtgccatccgagcaggccgactcagagcaaattgaagttcgcgaagacttgacctacgtggagaggccagtgaaaatcctggacaccatggagcgaaagaccaggaaccgggtaatccgtttttgcaaggtccaatggagcaaccacgccgaggaagaagctacttgggagcgtgaagacgagctgaaggcagcccatcccgatctcttcgtcagttcttccgaatctcggggtcgagattccgtttaa

SEQ ID NO: 14291 - DNA, 5490 bp, Oryza sativa
  Clone ID: TFbOSC900321j.C1.o18.gm
atggcggccggatcttccgcgccgtttccccctcgtccggccgctctgtccccctcccgaccctatataaaccctccccgtgcctccctccaccgttttcgccactcgccgctctctctccccgccggaatcgagctcgcgccgtcgccctctctctccgtcgtcgccgccgagctccggtccgccgccgttgtcgccccggaccacctctcccctcggcgccgcctccttcggcttcgccgcatccccggcgaccttgtccacccctccgtttcgctcgccgaccgccggagcaccgtcgaccccatccacccgagccgcgccaccgccttcctccgctccggtcgccgtttccgtcgtcgccgtcgacccggggtgagccgtggaccgccgcttcttttcccccttcccttcccctctctcggccgccgctccgccgtgcctatggccgccgccggcgaccataggggcgcgggcgtgctgcctcccgccgctgcgccggcgtggccgccttcgggcgcaccgtgcggctgccgcgtggggcccggctatcagccgcccgcgccctcggcacctcggccatataaggaccggtcttcgggcctctgttgcaaagcactaccgtacttccacatgtctagtgggacaaatgaaggctacacgagctgcggcccggtagtcgagatgtcatggcacagggctggtgtcctgctgctaggggctcaatcctgcctacctgtcccggaggttccggccgtaggtgggattgggtcgatggccggcagcgtcagtcgtcgtggtctggacatgactggtttcgtcttggagctgcggggtatgtgcgttgtcctggggtatccgcatggactggactaccagggcaggccgctcccggagcaggaggtcaccgcgggtggagattctttctccgccgcttgccagagcgccgctctcctcgccatcagcactcttcaccagcgctacccggacgagctgcagcactcgccctaccgctaccaccctcgtcgcggaggagcccgcgactacgccaccttccgggatgctagctcggaggatgacgctaccatcatgcacctggcgcgcatggtggaggcgtacgacgcggctcgtatcgacttccatcagatggtgcgccgtgggatggtcgagaacaacctgaagatcctagagctgcgtcaggagaatctgcagctgaagaaggacctagacgcagtggaggcacagctgcatcagctcaagatcgcccagggagaggtctgtcaccccaagcgtcgccgcgtctgccgcagccagaagatcaccgcccgaaagagcacctccaggcccgagcttgttcgtcagtccctggcgtggacttgcttcgtggagacccctcgtgccgagcccgcgcccgtggttcctcaggagggggaagcctccggcgtcggtagcacggaggatgcgctgttgctcaccttccgtcctggcccgtcgcagcgctccaacaaccccgtggatgtgttggattggttgcatgccgtggggaaaaagctagacactgtgcagtgcagcgatgaggagaaagtcgtcttcgccgcccaccaactgcagggacccgcatctctatggtgggatcatttccaggctacgcagccagaggggcagcctattacttgggcccgcttcaccgccgccttccggaggacccatgtgcccgccggagtcatggcccttaagaaaagggagttccgagagttgaagcaaggcaaccgctccgtgatggagtatttgcatgagtttaacaacttggcccggtacgccccggaggatgtgcgggaagatgaggagaagcaagagaagttcttggcaggaatggacccggagctgtctgtccgtctagtctccggtgactatccggatttccaacgtctggtggacaagagcatccgcttggaagccaagcacaaggaacttgagtcgcacaagcgtcgcttggcgaatttccgcaaccaacagggtgctaaccaaaggatccgctacaccaatccctatccagggggatcttcctcgcagcagcagcaacctcgctccgcgcctcgacctcaattcgtggtgcgcgtcccacagccgcagcaacagcagagccagcaagggacccatgcgccccgtcctcctacgccagccgcgcagtctggtcaaggccgcagggacgttcaaggtccgcagcgtctgtgcttcaactgcttcgagcccgggcactttgcggataaatgcccgaagtcgaggcgccagcaaggccaagcgcctccagacgtcatcgttggtacgttcctcatccattccatccctgctaccattttgttcgactctggagcttcccactcgtttatatctgtgccattcgtggggagaaatcagttgggggtagaaaggcttaggaaccctctactcatcaccacccctggaggggttatgacagcaaagtattatagtcctgccgtccctatagaaattcaggggattccttttccctcggatctgattcttctagacaccaagaacttggatataggactgtcagaaatccccattgtcagagagttcggagacgtgtttccggaagaactacccggtatgccgcccaagcgagagattgagttccggatagatcttgctccaggaaccactcctctgtacaagcgaccctaccgtatggcagcaaatgaactggccgaagttaagaaacagttggaagagttgaaagaaaaggggtatatacgtccgagtacttccccctggggtgctcctgtgatttttgtggagaagaaagacaagacgaagaggatgtgcgttgactacagagctctcaatgaagtcaccatcaaaaacaagtaccctcttccccggatcgatgatctgttcgatcagcttaaaggtgccacggtattctccaagattgatcttcgttctggatatcaccagttgcgcatccgtgaagaagatattccgaagaccgcattcaccacgcgatacggactgtatgaattcacggtgatgtcgttcggtttaaccaatgctcctgccttcttcatgaacttaatgaacaaagtgttcatgaaatacttggataagtttgttgtggttttcattgatgacattctggtatactcacaatcagaggaagaccatcagcaccatctccgtctggtgttgggaaagttgcggaaacatcaattgtatgccaaacttagcaagtatgagttctggttgtccgaagtcaaattcttagggcacgtgatatccgctaaaggagttgctgtggatcccgaaacagtgaccgccgtcaccgattggaagcaacccaagacagtcactcaaattcgcagtttcttaggtttggcaggatactaccggaggttcatcgagaacttctccaaaatcgctcgacccatgacacagttgttgaagaaagaggagaaatttgtgtggagtccgcaatgcgagaaggcgttcaaaactctcaaagaaaagctggtttcctcgccagtgttaatcttgccggatactcgcaaggacttcatggtgtattgtgacgcttcgcgccaaggattggggtgcgtgctcatgcaggacggtcatgtggtggcctatgcctcacgccagctacagcctcatgaaggcaactaccctacccatgatttggagttagccgcggtggttcatgctctaaaaatctggcggcactatctcattgggaatcgctgtgaaatatatactgatcataagagtttgaaatacatcttcacccagtcggatctgaatcttcggcagaggagatggttagaactcatcaaggattatgatgtgggaattcactatcatcctggtaaggccaacgtggtcgccgatgctcaaagtcgaaaaagccattgcaacactcttaacgtccgtggcattccacccgaacttaatcaacagatggaagccctgaatctaagcatagtgggtcgcggattcttggctgcgttggaagccaagcccaccttgctcgatcaaatccgcgaggctcagaagaacgatccggacatgcatggactcctcaagaatatgaaacaaggtaaagccgctggtttcacagaggatgaacacggaaccctatggaacggaaatcggagttcgtggccctttgtgatgtgtgccagcgtgtcaaggcagagcaccaacgaccggccggacttctccaacctctccaagtaccagaatggaaatgggatgaaattgggatggatttcatcaccggacttccaaaaacccaaggtggatatgattctatatggcaccgcgtatcacccgcagacagatggacagaccgagcgtctaaatcagatcctagaagatatgcttcgcgcatgtgtcctagatttcgggaagacctgggataagagtctcccctatgccgagttctcctacaataacagctaccaagccagcatacaaatggcaccttatgaagcgttgtatgggcgtaaatgccggacaccgctattgtgggaccaagttggggaaagccaagtgttcgggaccgatatcctgagagaagctgaagctaaagtcagaaccattcgggataatctaaaggtggcccagtctcggcagaagagttatgcagacaaccgacgccgtgacctggaattcgcagtggatgactttgtgtatcttcgggtcacgcccttgcgaggtgtacacaggtttcagacaaaggggaagctcgcacctcggtttgtgggtcctttccgtatgattgctcggcgcggagaagtcgcttaccagttggagctgcccgcctccttgggcaacgtgcatgatgtgttccatgtgtcgcaactcaagaaatgtcttcgagtgccatcccagcaggccgactcagagcaaattgaagttcgcgaagacttgacctacgtggagaggccagtgaaaatcctggacaccatggagcgaaggaccaggaaccggtccaccgccgtcgtcgccccggaccttctcccgcttcggcgccgcctccttcggtttcgccgcaacctcgccgacctcgtccacccctccgtttcgctcgccgaccgccggaacgccgccgtccccgtctacccgagccgcgccgccgccttcctccgctccggtcgccgttcccgttgtcgccgtcgacccggggtgagctgtggaccgccgattcgtttcccccttcccttccctctctcgggcgccgctccgccgcgccggtggtcgccggcggcgaccatcgtggcgcgggtgcgccgcctcccgtcggctgtgccggcgtggccgccttcgggcgcgccccgcggctgccatgtggggcccggccgtcagccgcccgcgccctcggacgctgcagcttcggaagatccgctcttcgtggaggttgaagccgacgtttgggaaagcgagcaaggcaagtcacatcatctttga

SEQ ID NO: 14292 - DNA, 5262 bp, Oryza sativa
  Clone ID: TFbOSC900325j.C1.o13.fg
atgtcatggcacagggccggtgtcctgctgctaggggctcagtcctgcctacctgtcccgggggttccggccgtaggtggggttgggtcggtactcttgtctatggctaggatgggttggaaactatgtcacgtcttccgtccgtataccgtggtgatggccggcagcatcaaccgtcgtggtctggacctgactggcttcgctttggagctgcggggcatgtgcgttgtcctggggtatccgcatggggtggactaccagggcaagcagctcccggagcaggagggtgacgatgcagagccccacgctacttgggaggttactgtagtgatcctcactggctcacccgagaggacttcgttggcagtcaccgcggatggtgcgtcgtgggttggtcgagaacaacaagcagatcctggagctgcattaggagaatctgcagctgaagaaggacctagacgcagtggaggcgcagctgcgtcagctcaagatcgcccagggagaggtctgtcgccccaagcgtcgccgcgtctgccgcagcctgaagatcaccgcccgcaagagtacctccaggcccgagcttgttcgtcagtccctggcgtggacctgcttcgtcgagacccctcgtgccgagcccgcgcccatggttcctcaggaggatggagcctccggcgttggcagcacggaggatgcgctgctgctcaccttccgccctggcccgtcgcagcagtagacgagcagttagtaggattgcgtatggtgacaaccaggagaagtgctgttaccggtgaaggcagtcaccccgaaggcagcaaccacaacaaccatggcagcccacatccacctcctcctccgcctccaccaccaccaccagacaccaacgccattctcactcaaatcctcgcccagcaggccaacatgatggctgctttcctccaccacatccaaaatctgccacaacataatgctccaccaccacccccacaacactctaaactcgccgagttcctccgcatccgtccacctaccttcgctagctccaataaccccgtggatgcgttggattggttgcatgccgtggggaaaaagttagacaccgtgcagtgcagcgatgaggagaaagtcatcttcgccgctcaccaactgcaggggcccgcatctctatggtgggaccatttccaggctacgcagccagaagggcagcctattacttgggcccgcttcaccgccgctttccggagaacccatgtgcctgccggagtcatggcccttaagaaaagggaattccgagagctgaagcaaggcaaccgctccgtgatggagtatttgcatgagtttaacaacctggcccggtatgccccggaggatgtacgggaagatgaggagaagcaagagaagtttttggcaggaatggaccctgagctgtccgtgcgcctggtcttcggggactattcggatttccaacgtctggtggacaagagcatccgcttggaagtcaagcacaaggaactggagtcgcacaagcgtcgcttggcgactttccgcaatcaacagggggctaaccaaagggtccgctacaccaatccctatccagggggatcgtccttgcagcagcaacctcgctccgcgccccgacctcaattcgtggtgcgcgtcccacagccgcagcaacagcagagtcagcaagggactcgtgcgccccgtcctcctacgccagccatgcagcctggtcaaggccgcggggacgttcaaggtcagcagcgtctgtgcttcaactgcttcgagcctgggcactttgcggataaatgcccaaagccgcggcgccagcaaggccaagcgcctccccgccccaacaacggtggtaaggatgtcattcggggtcgggtgaaccacgtgacggccgaggacgtgctgacaactccagacatcatcgttggtacgttcctcattcattccatccctgctaccattttgttcgactctggagcttcccactcgtttatatctgtgccattcgtggggagaaatcagttgggggtagaaaggcttaggaaccctctgctcatcaccacccctggaggggttatgacagcaaagtattatagccctgccgttcctatagaagttcagggaattccttttccctcggatctgattcttctagacaccaagaacttggatgtgatccttgggatgaattggttggctcaattccaaggagtagtggattgtgcaagacgcaccgtcactctgtaccgagggccggaacaaccagttgttttctttgcacccccaacctctgtcggtagttcagaacttcatcagataagactgtcgaaaatccccatcgtcagagagttcggagacgtgtttccggaagaactacctggtatgccgccgaagcgagagattgagttccggatagatcttgctccaggaaccactccccagtacaagcgaccctaccgtatggcatcaaatgaactggccgaagtcaagaaacagttggaagagttgaaagaaaaggggtatatacggccgagtacttccccctggggtgctcctgtgatttttgtggagaagaaagacaagacaaagaggatgtgcgttgactacagagctctcaatgaagttaccatcaaaaacaagtaccctcttccccggatcgatgatctgttcgatcagcttaaaggtgccactgtattctccaagattgatcttcattccggatatcaccaattacgtattcgtgaagaagatatccctaagaccgcattcaccacgcgatacggactgtatgaattcacggtgatgtcgttcggtttaaccaatgctcctgccttcttcatgaacttaatgaacaaagtgttcatggaatacttggataagtttgttgtggtttttattgacgacattctggtgtactcacaatcagaggaagaccatcagcaccatctccgtctggtgttgggaaagttgcgggaacatcaattgtatgacaaacttagcaagtgtgagttttggttgtccgaagtcaaattcttagggcacatgatatctgctaaaggagtcgctgtggaccccgaaacagtgaccgccgtcactgattggaagcaacccaagacagtcactcaaattcgcagcttcttgggtttggcaggatactaccggaggttcatcgagaacttctccaaaatcgctcgacccatgacacagttgttgaagaaagaagagaaatttgtgtggagcccgcaatgcgagaaagcgttccaaactctcaaagaaaagctggtttcctcgccagtgttaatcttaccggatactcgcaaggacttcattgtgtattgtgacgcttcgcgccaaggattggggtgcgtgctcatgcaggaaggtcaggtggtagcctatgcctcacgccaactacggccccatgaaggcaattaccctacccatgatttggagttagccgctgtggttcatgctctaaagatctggcagcactatctcattgggaatcgctgtgaaatatatactgatcataagagtttgaaatacatcttcactcagtcggatctgaatcttcggcagaggagatggttagaactcatcaaggattatgatgtgggaattcactatcatcctggtaaggccaacgtggtcgccgacgctctaattcgaaaaagccattacaacactcttgacgtccgtggcattccacccgaacttaatcaacagatggaagccctgaacctaagcatagttggtcgtggattcttggctacgctggaagccaagcttaccttgctcgatcaaatccgcgaggctcagaagaatgatccggatatgcgtggactcctcaagaatatgaaacagggtaaagccgctggtttcacagaggatgaacacggaaccctatggaacggaaatcgggtatgtgttccagacgacagagaacttaaacagctgatacttcaggaagctcacgaaagtccttattccatccaccctggcagtacgaagatgtacttagacttgaaagagaaatactggtgggttagtatgaagcgggaaattgcagagttcgtggccctttgtgatgtgtgccagcgtgtcaaggcagagcaccaacgaccggccggacttctccaacctctccaagtaccagaatggaaatgggatgaaattgggatggatttcatcaccggacttccaaaaacccaaggtggatatgattctatatgggtagttgttgaccgattaaccaaggtagctcggttgattcctgtgaagaccacctatggagggaacaaactagccgagctctacttcgctaggatcgtgagtctccatggcgttcctaagaaaattgtatctgataggggaagccaattcacctctcacttttggaagaagctccaagaagagctgggtacccgattaaatttcagcaccgcgtatcacccgcagacagatggacagaccgagcgtctaaatcagatcctagaagatatgcttcgtgcatgtgtcctagatttcgggaagacctgggataagagtctcccctatgccgagttctcttacaataacagctaccaagccagcatacaaatggcaccctatgaagcgttgtatggacgcaaatgccggacaccgctattgtgggaccaagttggggaaagccaagtgttcaggactgatatcctgagagaagctgaagctaaagtcagaaccattcgggataatctaaaggtggcacagttccggcagaagagttatgcagataaccgacgccgtaatctgaaatttgcagtggacgattttgtgtaccttcgggtcacgccattgcgaggtgtacacaggtttcagacgaaagggaagctcacacctcggtttgtaggtcctttccgtatcattgctcgacgcggggaagtcgcttaccagttggagctgcccacctccttgggcaacgtgcatgatgtgttccatgtgtcgcaactcaagaaatgtcttcgagtgccatccgagcaggccgattcagagcaaattgaagttcgcgaagacttgacctacgtggagaggccagtgaaaatcctggacaccatggaacgcaggaccaggaaccgggtaatccctttttgcaaggtccaatggagcaaccacgctgaggaagaagctacttgggagcgtgaagacgagatgaaagcagcccatcccgatcttttcgccagttcttccgaatctcggggtcgagattccgtttaa

SEQ ID NO: 14293 - DNA, 3144 bp, Oryza sativa
  Clone ID: TFbOSC9333j.C1.o2.gm
atggttatgccgatggtgacgaccagaagaaatgctgccaccggtgatggcaaccaacccgaaggcagcaaccacaaccaccagggtaacccacctccacctcctcctccgcctccaccaccaccaccagacaccaacgccattctcacccaaatcctcgcccagcaagccaacatgatgactgctttcctccaccacctccaaaatccaccacaacataatgctccaccacctccccaacactctaaactcgccgagttcctccgcatccgcccacctaccttctctagctccaacaaccccgtggatgcgttggattggttgcatgccgtggggaaaaagctagacacggtgcagtgcagcgatgaggagaaagttatcttcgccgcccaccagctgcagggacccgcatctctatggtgggaccatttccaggctacgcagccagaggggcagcctattacttgggcccgcttcaccgccgctttccgaagaacccatttcaataacctggcccgttacgctccagaggatgtgcgggaagatgaggagaaacaggagaagttcttggcaggaatggaccccgagctgtccgtccgtctagtctccggggactatccggatttccaacgactggtggacaagagcatccgcttggaagccaagcacaaggaactggagtcgcacaagtgccgcttggcgaatttccgcaatcagcagggtgctaaccagagggtccgctacaccaatccctatccagggggatcctcctcgcagcagcaacaacagcagcagcagcaacctcgctccgcgcctcgacctcaattcgtggtgcgcatcccacagccgcagcagcagcagaatcaacaagggactcgtgcgccccgtcctcctacgccaactgtgcagcctggtcaaggccgcagggacgctcaaggtcagcagcgtctgtgcttcaactgcttcgagcccgggcactttgcggataaatgcccaaagccaaggcgtcagcaaggccaagcgcctccccgctccaacaacggcgggaaggatgtcattcggggtcgtgtgaaccacgtgacggccgaggacgtgctgacaactccagacgtcatcgttgaactgcatcagattggactgtcagaaatccccattgtcagagagttcggagacgtgtttccggaagaactacctggtatgccgcccaagcgagagattgagttccggatagatcttgctccaggaaccactcctctgcataagcgaccctaccgtatggcagcaaatgaactggccgaagtaaagaaacagttggaagagttgaaagaaaaggggtacatacgcccgagtacttccccatggggtgctcctgtgatttttgtagagaagaaagacaagacgaagaggatgtgcgtcgactacagagctctcaatgaagtcaccatcaaaaacaagtaccctcttccccggatcgatgatctgttcgatcaacttaaaggtgccactgtattctccaagattgatcttcgttccggatatcaccaattacgtattcgtgaagaagatattccgaagaccgcattcaccacgcgatacgggctgtatgaattcacggtgatgtcgttcggtttaaccaatgcacctgccttcttcatgaacttaatgaacaaagtgttcatggaatacttggataagtttgttgtggttttcattgatgacattctgatatactcacaatcagaggaagaccatcagcaccatctccgtctggtgttgggaaagttgcgggaacatcaattgtatgccaagcttagcaagtgtgagttctggttgtccgaagtcaaattcttagggcacgtgatatcagctaaaggagttgctgtggaccccgaaacagtgaccgccgtcaccgattggaaacaacccaagacagttactcaagtccgcagtttcttaggtttggcaggatactaccggagattcatcgagaacttctccaagatcgctcgacccatgacacagttgttgaagaaagaagagaaatttgtgtggagcccgcaatgcgagaaggcgtttcaaactctcaaggaaaagctggtttcctcgccggtgttaatcttgccggatactcgcaaggacttcatggtgtattgtgacgcttcgcgccaaggattggggtgcgtgctcatgcaggacggtcatgtggtagcctatgcctcacgtcagctacgacctcatgaaggcaactaccctacccatgatttggagttagcagcggtggttcatgctctaaaaatctggcggcactatctcattgggaatcgctgtgaaatctatactgatcataagagtttgaaatacatcttcactcagtcggacctgaatcttcggcaaaggagatggttagaacttatcaaagactatgatgtgggaattcactatcatcctggtaaggccaacgtggttgccgacgctctaagtcgaaagagccattgcaacactcttaacgtccgtggcattccacccgagcttaaccaacagatggaagccctgaacctaagcatagttagtcgtggattcttggccgcgttggaagccaagcccaccttgctcgatcaaatccgcgaggctcagaagaacgacccggacatgcatggactcctcaagaatatgaaacagggtaaagccgctggtttcacagaggatgaacacggaaccctatggaacggaaagcgggtatgcgttccagataacagagaacttaaacagctgatacttcaggaagctcacgaaagtccttattccatccaccctggcagtacgaagatgtacttagacttgaaggagaaatactggtgggttagtatgaagcgggagattgcagagtttgtggccctacgtgatgtgtgccagcgtgtcaaggcagagcaccagcgaccggccggacttctccaacctctccaagtacctgaatggaaatgggatgaaattgggatggatttcatcaccggacttccaaagacccaaggtggatatgattctatatgggtagttgtggatcgattaaccaaggtagctcgattcattcctgtgaagaccacctatggagggaacaaactagcggagctctacttcgctaggatc

SEQ ID NO: 14294 - DNA, 5473 bp, Oryza sativa
  Clone ID: TFbOSC9352j.C1.o1.np
acgagccttagatcccaagccttagcaatattttcaaaactaaaaatcctgtcttaattgtgaaaaccctctagtctctctctgtcctgctgcttcatttatcgccaaaatctgacttttaaatgttgcttttctttttgtttttgtttgtagatggccggcagcatcagccgtcgtggtctggacctgactggtttcgtcttggagctgcggggcatgtgcgttgtcctggggtatccgcatggagtggactaccagggcaggctgctcctggagcaggagggtgacgatgcagagccccacgctgcttgggaggttactgcagtgatcctcactggctcacccgagaggacttcgttggcagtcaccgcgggtggagattctttctccgccgcttgccagaacgccgctctcctcgccatcggcactcttcaccagcgctacccggacgagttgcagcactcgccctaccgctaccaccctcgccgcggaggagcccgcgactacgccaccttccgggatgctagctcggaggatgacgctaccatcatgcacctggcgcgcatggtggaggcgtacgatgcggctcgtatcgacttccatcagatggtgcgccgtgggatggtcgagaacaacatgaagatcctggagctgcgtcaggagaatctgcagctgaagaaggacctagacgcagtggaggcgcagctgcatcagctcaagatcgcccagggagaggtctgtcgccccaagcgtcgccgcgtctgccgcagccagaagatcaccgcccgcaagagcacctccaggcccgagcttgttcgtcagtccctggcgtggacttgcttcgttgagacccctcgtgccgagcccgcgcccgtggttcctcaggagggggaagcctccggcgttggtagcacggaggatctctctctgtttgctggttctgtgtggggttttcagatggtgacgaccaggagaagtgctgccaccggtgatggcaaccaacctgaaggcagcaaccacaacaaccatggcagcccacctccacctcctcctccgcctccaccaccaccaccagacaccaacgccattctcactcaaatcctcgcccagcaggccaacatgatgactgctttcctccaccacctccaaaatccgccacaacagaatgctccaccaccacccccacaacactctaaactcgccgagttcctccgcatccgtccacctaccttctctagctccaacaaccccgtggatgcgttggattggttgcatgccgtggggaaaaagctagacaccgtgcagtgcagcgatgaggagaaagtcgtcttcgccgcccaccaactgcaggggcccgcatctctatggtgggaccatttccaggctacgcagccagaggggcagcctattacttgggcccgcttcaccgccgccttccggaggacccatgtgcccgccggagtcatggcccttaagaaaagggaattccgagagttgaagcaaggcaaccgctccgtgatggagtatttgcatgagtttaacaacctggcccggtacgccccggaggatgtacgggaagatgaggaaaagcaggagaagttcttggcaggaatggaccctgagctatccgtgcgtctagtctccggtgactatgcggatttccaacgtctggtggacaagagcatccgcttggaagccaagcacaaggaactggagtcgcacaagcgccgcttggcgaatttccgcaatcatcagggtgctaaccaaagggtccgctacaccaatccctatccagggggatcgtcctcgcagcagcaacagcagcaacaacctcgctccgcgccccgacctcaattcatggtgcgcgtcccacagccgcagcaacagcagagtcaacaagggactcgtgcgccccgtcctcctatgccagccgtgcagcctggtcaaggccgcagggacgttcaaggtccgcagcgtctgtgcttcaactgcttcgagcccgggcactttgcggataaatgcccgaagccgaggcgccagcaaggccaagcgcctccccgctccaacaacggtggtaaggatgtcattcggggtcgtgtgaaccacgtgacggccgaggacgtgctgacaactccagacgtcatcgttggtacgttcctcattcattccatccctgctaccattttgttcgactctggagcttcccactcgtttatatctgtgccattcgtggggagaaatcagttgggggtagaaaggcttaggaaccctctgctcatcaccacccctggaggggttatgacagcaaagtattatagtcctgccgtccctatagaaattcaggggattccttttccctcggatctgattcttctagactccaagaacttggatgtgatccttgggatgaattggttggctcaattccaaggagtagtggattgtgcaagacgcactgtcactctgtaccgagggccggaacaaccggttgttttctttgcacccccaacctctgtcagtagttcagaacttcatcagataggactgtcagaaatccccatcgtcagagagttcggagacgtgtttccggaagaactacccggtatgccgcccaagcgagagattgagttctggatagatcttgctccaggaaccactcctctatacaagcgaccctaccgtatggcagcaaatgaactggccgaagttaagaaacagttggaagagttgaaagaaaaggggtatatacgtccgagtacttccccctggggtgctcctgtgatttttgtggagaagaaagacaagatgaagaggatgtgcgttgactacagagctctcaatgaagtcaccatcaaaaacaagtaccctcttccccggatcgatgatctgttcgatcagcttaaaggtgccacggtattctccaagattgatcttcgttccggatatcaccagttgcgcatccgtgaagaagatattccgaagaccgcattcaccacgcgatacggactgtatgaattcacggtgatgtcattcggtttaaccaatgctcctgccttcttcatgaacttaatgaacaaagtgttcatggaatacttggataagtttgttgtggttttcattgatgacattctggtatactcacaatcagaggaagaccatcagcaccatctccgtctggtgttggggaagttgcgggaacatcaattgtatgccaaacttagcaagtgtgagttctggttgtccgaagtcaaattcttagggcacgtgatatctgctaaaggagttgctgtggaccccgaaacagtgaccgccgtcactgattggaagtaacccaagacagtcactcaaattcgcagtttcttaggtttggcaggatactaccggaggtttatcgagaacttctccaaaatcgctcgacccatgacatagttgttgaagaaagaagagaaatttgtgtggagcccgcaatgcgagaaggcgttccaaactctcaaagaaaagctggtttcctcgccagtgttaatcttgccggatactcgcaaggacttcatggtgtattgtgacgcttcgcgccaaggattggggtgcgtgctcatgcaggacggtcatgtggtggcctatgcctcacgccagctacggcctcatgaaagcaactaccctacccatgatttggagttagccacggtggttcatgctctaaaaaatctggcggcactatctcaatgggaatcgctgtgaaatatatactgatcataagagtttgaaatacatcttcacccagtcggatctgaatcttcggcagaggagatggctagaactcatcaaggattatgatgtgggaattcactatcatcctggtaaggccaacgtggtcaccgacgctctaagtcaaaaaagccattgcaacactcttaacgtccgtggcattccacccgaacttaaccaacagatggaagccctgaatctaagcatagtgggtcgtggattcttggctgcgttggaagccaagcccaccttgctcgatcaaatccgcgaggctcagaagaacgacccggacatgcatggactcctcaataatatgaaacagggtaaagccgctggtttcacagaggatgaacacggaaccctatggaacggaaatcgggtatgcgttccagataacagagaacttaaacaactgatacttcaggaagctcacgaaagtccttattccatccaccctagcagtacgaagatgtacttagacctgaaggagaaatactggtgggttagtatgaagcgggaaattgcagagttcgtggccctttgtgatgtgtgccagcgtgtcaaggcagagcaccaacgaccggccggacttctccaacctctccaagtaccagaatggaaatgggatgaaattgggatggatttcatcaccggacttccaaaaacccaaggtggatatgattctatatgggtagttgtggatcgattaaccaaggtagctcgatttattcttgtgaagaccacctatggagggaacaaactagccgagctctacttcgctaggatcgtgagtctccatggcgttcccaagaaaatcgtatctgataggggaagccaattcacctctcacttttggaagaagctccaagaagagctggatacccgattaaatttcagcaccgcgtatcacccgcagacggatggacagaccgagtgtctaaatcagatcctagaagatatgcttcgcgcatgtgtcctagatttcgggaagacctgggataagagtctcccctatgccgagttctcctacaataacagctaccaagccagtatacaaatggcaccttatgaagcgttgtatgggcgcaaatgccggacaccgctcttgtgggaccaagttggggaaagtcaagtgttcgggactgatatcctgagagaagctgaagcgaaggtcagaaccattcgggataatctaaaggtggcacagtcccggcagaaaagttatgcagataaccgtcgccgtaacctggaattcgcagtggacgattttgtgtaccttcgggtcacgccattgcgaggtgtacacaggtttcagacaaaagggaagctcgcacctcggtttgtgggtcctttccgtatcattgcccgacgcggagaagtcgcttaccagttggagctgcccgcctccttgggcaacgtgcatgatgtgttccatgtgtcgcaactcaagaaatgtcttcgggtgccgtccgagcagaccgactcagagcaaattgaagttcgcgaagacttgacctacgtggagaggccagtgaaaatcctggacaccatggagcgcaggaccaggaaccgggtaatccgtttttgcaaggtccaatggagcaaccacgccgaggaagaagctacctgggagcgtgaagacgagctgaaggcagcccatcccgatctcttcgccagttcttccgaatctcggggtcgagattccgtt

SEQ ID NO: 14295 - DNA, 3639 bp, Oryza sativa
  Clone ID: TFbOSC9451j.C1.o1.fg
atgtccgggccggccttggcgccgcccgtccccagctgcccaatctgcccctcggcagatcatggccgtccatccgtggcccgcatggccggccgcgttgtcacgaccggaaataacccaacgggcgttcctgacgtgcgtgcattaatccttgtcccaggaggcaaggcccagcacacacagagacaaacgagaaacagcggaagactagggcgacgaccacaggcgcagcagcagcagaatcagcaagggactcgtgcgccccgtcctcctacgccaactgtgcagcctggtcaaggccgcagggacgctcaaggtcagcagcgtctgtgcttcaactgcttcgagcccgggcactttgcggataaatgcccgaagccaaggcgtcagcaaggtcaagcgcctccccgccccaacaacggcgggaaggatgtcattcggggtcgtgtgaaccacgtgacggccgaggacgtgctgacaactccggacgtcatcgttggtacgttcctcattcattccatccctgctactattttgttcgactctggagcttcccactcgtttatatctgtgccattcgtggggaaaaatcagttgggggtagaaaggcttagaaaccctctgctcatcaccacccctggaggggttatgatagcaaagtattatagccctgccgttcctatagaaattcaggggattccttttccctcggatctgattctactagacaccaagaacttggatgtgattcttgggatgaattgggagttcggagaggtgtttccggaagaactacccggtatgccgcccaagcgagagattgagttccgaatagatcttgctccaggaaccactcctctgcacaagcgaccctaccgtatggcagccaatgaactggccgaagtcaagaaacagttggaagagttgaaagaaaaagggtatatacgtccgagtacttccccatggggtgctcctgtgatttttgtagagaagaaagacaagacgaagaggatgtgcgtcgactacagagctctcaatgaagttaccatcaaaaacaagtaccctcttccccggatcgatgatctgttcgatcagcttaaaggtgccactgtattctccaagatcgatcttcgttccggatatcaccaattacgtattcgtgaagaagatattccgaagaccgcattcaccacgcgatacggactgtatgaattcacggtgatgtcgttcggtttaaccaatgcacctgccttcttcatgaacttaatgaacaaagtgttcatggaatacttggataagtttgttgtggttttcattgatgacattctgatatactcccaatcagaggaagaccatcagcaccatctccgtctggtgttgggaaagttgcgggaacatcaattgtatgccaaacttagcaagtgtgagttctggttgtccgaagtcaaattcttagggcacgtgatatctgctaaaggagttgctgtggaccccgaaacggtgaccgccgtcactgattggaagccacccaagacagtcactcaagtccgcagtttcttaggtttggaaggatactatcggagattcatcgagaacttctccaaaatcgctcgacccatgacacagttgttgaagaaagaagagaaatttgtgtggagcccgcaatgcgagaatgcgtttcaaactctcaaggaaaagctggtttcctcgccagtgttaatcttgccggatactcgcaagacttcatggtgtattgtgacgcttcacgccaaggattgggcctatgcctcacgtcagctacgacctcatgaaggcaactaccctacacatgacttggagttagccgcggtggttcatgctctaaaaatctggcggcactatctcattgggaatcgctgtgaaatatataccgatcataagagtttgaaatacatcttcacccagtcggatctgaatcttcggcaaaggagatggttagaactcatcaaagactatgatgtgggaattcactatcatcctggtaaggccaacgtggttgccgacgctctaagtcgaaagagccattgcaacactcttaacgtccgtggcattccacccgaacttaatcaacagatggaagccctgaacctaagcatagttggtcgtggattcgtggctgcgttagaagccaagcctatcttgctcgatcaaatccgcgaggctcagaagaatgatccggacatgcatggactcctcaagaatatgaaacagggtaaagccgctggtttcacggaggatgaacacggaaccctatggaacggaaatcgggtatgcgttccagatagcagagaacttaaacagttgatactactggaagctcacgaaagtccttattcaatccaccctggcagtacgaagatgtacttagacttgaaggagaaatactggtgggttagcatgaagcgggaaattgcagagttcgtggctctgtgtgatgtgtgccagcgtgtcaaggcagaacaccaacgaccggccggactcctccaacctctccaagtgccagaatggaaatgggatgaaattgggatggatttcatcaccggacttccaaaaacccaaggcggatatgattctatatgggtagttgtggatcgattaaccaaggtggctcgattcattcctgtgaagaccacctatggagggaacaagctagcggagctctacttcgctaggatcgtgagtctccatggcgttcccaagaaaatcgtatctgataggggaagccaattcacctctcacttttggaagaagctccaagaagagctgggtactcgattgaatttcagcaccgcctatcacccgcagacagatggacagaccgagcgtctaaatcagatcctagaagatatgctccgcgcatgtgtcctagatttcgggaagacctgggataagagtctcccctatgccgagttctcctacaataacagctatcaagccagcatacaaatggcaccttatgaagcgttgtacgggcgcaaatgccggacaccgctcttgtgggaccaagttggagaaagccaagtgttcgggactgatatcctgagagaagctgaagctaaagtcagaatcattcgggataatctaaaggtggcacagtcccggcagaaaagttatgcagataaccgtcgccgtgacctggaattcgcagtgggcgattttgtataccttcgggtcacgccattgcgaggtgtacacaggtttcagacgaaagggaagcttgcacctcggtatgtgggtcctttccgtatcaatgctcggcgcggagaagtcgcttaccagttggagctgcccgcctccttgggcaacgtgcatgatgtgtttcatgtgtcgcaactcaagaaatgtcttcgagtgccatccgagcaggccgactcagagcagattgaagttcgcgaagatttgacctacgtggagaggccagtgaaaatcctggacaccatggaacgcaggaccaggaaccgggtaatccgtttttgcaaggtccagtggagcaaccacgcagaagaagaagctacttgggagcgtgaagacgagctgaaggcagcccatcccgatctcttcgccagttcttccgaatctcggggtcgagattccgtttaa

SEQ ID NO: 14296 - DNA, 924 bp, Oryza sativa
  Clone ID: TFbOSC101197j.C1.o7.hg
atgcaagaggagtcagatcttaggaagcacgtggacgtcttcaatcagttggttgtggatctaagtaagttagatgtgaaactggatgatgaagacaaggccataattcttctgtgctcgcttccaccgtcgtatgaacatgtggtgactaccctgatgcacggcaaggatactatcaaaactgaggagataatttcgtcgttgcttgcacgagacttgagaagatcaaagaaaaacgaggcaatggaggcttctcaggctgagagtttgctggtcaaggcaaagcatgatcatgaagcgggggtgttgaagagcaaggagaagggggcacggtgctataagtgtcatgagtttggacatataaggaggaattgtccgttactgaagaagaggaaagatggcattgcaagtttagcagctcgtggtgatgattcagatagcagtagtcatgagattcttacagtgtctaacgagaagtctggagaagcgtggatgttggactcagctagttcctatcacgtggattctgataggaagaccatgaatatcatgaaggacggcaagactgttatgattggtgagaggacaagctcatgtttgtacaagttacaagggagtgctgttgcaggtggagtcatggaagatgggtatgctggtgttgctgtgcacgatcctgaaggcggcgagcctggccatagcgagagggagcggctgccggcggcgaccggccgtaaaattggattctccatgccgagtactccatttcccctctcattacacatccaatccatcgccggaatgctgccggcgctgcctcccggcgtcgccgctctgttcggccgcagccagccgcatggcgcgccgccgctccagggcgccctagctttggccgtcgccaccctgggactcctctcgcctcactaa

SEQ ID NO: 14297 - DNA, 1671 bp, Oryza sativa
  Clone ID: TFbOSC21248j.C1.o6.fg
atggctgctttcaacagggagatgactagacgtggtgctcaggttgatggcggtggaagcgattggcgatccaatcgatgggtcggacacttcgggcgggtggctcggactttccgatgttgtcagagatacgaagaagcccaggaggtcagggtcgcggcggtgtgcgcgtcttgcgtcgaagccgagcagagggcgagattcgtacccgattttcacagaggcggaggtggtttgggcggtgaggtcacgggcggctggaggcgcatccttgcaggcggtgcgtggcggcgtggtactcggcggcgtccgtcggagctcgagcaggagcttgcggcggcggctgcagcggttctcggcgaggaaccggtgcaggtcttcagcggcggcgctccaaggcggtgcggcagcctcttgcggggccagcggctccccaaggtccggcggcgcgacggctcctcgcagatgaggctgaaggatctgttggctcaacaggggatatccaaggctcttgaggagacgatgccggaaaagatggatgttggcaagtgggtggaaatgaaggcacaggcaactgcaataatacgcttgagtctctcggattttgtcatgtaccaggtcatggatgaaaaaacgccgaaggaaatttgggacaagttggcaagcctgtatatgtccaagtcgctgacgagtaagttgtatctcaaacaacagctgtatggtttgcagatgcaagaggagtcagatcttaggaagcacgtggacgtcttcaatcagttggttgtggatctaagtaagttagatgtgaaacttgatgatgaagacaaggccataattcttctgtgctcgcttccaccatcgtttgaacatgtggtgactaccttgacgcacggcaaggatactgtcaaaactgaggagataatttcgtcgttgcttgcacgagacttgagaagatcaaagaaaaacgaggcaatggaggcttctcaagctgagagtttgctggtcaaggcaaagcatgatcatgaagcaggggtgtcgaagagcaaggagaagggggcacgatgctataagtgtcatgagtttggacatataaggaggaattgcccgttactgaagaagaggaaaggtggcattgcaagtttagcagctcgtggtgataattcagatagcagcagtcatgagattctcacagtgtctaatgagaagtctggagaagcgtggatgttggactcagctagttcctatcacgtgacatcgaagtgggagtggttctcttcatacaaatctggtgattttggtgttgtttacttgggcaatgacacgagttatcgtgttattggagtgggcgatatcaagttcaagatgtatgatggaaacgaggtgctactttcagatgtgagacacgtgccaggactaaggaagagtttgatttctcttgggagcctacatgagacaggttggttgtatcaggtggattctgataggaagaccatgaatatcatgaaggacggcaagactgttatgactggtgagaggacaagctcatgtttgtacaagttacaaggaagtgctgttgcaggtggagtcatggaagatgggcatgctggtgttgctgtgcacgatcctgaaggcggcaagcctggcgtaggctcgtcgggcggctcggcatga

SEQ ID NO: 14298 - DNA, 1227 bp, Oryza sativa
  Clone ID: TFbOSC400049j.C1.o5.fg
atggcggcaacagcggtttccaaatttgaggtggtgaagttcgatggcaccgggaatttcgttctctggcagatgaggctgaaggatctgttggctcaacaggggatatccaaggcacttcaggagacgatgccggaaaagattgatgctgacaagtggaatgagatgaaggcacaggcagctgcaacaatacgcttgagtctctcggattctgtcatgtaccaggtcatggatgaaaaatcgccgaaggaaatttgggacaagttggcaagcctacatatgtccaagtcgctgacgagtaagttgtatctcaaacagcagctgtatggtttgcaggtgcaagaggagtcagatcttaggaagcacgtggacgtcttcaatcagttggttgtggatctaagtaagttagatgtgaaactggatgatgaagacaaggccataattcttctgtgctcgcttccactgtcgtatgaacatgtggtgactaccctgacgcacggcaaggatactgtcaaaactgaggagataatttcgtcgttacttgcacgagacttgagaagatcaaagaaaaacgaggcaacgaaagcttctcagggtaagagtttgctggtcaaggataagcatgatcatgaagcgggggtgtcgaagagcaaggagaagggggcacggtgctataagtgtcatgagtttggacatataaggaggaattgcccgttactgaagaagaggaaaggtggcattgcaagtttagcagctcgtggtgatgattcagatagcggtagtcatgagattctcacagtgtctgacgagatgtctggagaagcgtggatgttggactcagctagttcctatcatgtgacatcgaagcgggagtggttctcttcatacaaatctggtgattttggtgttgtttacttaggcgatggcacgagttatcgtgttgttggagtgggcgatgtcaatttcaagatgtatgatggaaacgaggtgctactttcagatgtgagacacgtgccgggattaaggaagagtttgtttcgcttgggagcctacatgagacaggacggcaagactgttatgactggtgagaggacaagctcatgtttgtacaagttacaagggagtgctgttacaggtggagtcatggaagatgggtatgttggtgttgctgtgcatgatcctgaaggcggcgagcctggcgtaggctcgtcgggtggctcggcgtga

SEQ ID NO: 14299 - DNA, 1278 bp, Oryza sativa
  Clone ID: TFbOSC400601j.C1.o65.fg
atggcggcgacggtggtttccaaatttgaggtggtgaagttcgatggcaccgggaatttcgttctctggcagatgaggctgaaggatctgttggctcagcaggggatatccaaggttcttgatgagacgatgccggaaatgatggatgctgataagtgggatgagatgaaggcgcaggtagctgcaacaatacgcttgagtctctcagattccgtcatgtaccaggtcatggatgaaaaatcaccgaaggaaatttgggacaagttggcaagcctgtatatgtccaagtcgctgacgagtaagttgtatctcaaacaacaactgtatggtttgcagatgcaagaggagtcagatcttaggaagcatgtggatgtcttcaatcagtttgttgtggatctaagtaagttagatgtgaaattggatgatgaagacaaggccataattcttctgtgctcgcttccaccgtcttatgaacatgtggtgactaccctgacgcacggcaaggatactgtcaaaactgaggagataatttcgtcgttgcttgcacgagacttgagaagatcaaagaaaaacgaggcaacagaggcttctcagggtgagagtttgctggtcaaagcgaagcatgatcatgaaacaggggtgtcgaagagcaaggagaagggggcacggtgctataagtgtcatgagtttggacatataaggaggaattgcccgttactgaagaagaggaaaggtggcattgcaagtttagcagctcgtggtgatgattcagatagcagcagtcatgagattctcacagtgtctgacgagaagtctggagaagcgtggatgttggactcagctagttcctatcatgtgacatcgaagcgggagtggttctcttcatataaatctggtgattttggtgttgtttacttgggcgatgacacgagttattgtgttgttggagtgggcgatgtcaagttcaagatgtatgatggaaacgagatgctactttcagatgtgagacacgtgccgggactaaggaagagtttgatttcgcttgggagcctacatgagacgggttggttgtatcaggtggattctgataggaagaccatgaatatcatgaaggacggcaagactgttatgactggtgagaggacaagctcatgtttgtacaagttacaagggagtgctgttgcaggtggagtcatggaaaatgggtatgctggtgttgctgtgcacgatcctgaaggcggcgagcctggcataggctcatcgggcggctcggcgtga

SEQ ID NO: 14300 - DNA, 1278 bp, Oryza sativa
  Clone ID: TFbOSC400934j.C1.o66.fg
atggcggtgacggtggtttccaaatttgagatggtgaagttcgatggcactggaaatttcgttctctggcagatgaggctgaaggatctgttggctcaacaggggatatccaaggctcttgaggagacgatgccggaaaagatggatgctggcaagtgggaggagatgaaggcgcaggcagctgcaacaatacgcttgagtctctcggattctgtcatgtatcaggtcatggatgaaaaaacaccgaaggaaatttgggacaagttggcaagcctgtatatgtccaagtcgctgacgagtaagttgtatctcaaacaacagctgtatggtttgcagatgcaagaggagtcagatcttaggaagcacgtggacgtcttcaatcagttggttgtggatctaagtaagttagatgtgaatctgtatgatgaagacaaggccataattcttctgtgctcgcttccaccgtcgtatgaacatgtggtgactaccctgacgcacggcaaggatactatcaaaactgaggagataatttcgtcgttgcttgcacgagacttgagaagatcaaagaaaaacgaggcaatggaggcttctcaggctgagagtttgctggtcaaggcaaagcatgatcatgaagcgggggtgtcgaagagcaatgagaagggagcacggtgctataagtgtcatgagtttggacatataaggaggaattgcccgttactgaagaagaggaaagatggcattgcaagtttagcagctcgtggtgatgattcagatagcagcagtcatgagattctcacagtgtctaacgagaagtctggagaagcgtggatgttggactcagctagttcctatcacgtgacatcgaagcgggagtggttcttttcatacaaatctggtgattttggtgttgtttacttgggcgatgacacgagttatcatgttgttggagtggacgatgtcaagttcaagatgtatgatggaaacgaggtgctactttcagatgtgagacacgtgccgggactaaggaagagtttgatttcgcttgggagcctacatgagacaggttggttgtatcaggtggattttgataggaagaccatgaatatcatgaaggacggcaagactgttatgactggtgagagaacaagctcatgtttgtacaagttacaagggaatgctgttgcaggtggagtcatggaagatgggtatgctggtgttgctgtgcacgatcctgaaggcggcgagcctggcgtaagctctacgggcggctcggcgtga

SEQ ID NO: 14301 - DNA, 1116 bp, Oryza sativa
  Clone ID: TFbOSC401810j.C1.o11.fg
atgccgccgattggaactttacgccttccatggggacgtttgcggtctattggccctgacgtcgaaccgttggttgtaaagcctgacaaaacccaaaccaaaggtcgaagtgctgctcctggcaccctacgcctcgccgcgtacaacgtggtttttcttaagtcctcgcgcaggaggcaaatttatgccgcgaagggcaactgtgatatttaccgaggcgcaggaaaagaaaggaaatggagggatcgtacctacattgctgtgaagatgaataatgcgtacgttgtggaggcgtacggtagggatgaaaaccgatcgaatacggacttcgaagccgatgctgactctaagccgatgactacttcgggctttccaaattccactgttaacagtcatatgcaagaggagtcagatcttaggaagcacgtggacgtcttcaatcagttggttgtggatctaagtaagttagatgtgaaactggatgatgaagacaaggccataattcttctgtgctcgcttccaccgtcgtatgaacatgtggtgactaccctgatgcacggcaaggatactatcaaaactgaggagataatttcgtcgttgcttgcacgagacttgagaagatcaaagaaaaacgaggcaatggaggcttctcaggctgagagtttgctggtcaaggcaaagcatgatcatgaagcgggggtgttgaagagcaaggagaagggggcacggtgctataagtgtcatgagtttggacatataaggaggaattgtccgttactgaagaagaggaaagatggcattgcaagtttagcagctcgtggtgatgattcagatagcagtagtcatgagattcttacagtgtctaacgagaagtctggagaagcgtggatgttggactcagctagttcctatcacgtggattctgataggaagaccatgaatatcatgaaggacggcaagactgttatgattggtgagaggacaagctcatgtttgtacaagttacaagggagtgctgttgcaggtggagtcatggaagatgggtatgctggtgttgctgtgcacgatcctgaaggcggcgagcctggcgtaggctcgtcgggcggctcggcgtga

SEQ ID NO: 14302 - DNA, 1446 bp, Oryza sativa
  Clone ID: TFbOSC402366j.C1.o6.gm
atggcggcgatggtggtttccaaatttgaggtggtgaagttcgatggcaccgggaatttcattctctggcagatgaggctgaaggatctattggctcaacaagggatatccaaggctcttgaggagacgatgccggaaaagatggatgctggcaagtgggaggagatgaaggcgcaggcagctgcaacaatacgcttgagtctctcggattctgtcatgtacccggtcatggatgaaaaaacgccgaaggaaatttgggacaagttggcaagcctgtatatgtccaagtcgctgacgagtaagttgtatctcaaacaacagctgtatggtttgcagatgcaagaggagtcagatcttaggaagcacgtggacgtcttcaatcagttggttgtggatctaagtaagttagatgtgaaacttgatgatgaagacatggccataattcttctgtgctcgcttccaccgtcatatgaacatgtggtgactaccctgatgcacggcaaggatactgtcaaaactgaggagaaaatttcatcgttgcttgcacgagacttgagaagatcaaacaaaaacgaggcaatggaggcttctcaggctgagagtttgctggtcaaggcaaagcatgatcatgaagcgggggtgtcgaagagcaaggataagggggcacggtgctataagtgtcatgagtttggacatataaggaggaattgcccgttactgaagaagaggaaaggtggcattgcaagtttagcagctcgtggtgatgattcagatagcagcagtcatgagactctcacagtgtctaatgagaagtctggagaagcgtggatgttggactcagctagttcctatcacgtgacatcgaagcgggagtggttctcttcatacaaatctggtgattttggtgttgtttacttgggcgatgacacgagttatcgtgttgttggagtgggtgatgtcaagttcgagatgtatgatggaaacgaggtggattttgataggaagaccatgaatatcatgaaggacggcaagactgttatgactggtgagaggacaagctcatgtttgtacaagttacaaggaagtgctgttgcaggtggagtcatggaagataggcatgctggtgttgctgtgcacgatcctgaaggcgggccccgtcgggaggcccgccaccagtgccatatggagcccgtctccgcagggagaacccaatccgaaggcctaggaagccagctgagcccgaagagggcagttcgctcccaggagttcggagtcaaccggaaggcccgggggatcccaaagcccagtcaagggcctctgaaggccctagagctggttcaagggatctggaggcccatgagccggctcaaaggctccagagctcttgccatggctccaaagccgaagcctacagaggacaccgggaataactatggggcactataa

SEQ ID NO: 14303 - DNA, 1275 bp, Oryza sativa
  Clone ID: TFbOSC406022j.C1.o7.fg
atggcgacaacggtggtttccaaatttgaggtggtgaagttcgatggcaccgggaatttcgttctctggcagatgaggctgaaggatctgttggctcaacaggggatatccaaggctcttgaggagacgatgccggaaaagatggatgctggcaaatgggaggagatgaaggcgcaggcagctgcaacaatacgcttgagtctctcggattctgtcatgtaccaggtcatggatgaaaaaacgtcgaaggaaatttgggtcaagttgacaagtctgtatatgtccaagtcgctgacgagtaagttgtatctcaaacaacagctgtatggtttgcagatgcaagaggagtcagatcttaggaagcacgtggacgtcttcaatcagttggttgtggatctaagtaagttagatgtgaaactggatgatgaagacaaggccataattcttctgtgctcgcttccaccatcgtatgaacatgtggtgactatcctgacgcacggcaaggatactatcaaaactgagataatttcgtcgttgcttgcacgagacttgagaagatcaaagaaaaacgaggcaatggaggcttctcaggctgagagtttgctggtcaaggcaaagcatgatcatgaagcgggggtgtcgaagagcaaggagaagggggcacggtgctataagtgtcatgagtttggacatataaggaggaattgcccgttactgaagaagaggaaagatggcattgcaagtttagcagctcgtggtgatgattcagatagcagcagtcatgagattctcacagtgtctaacgagaagtctggagaagcgtggatgttggactcagctagttcctatcatgtgacatcgaagcgggagtggttctcttcatacaaatctggtgattttggtgttgtttacttgggtgatgacacgagttatcgtgttgttggagtgggcgatgtcaagttcaagatgtatgatggaaacgaggtgctactttcagatgtgagacacgtgccgggactaaggaaaagtttgatttcgcttgggagcctacatgagataggttggttgtatcaggtggattctgataggaagaccatgaatatcatgaaggacggcaagactgttatgactggtgagaggacaagctcatgtttgtacaagttacaagggagtgctgttgcaggtggagtcatggaagatgggcatgctggtgttgctgtgcacgatcttgaaggcggcgagcctggcgaaggctcgtcgggcggctcggcgtga

SEQ ID NO: 14304 - DNA, 1221 bp, Oryza sativa
  Clone ID: TFbOSC4861j.C1.o1.fg
atggcggcaacggtggtttccaaatttgaggtggtgaagttcgatggcaccgggaatttcgttctctggcagatgaggctgaaggatctgttggctcaacagaggatatccaaggctcttgaggagacgatgctggaaaagatggatgctggcaagtgggaggagatgaagacgcaggcagctgcaacaatatgcttgagtctctcggattctgtcatgtaccaggtcatggatgaaaaaacgccgaaggaaatttgggacaagttggcaagcctgtatatgtccaagtcgctgacaagtaagttgtatctcaaacaacagttgtatggtttgcagatgcaagaggagtcagatcttaggaagcatgtggacgtcttcaatcaattggttgtggatctaagtaagttagatgtgaaactggatgatgaagacaaggccataattcttctgtgctcgcttccaccgtcttatgaacatgtggtgactaccctaacgcacggcaaggatactgtcaaaactgagataatttcgtcgttgcttgcacgagacttgagaagatcaaagaaaaacgaggcaatggaggcttctcaggctgagagtttgctggtcaaggcaaagcatgatcatgaagcgggggtgtcgaagagcaaggagaagggggcacggtgctataaatgtcatgagtttggacatataaggaggaattgtccgttactgaagaagaggaaaggtggcattgcaagtttagcagctcatggtgatgattcagatagcagcagtcatgagattctcacagtgtctaacgagaagtctggagaagcgtggatgttggactcagctagttcctatcacgtgacatcgaagcgggagtggttctcttcatacaaatctgtgggcgatgtcaagttcaagatgtatgatggaaacgaggtgctactttcagatgtgagacacgtgccgggactaaggaagagtttgatttcgcttgggagcctacatgagacaggttggttgtatcaggtggattctaataggaagaccatgaatatcatgaaggacggcaagactgttatgactggtgagaggacaagctcatgtttgtacaagttacaaggaactgctgttgtaggtggagtcatggaagatgggcatgctggtgttgctgtgcacgatcctgaaggcggcgagtctagcgtaggctcgtcaggcggcttggcgtga

SEQ ID NO: 14305 - DNA, 4430 bp, Oryza sativa
  Clone ID: TFbOSC900064j.C1.o39.np
gactacgttggtgattctgaggatgatgcggaccaacgacgacttcgcttcaaccgcctggtatggctcgtcgtcggccacgccgtgaggtacggaataatgatgattcatttggtaagattaaattcactattcctacttttgatggtaagtatgaccatgatgcttatctttcaggggagttagcagtagatcaaaagtttgcttgccatgatgttcctgtggataagagggttagggctgccggtagtgaatttactgattttgcttctgtttggtggagtaaataccatcgtactcatataaatgctttgccacttacttgggatggtttgaaatgaattatgcatgctagatttgtaccttcatattatgcacgtgacatgttaaataagctacaacaattgaaacagggtgatactagtgtggaagaatattaccaagcgctgcaaatgggtatgttatgttatgggttagtagaggacgaggaggctgccatggctcgattcttggtgggcttagaccgagaaatttatgatattcttagttacaaagagtataataatatgactcagttatttcactatgcctgtaaagctgaaagggaagtgcagggatgacgtgcgcaaacaagggctatcattcctgcaggtagaactccatggacggctcgatgtggcgctgccccagctggtcacgcatcagcttcgacatcgacatcagcaccctccaacagcaacaaagcgcggccaacaccttctgcggcctcccgtcatgctgcagaggctgcagcaaagcccgccaagagtgcctcctccgttgtttccacgggcagaacaagagatgtttagtgccaccgttgcaagggctttgggcacatgcagcgtgactgccctagcaagcgtgttttggtagtcaaggatgatggtgagtactcgtttgctagtgatttcgatgaagatacacttggattgcttgcaactaacaacaaaggtagcgaggaagaggaacacgtcggggctgatgttgcggaccaatatgagagacttattgtgcaacgtgtcttgagtgcacaaatgggcaaagtagagcagaaccagtggcataacctttttcagacgaagtgtgtcgtcaacaagcgttcctgctgcacaatcatcgatggaggtagttgtaggaacttggtaagtacggagatggttacaaagctagctttgcagacgaaaccacatccccacccatactatattcagttgttcaacaacagtggccgcattaaggtaacacaactggtgagattaaattttgcaattggttcttactatgattttgttgactgtgatgtcgtacctatgcatgcttgctccttgctgttgggtaggccttggcaatatgataaagacacgttgcatcatgatagaaccaatcaatactcctttatgcataatggaaagaaaattgtgttgcatcctatgactcctgaagttgtttttgagaatgatgttgctagagctaacaaagagaaaaatcataacaagaaaggttctaaatctaaccatagcaaggatactgtgattaaattgaatggtccttgtttgcatgccactaaatctgatattgtcaatttggatacaagtgacactgtttgctatgctctcatttgcaaggatgccttgttttcttttgagaatatgcctgtctcttttcctcctgcaatcactaaccttttgcaagagtatgaggatgtgatccccaaggacatacctctgggcctgccacggtgcgtggaattgagcatcaaatcgacttgatcccaggagcttcgttacccaatcgtgcgccataccgaaccaaccccgaggaaaccaaggagattcagcgtcaggttcaggacttgcttgacaaagggtacgtacgtgaatctcttagtccatgtgctgttccggtgattttggatcatggcgtatgtgtgttgattgtagagctattaataacattaccattagatattgtcatcctaggttagatgatatgcttgatgaattgagtggctctactgttttctctaaagttgatttgcgtagtggttaccaccaaattggtataaagttgggcgatgaatggaaaacgacatttaaaacaaaatttgggttatatgagtggttagtgatgccctttggtttaactaatgcaccaagcactttcatgaggttgatgaatgaggttttgcttcctttcattgaaaaatttgtggtggtatactttgatgacattctgacttatagcaaatctttggaggaccatctcgatcatttacgtgttgtttttaaagctttacgtgatgcacgtttgtttgataaccttgagaagtgcaatttttgcaccgatcgagcctcgtttcttggctatgttgtcactccacaggagattgaggttgatcaagccaaggttcaggcaattcagagttggtcgactcctaaaacggtttcacaggtgcggagctttctaggactcgtggggttttatcgccattttgtgcgggatttcagcaccattgctgcaccattgaatgagcttacaaagaagggagtgcctttcacttggggcacatcacaagagaatgccttcacatgttgaaagataagttgacacatgcatctctcctccaacttccagattttaataagacttttgaacttgagtatgatgctagtgggattggattgggtggtgttttggtacaagaaggaaaacatgttgcatattttagtgaaaaattgagtgggcctgttctgaattactctacttatgataaggaattgtatgctcttgtgcgcactttaaaaacatggcagcattatttgtggcccaaggaatttgtcatacattctgatcatgagtctttgaagcatattcatagtcaaggaaaactgaaccgtagacatgctaaatgggttgaatttattgaatcttttccttatgttattaaacacaagaaagggaaggaaaatgtcattgctgatacactgtctaggagatatactttgttgacacaacttgacaacaaattttttggcctagaaatgattaaagaccaatatgtacatgatgatgatttcaaagatgtgttgctgcattgtaaggatggaaagacatggaacaaattcttcttgaatgatgggtttgtttttagagctaagaagctatgcattccagctagctccgttcgcttgttgttgttgtaggaagcacatggaagtgatttgatggggcattttggtgccaagaagacggtggacatccttgctggtcattttttttggccaaagatgagacgagatgtagatcgattcgttgctcgctgtgctacatgtcaaaaggctaagtcacgttttaatccacatggtttgtatattcctctccctgttcctactattccttggaagatatttcaatggattttgtgttaggattgcctaggaccaatagggggtgtgatagcatttttgtggttgtggatagattttctaaaatgtcacatttcataccatgtaataaaactgatgatgcttctcatatcgctgatttgttctttcgagaaattgttcgcttgcatggtgtgccaaacacaattgtttctgatcgtgacacgaaatttcttagctatttttggagaactttgtgggctaaattggggactaagcttttgtttactactacttgtcatccccaaactgatggacaaacagaagtggtgaatagaaccttgtctactatgcttagggctgtttcgaagaaaaatatcaagatgtgggaagaatgcttgcctcatattgaatttgcttataactgttccttgcattctactacaaagatgtgcccatttcaatttgtgtatggtttgttgcctcgtgctcccattgatttgattgctttgccatctcctgaaaaactgaattttgatgctaagcaacgtgctaagttgatgttaaagctgcatgagacaactaaagaaaacatcgagcgcatgaatgctaagtataagtttgctggtgacaaaggtagaagggaattgaattttgaacctggagatttggtttggttgcatttgcgaaaagaacggtttcctgacttgcaaaaatctaaattgatgcctagagctgatggtccatttaaagtgttagccaaaattaatgagaatgcatataagcttgatttgcctgcagattatggggttagtcccacatttaacgttgcagatttgaagccatatttgggcgaagaagatgaacttgagtcaaggatgactcaaatgcaagaaagggagtatgatgaggacatcaataccaacgatatatacatccacacctccacaagtacaacttcatggtcctattacccacgctcatgcacgtcaactcaactatcag

SEQ ID NO: 14306 - DNA, 3417 bp, Oryza sativa
  Clone ID: TFbOSC400483j.C1.o14.gm
atggcaagccgacgtcgggcgtcaaccagcaatgatgaaacccagacacctgacctaaccaccctggccggagttatggccactcaaacccaacttctgcaagccattgcaaacaatcaaggcaaccacgaaggatcaagctttggagagtttatgagcaccaagccacccacgttcactacgacagacgagcctatggaggcagaagattggctacgtatcatagagaagaaactgacccttatccgggtgcgcgaagccgacaaagtgatcttcgcagtaaaccaactggagggacccgctggtgattggtgggatacttacaaggaagctcgggaagaggatgctggagaacccacttgggaagagttcactgcagcatttcgcgagaacttcgtgcctgctgcggtaatgcgtatgaagaagaacgagttcagaaggctgcgacaagggaacacaacggtgcaggaatatctgaaccggttcactcagctggcccgctatgcaattggagaccttgcaaatgaagaggaaaagatcgacaagttcatagaagggctgaatgatgaattgcgtggacctatgattgggcaagaccatgagagcttccagagcctgatcaacaaagtcgttaggctggagaatgaccaaaggactgtagagcacaaccgcaagaggaggcttgctatgaatcgcccacctcagggagtgcctcagcgactcaagggagccacttcgtctgggtggaaaccccctattgtggcgaccaaccgccccgccgcacctagcaatttcaacaggccggttgcaattcagaaccgcacccctacaccaactctggctgcccctggagccaagaagaatgtggactgcttcaattgcgaggagtatgggcactacgccaacaactgccctcatccacgcaaaactcctgtccgtactagcgctaatgcaatgactgttcgtgggactactatccctattgccggacgaggtctattcaagactccgcaaactaacaggaccgctaccagatttgggcgcggacaagtgaaccatgtccgagctgaagaggcccaggaagatcagggcatactaatggactaccgttcactgaacgaagtaactatcaagaataagtatccactaccacggattgatgatctcttcgatcaacttaaaggagctaaggtgttctctaagatcgacctccgatcaggatatcaccaactgaaaattaggaccggggatatacccaagaccacgttctcaacgcgctatggattgtatgagttcacagtaatgtcatttggattaaccaacgccccggcatactttatgaatcttatgaacaaagtgttcatggattacttggacaaatttgtggtagtattcatcgatgatattttaatctactccaaggatgaggaagagcatgtggagcacttgcgattggtactcgagaaacttcgaaagcataagttatatgcaaaatttagcaaatgtgagttctggttgaaggaagttgcttttctaggccacgtgatctcagccggtggagtagcagtggatcctgctaaagtggaggctgttacgaaatggaaagcacccaagtctgtgactgaaattcggagttttctaggcttggccggatactaccgaaggttcattgaggggttctctaagatagcccgaccgatgacacaactactcaagaaggaaaagaagtttgtgtggtcagaacagtgtcaggaaagctttgagcagctcaaagaaaagctgacctcggcgcctattctagttcttcccgacatcaggaaagactttgttatatattgtgatgcatcaaggcaaggactaggaggagtactgatgcaggacagaaaggttgtggcctatgcgtcacgacaattgcgaccacacgaggaaaactaccccacccatgacctagaactcgcagctgtggttcatgcgctaaagatttggagacactatctgattggaaaccattgcgatatctacactgaccacaagagtctgaagtatattttcacccagtcagatctcaacttgaggctaaggcgatggctggaattaatcaaggactacgatctagaggttcactatcaccccggcaaggcaaacgttgtggccgatgctttgagtcggaagagccattgccatcatctgaggacggaagggatggatgtgcaaaggaattttcaaccgatgaaaaaggtgttctatggtacaaaaagaggatctatgtacccgaacagggatctgaaggagggttactggtggcccaacatgaagagagatgtgaccgaatacgtagcgctctgcgacgtatgccagatggtgaaggctgagcaccagaggccggcaggtgaacgtgcggtatttggacccgacattatcaaagaggccgaagagaagctaccagaaaacatcgccgatgtgcatccagtcttccatgtgtcccaattaaagaagtgcttgcgagtgccggaggagcaagctccgttggaggaaattcatattagcaatgatctcacgtacccagagcatccagttcggatactggatgaagtagaaaagaggactagggccaaagtgtggcatatgtacaaggtacaattgagtaatcacactgaggataaagccacttgggaaagtgaagaattcttgaagacagaatacccgcatctgttcgaagaccgccctaacccccctcccactctgccccgcgcgtggccgccccgagccccgcgctgccgttccatcgcctcgagccccgcgccgccgtcacgtcgccgcccgtcgccgcgtgtcatcgccgtcgccgtcgccgtcgcgttatctcgcgccccgtgccgccgttgctgcgccgtcgccgtcggccgtcctatcgccgctcgcccgtcgggtcaccgcctcgcgccacgcgccccgcgcgccgctcgcccgtcgcgtcgccgcctcgcgccccgcaccctgccgcgccgctcgcccgtcatcgttgcatcgccgtcgccgtcgcgccgagccccgcgccgcgccgcccgcccgtcgccatcgccgccagccacaccgcgcaccgcctgtcgcgtcgccatgaggccgcccacccctcccccgcgcccttatagaactcggcccctccccttctccaccccacacccatcctcaccatttcccccccctctcctccttctccacgcgccgccgccgtcgtgccgccgcgccgccgccttcgtgcgccgcgccgtcgcctcgaagccgccgcgccgcgccaggtgtggtgccgagcgttgccgccttgcgccgccgccgccgactggcaccgacggtaagattgggtggtatctgggaaaggctagtaccgtccccggtcaattaaagaccgagccatga

SEQ ID NO: 14307 - DNA, 1116 bp, Oryza sativa
  Clone ID: TFbOSC8260j.C1.o3.np
ttgtctcctctcgcccttcggcatttctttgtcaaacggttttcaaaattctcctcccaatctctccaattcttttagttgtcacacctagaggaccagccgtcagcttcatgtctgttcagaagtcaagtcaagtcaaatctcaagcttcgcgcagaaggagcaacaattggtcagcatgagggacaatttcaacggatcaggatcccatcagtttcatggatcaactcagctcaattctaatagtattccacgtcagcctcttgaagatcagcctcaaccccaagtcatggctaatcaaactcagatagtggaagagttgttacaacagatgcgacgtcggtaccaaatataccagatgcaacagatgcaacgacaatgtcaggagtcacgtcaatgtcacccaccgcaggtgcgagatcagatgccagcccggaacccgaatcagagtcagagtcaggagttcccaatatcagcaccgaagacccctgtcaaaatgcagtccagatccccgaagataacgacagccaagtcaacgtcagaccaaaggacagtaagtgctacctgttatgactgtggtgagcaaggtcattatgtaaggaactgtccatggaaggtgttcgccaggtcacctgaaaaagacgagaagtagtgcccagggagtaaccaagctccaagtcagtctaccgacaagaaggatggtactttgcagcccaactctggagcgaacaggacagtgatatggaagatggataatggcaggaccatgatcatcaccggttcagaatttactcctgaagacgcagcaaggatacccaagcgtcagagaggaagaaataccttccgaggagcgcgtcagctaacccgtcatctcataaagtacggtccgcccagacccgaagatgatgaatcaggagaacggttttctgctgatgacaatgacgacaacgatgatgataatgatgacaatgatgatgcgacccttgactgtttcagggaaagagagtgaagttcaaagcatgtgctagatgtgggatagtcggacacactgctagctattgcctccccacatgccgctgtggtgaatatacccattactcagatgcatgcctgcag

SEQ ID NO: 14308 - DNA, 4911 bp, Oryza sativa
  Clone ID: TFbOSC13851j.C1.o2.fg
atgccgcgctacaagcctgagtacttgtttggttttgagggatttgtccaggagttgcgtaccataggatttgggactgcccctttgtatgcccagattcctcatgatcgtcacgaagagaagtgccgagtcaaagtcaccttgaacagtaatagtgaagatatcccatcagtgatgttcgaagctggaggaggaaactacatccatgcatgtcaggaggtggcaaggatcgccataggagagctccgcgatcgctacagtgatcagttggctgacactgagtatcgctaccatcctcgccaaccccagggaagtgaccgtggcagctaccttgagactgaggggattgagaatgatgctaccacaaggcatttggttgagatgctgtgggctatggatgaaacccgcgcggaggttgtgctagcagctcaagatcgtgaagaccggaatcgtggtaagatttgcaggctagaggacaaggtggatcgtttgaagaaggaactagccgcgttgaagggagaagcaccaccgcagaaggccaggattcatcttaccgcaaggaagagagctctatttgtccctcgctaccaattggcgccaaaggtccgtgtggtggagaaagaagttaccccagccctagcggatcctccggtcgtcaataacaagttagcagaatttattcgtgtgaggccgcccactttctctagcaccactaatcctgttgaagctggcgattggttgcatgccatagagaagaagttggatttgcttcagtgcactgatcaggagaaggtctcatttgcatcacatcagctgcatggccctgcctctaagtggtgggatcacttccgccttaacagaactactgctgaacctatcacttggcttgaattcaccgctgctttccggaagacgcatataccatcgggagcggtgtctctcaagaagaaggaattcaggtcgctcacccagggatctcgcacggtcaccgagtatctgcacgagttcaaccgtctggctcgttatgctccggaagatgtgcgcactgatgaagagcgccaggagaggttcttggaaggacttaatgatgagctttcttacccactcatgactggggattatcatgatttccagaagttagtggataaggctattcgccaggaggacaagtacaaccgcatggagcagaagaaacgccggattgctcacttcaaggcacaacaggggaatagtcagaggccgcgtcttactttaggaccccagtccatgccacagggaggttcttcgtctgttgttcgtccgcagtgtcagttcttcaacaacaatgctggcaacaacatccgcaatcaagctccacgccctgttgcagctccaacacagcaacagcctgccaagagggagcaaggtagcaagcccggggtgtgcttcaactgtggagacccaggacattactctgacaagtgttcgaagccccgacgcgtgaaggttgtcccggcccagagcaactctaccgcaccagcatcaaaggctcgtgtcaatcatgttgctgctacagaagctcaaggtgctccagatgtgattttgggtacgttccttgtcaactcagttcctacaacagtgcttttcgattctggtgctacacattcatttttatctatgagttttgcgggaaatcatgggatggaagtagaagatcttatacgtcctttgatggttagtaccccaagtaatcaagcactctctttgcaacgtagcccctctgtcagaatagaaattcaagaagtaccatttctggccaatcttatcctgttagaatccaaagaccttgatgtcatcctagggatggactggttagccagatataaaggtgtgatagactgtgccaacagaaaagtaactctcaccagcaatgatggtcgagttgtaactgttcatgcattgtcttctgagtctttaaggtcaagactgaaccaaatgactttggaagagattcctatagtccgggagtatcccgatgtgttcccagacgatttacctggtatgccgcctaaaagggatatagagttcagaatagatttggtaccaggaacaactccgatccataagagaccttatagaatggcggccaatgaattagcagaagtcaagagacaagtagatgatttgcttcagaaaggatacatcagaccgagttcatctccatggggagctccggttatttttgtggaaaagaaagatcatacccagaggatgtgtgtggactatcgtgcactaaatgatgtgactatcaagaataagtacccgctgcccagaattgatgatttgtttgatcagcttaaaggtgccaccgttttctccaagatagatcttcgatcagggtatcaccagttgagaatcaaagaggaagatatacctaagacagcttttatcactaggtatgggttgtttgaatgtactgttatgtcttttggacttaccaatgcccccgctttcttcatgaacttgatgaataaggtgtttatggaatacctagacaagttcgtggtggtctttattgatgacattcttatctactctcgaacaaaagaagagcatgaagaacatcttcgccttgcactagagaagctacgagaacatcaactgtatgccaagtttagcaaatgtgaattttggttgtttgaagtgaagttccttggtcacgtcatctcagccggaggagttgccgtcgatcctagtaatgtggaatccgtaaccaactggaaacaaccaaagacagtttcagagattcgtagtttcctaggcctcgcaggatattatcggaggtttatagagaatttttccaagattgctaagcccatgacacgattacttcaaaaggatgtaaagtacaagtggtcagaagaatgtgagcagagttttcaagagttgaagaatcgcttaatatcagctcctattttgattttgcctgatccaaagaagggttttcaagtgtattgtgatgcatccaagcttgggttaggttgtgttctgatgcaagatgggaaggtggttgcctatgcatctcgtcagttacgtccgcatgagaagaacaaccctactcatgatcttgagttagctgcagttgttcatgcgttgaagatttggcgtcattatcttttcggtactcgtacagaggtatacaccgatcacaagagtttaaagtacatctttactcagccagatctgaacatgagacaacggagatggttggaattaattaaggattatgacatgggaattcattatcacccgggaaaggctaatgttgtagcaaatgctcttagcaggaaaggctattgcaatgctacggaaggacgacagttgccattggagttatgcaaggaatttgaaagattaaatttgggaattgtcagtagaggttttgttgcagccttagaagcaaagcccactctaattgatcaagttagagaagcccaaattaatgatcctgatattcaagaaatcaagaagaatatgagaagaggaaaagctatcagtttcttggaagatgagcaaggaactgtatggttgggcaagagaatctgcgtccccgacaacaaagatttaaaagatgcaattctgaaagaagctcatgatactttatactccattcaccctggtagtaccaagatgtaccaggatctcaaggaaagattttggtgggcaagtatgaagcgtgaaatcgcagaatatgtagcagtatgtgatgtttgtcagcgagtcaaggcagaacatcagaaacccgcaggtttgctgcagcctttgaagattcctgaatggaagtgggaggaaatcggtatggatttcatcactggtctacccagaacatcattaggccatgactctatttgggtgatagtcgacagacttaccaaagtggctcatttcattccggtaaagacaacttattccggaagtcgcttagcggaattgtatatggcaaggattgtgtgtttgcatggcgtccctaagaagatagtgtctgatcgaggcagtcagtttacttcaaatttttggaagaaacttcaggaagagatgggttctaagctgaactttagtactgcttatcatccgcagacagacggacaaaccgaaagggtgaatcaaattttggaagacatgttgagagcttgtgctctagatttcggtggaagttgggataagaatctaccctatgcagaattttcgtacaacaacagttatcaagctagtcttcagatggctccttacgaagcactgtatggtcggaagtgtcgcactccgcttttgtgggatcaaacgggagaacgtcaggttttcggaacggatatcctaagggaagcagaagaaaaagtaaagattatccaagagaggttgcgcgttgctcagtctcgtcagaagagttatgccgacaatcgtcgcagagatttggctttcgaagaaggagattatgtatacctgcgggttacgccgttacgaggtgttcatcgtttccaaaccaaagggaaattggcaccgcgttttgtgggaccttttaagattgtgagtcgaagaggtgaagtagcttatcagttagagttgcctccgtcaatggcgggaatacacgacgtgttccatgtgtctcagctgaagaaatgtttacgtgtacctacagaggaagcagatcctgatcgtatagagcttcaagaagatttaacttatgttgagaagccagtcagaattttggaagtaagcgagaggaataccaggaatcgcgttatacggttctgcaaggttcagtggagtaatcattcagaagaagaagccacttgggagcgagaagatgaattgaagtcagctcatcctcatctgttcgccagttcttctgaatctcgaggacgagattccgtttaa

SEQ ID NO: 14309 - DNA, 5240 bp, Oryza sativa
  Clone ID: TFbOSC33758j.C1.o1.np
atggccgactgtcccctcacgcaccaaggtcagactatgggaggcttcgttgcagagttgtcccgcatagcgtttgtgattggttttccaagggagccgcagtacaccagcattcaccccctcagtggcgaattcccgcatcaggtccgcttggagattcatgacatacccacctacctgcccaacatggaggtgacagcttgtgggggcacatttgagcatgcttgtgaggaggccgccctcaggatgatggcccatctgagggagctgcatgacggcgtcctgaacaccaccgcctaccgcttccacccttgccgcggttccagctccaacagcagcaccttcaagtcagcgtggggagagaacgacgtcaccttcggccacatgagtgacgtgatgaggagctacgacaagttgcacgccatgctccacaaagcgaccaagagtctcaacgaccagaagcttgtgaggatcgcagatctgcaggatgagaacgctcgactcaagaaggaggtccctaggctttagggacgtccaccgccaggaggagcccgcatccgcaccacgccaaggaagtcgaccacagctccagtgcgcatccagcttgcgcctaggaacccgccgcagcctccacctctagcaccgcctgcagctccggcgccagctccagttctagctccagctccatctaccgcagcatcttcagcccccgtgctagagttcggcttcactttcgtgccagcttcggcctacaggggtctagcaggtggcagtggaggatgcttcctttagatggtcaacactaggaatggcagccgtgcagcaggtgagggcaacaacagcgaagaacgcaccgacggtggataccccaacagtgcctccggcaatggtccgccaccgctccccgagaatccgactcttgcataagtgatggcccatcagacccagatgatggcagccatgatgtagcagatgcagcagcagcaccagcagatgcaccagaggatgcagcagcaggctgagcagcagcaacagcagtttggtccccctcccccttagtccaagctgctggagtttctacgagtcaggccacccaccttctccagcaccaccaaccccatggaggcaaatgactggctccatgccatagagaagaaactcaatcttctgcagtgcagtgataaggagaaagtcgccttcgccacacaccagctccagggtcccgcgtcagcttggtgggacaaccacatggctacccgtccgccaggcacagaggtcacctgggcagaattctgtcgcagcttcaggaaggctcaggtgctagacgaggatgtggcacaaaagaagagagtattccgggcactccaccaaggcaacaggacagtaaccgagtacttgcatgagttcaatcgcctagcgcgatatgcaccggaggatgtccgcactgacgcagagaaataggagaagttcctagcgagcctggatgacgaactgaccaaccagttgatctccggggattacgctaacttcgagaagctggtagacaaggcaatccgtcaggaggaccagcgcaacaaaatggataggaagagaaaggcaactcagttccgatccaaccaaggaagtcatcagcgaccgtgcttcacttccggataacagggtggacctaccaccatgattgttcgacagcatcatccttacaacccaagcaacttccatcccggcagcagtggcagccatcttggctaagggcagcacaaccgcggcgcagccccacgcccgccaatggcgccagttcagcagactgcacccgttcccccaaagaaggacaccggaggcaagccaggagcctgcttcaactatggtgagtctggtcacttcgccaacaagtgcccgaagccgaggcgcgctggacccaagtttgtccaggctcgggttaaccacgcgtccacagaagaggcgcaagcagcaccagaggtcgtattgggtacgtttcctgttaactcaatccctgcaacagtacttttcgattctgatgcaacgcattcattcatttcaaagaagtttgttggggtgcatgggttaagaaaagaagagcttagtacaccaatgagggttcataccccgggaaatagttcaacctcggtcagttatagcccttccgtgctaatagaaatccaaatatcacgatttctacccaacctcatccttctcgaatccaaagacctagatgtcatccttgggatggattggctgaccaagttcaagggtgtcattgattgtgcgaatcgcacagtcactttgaccaatgagaagggagaaaccatggtgtacaagtcaccagtctcaccgaatcagggaatctccttgaatcagattgaggtggaaaatccggtggtcaccgaggagaagggttcgaggaaattggaaggtattcccattgtctgcgagtatccagaagtgttccctgaggacctcactaccatgccacccaagagggagatcgaattccggattgatttggcaccgggaactgctccaatttacaagagaccgtacagaatgacagccaacgtgctagcagaggtcaagaagcaggttgatgagcaactgcagaaagggtacattcgaccaagtacttcaccttggggtgctccagtcattttcgtggagaagaaggacaaaacgaagagaatgtgtgtcgattattgcgcactcaatgaggtcaccatcaagaacaaatatcctttgccgcggatcgatgatctatttgatcagctgaaaggagccaaggtgttttccaaaatagacatacgatcaggctatcaccaattgagaatccgggaagaggataatcccaagacagccttcaccactcagtatgagttgtatgagtgcacggttatgtcttttgaactcaccaatgcacctgcattcttcatgaacctgatgaacaaagtgttcatggaatttctggataagtttgtcatggtattcattgacgacattcttatctattccaagtcggaagaagagcatgagcaacatctccgtctggtactcgagaagttgaaggagcactagttatatgccaagttcagtaagtgtgacttctggttgtcggaagtcaaatttctgggtcacgtcattacggcccaaggtgtggcagtggatccatcgaatgtggagtaagttacctagtggaccccacctaagacagtgtcacagatttggagtttccttggacttgcgggttatttccgtcggttcattgaaaatttctctaggattgccagacctatgactcagttgcttaagaaagaagaaaagttcaagtggacggccgagtgtgacaagagttttgaagagctcaagaataaattagtgtctgctccagttctgattctgcccgataagacgaaagacttccaagtcttctgcgacgcgtcccgccaagggctaggatgtgttctgatgcaagaaggtcaagtggtcgcatatgcctcgcggctattgcgcccacatgaaagcaattatcctacccatgatttagagttggcagcagtagtccacgctctaaaaatctggcggcactacctcgtcggtaaccgttgtgaagtttacacggatcacaagagtctgaagtatatcttcacccagcctgatttgaatctccgacagcgaagatggttggaattgataaaagattacgacatggggatacactaccatccaggcaaggctaatgtagtagcagacgctctgagcaggaaaagctactgcaacgccttgggtattggagacatgagtgacaagttgctacaagagcttgaacccctcaacttaggaattgtagaacacgggtacgtggctgcccttgaggcacagcccatgctcgtggaccaggtccgagcagctcaggtaaatgatcctgaaatagctgagctgaaaaagaatatgagggtcggaaaagcccaggatttccatgaagatgaacatggcacaatctggttgggagaaagatttgaaagacctgatactcaccgaggctcatcagactcaatactccattcatccaggaagtacaaagatgtataaagatctcaaggaaaaattttggtgggccagcatgagaagggaaatagtggagtttgtcgcactctgcgatgtttgtcagcgagttaaggcagaacatcagagacccgcaggattattacaacccctctagatcccggaatggaaatgggaagaaattggaatggatttcatcacgggtttgcccaggacatcatcagggcacgattgtatctacatgggtcatgtgtctgcatggggtacctaagaagattgtatctgatcgagggagtcagtttacctcaaaattttggcagaagctgcaagaggaattggggacccgtttaaatttcagcacagcttaccatcctcagacagatggccagaccgagagggtcaatcagatcttggaggatatgctgcgagcctgtgcactcgattttggcggagcttgggataagagtctgccttatgctgaattctcttacaacaacagctacgaggccagtttacaaatggctccatttgaagcattgtatggccggaagtgccgcacacctctcttttgggatcaaaccggcgaacgtcagttgttcgggacagaagtgctaactgaggcagaggagaaagtcagaactatcagggaaaggctgaggattgcacaatctcgacagaaaagctacacagacaaccgtcgaagagagctcacttttgaagtgggggattatgtgtaccttcgtgtcactccgctccggggagtgcaccgtttccagataaagggcaagttggcaccacgcttcgtgggaccatacaaaatcttggaacaaagaggagaagttgcatatcagctagaactcccatccaacatggccggtatacatgatgtgttccatgtgtctcagttaaagaagtgcttaagggtactgggagaacaagccaattcggagcacatcgatatccaagaagatctgacttatgtggagaagccagttcgcatccttgagaccaatgaaaggaggactagaaacaaggtcaccaggttctacagggttcagtggagccaccactcagaggaagaagcaacctgggaaagggaagatgagttgaaggccgcccatccgcacctcttcgccagctcttccgaatctcggggtcgagattccgtt

SEQ ID NO: 14310 - DNA, 4911 bp, Oryza sativa
  Clone ID: TFbOSC900091j.C1.o16.fg
atgccgcgctacaagcctgagtacttgtttggttttgagggatttgtccaggagttgcgtaccataggatttgggactgcccctttgtatgcccagattcctcatgatcgtcacgaagagaagtgccgagtcaaagtcaccttgaacagtaatagtgaagatatcccatcagtgatgttcgaagctggaggaggaaactacatccatgcatgtcaggaggtggcaaggatcgccataggagagctccgcgatcgctacagtgatcagttggctgacactgagtatcgctaccatcctcgccaaccccagggaagtgaccgtggcagctaccttgagactgaggggattgagaatgatgctaccacaaggcatttggttgagatgctgtgggctatggatgaaacccgcgcggaggttgtgctagcagctcaagatcgtgaagaccggaatcgtggtaagatttgcaggctagaggacaaggtggatcgtttgaagaaggaactagccgcgttgaagggagaagcaccaccgcagaaggccaggattcatcttaccgcaaggaagagagctctatttgtccctcgctaccaattggcgccaaaggtccgtgtggtggagaaagaagttaccccagccctagcggatcctccggtcgtcaataacaagttagcagaatttattcgtgtgaggccgcccactttctctagcaccactaatcctgttgaagctggcgattggttgcatgccatagagaagaagttggatttgcttcagtgcactgatcaggagaaggtctcatttgcatcacatcagctgcatggccctgcctctaagtggtgggatcacttccgccttaacagaactactgctgaacctatcacttggcttgaattcaccgctgctttccggaagacgcatataccatcgggagcggtgtctctcaagaagaaggaattcaggtcgctcacccagggatctcgcacggtcaccgagtatctgcacgagttcaaccgtctggctcgttatgctccggaagatgtgcgcactgatgaagagcgccaggagaggttcttggaaggacttaatgatgagctttcttacccactcatgactggggattatcatgatttccagaagttagtggataaggctattcgccaggaggacaagtacaaccgcatggagcagaagaaacgccggattgctcacttcaaggcacaacaggggaatagtcagaggccgcgtcttactttaggaccccagtccatgccacagggaggttcttcgtctgttgttcgtccgcagtgtcagttcttcaacaacaatgctggcaacaacatccgcaatcaagctccacgccctgttgcagctccaacacagcaacagcctgccaagagggagcaaggtagcaagcccggggtgtgcttcaactgtggagacccaggacattactctgacaagtgttcgaagccccgacgcgtgaaggttgtcccggcccagagcaactctaccgcaccagcatcaaaggctcgtgtcaatcatgttgctgctacagaagctcaaggtgctccagatgtgattttgggtacgttccttgtcaactcagttcctacaacagtgcttttcgattctggtgctacacattcatttttatctatgagttttgcgggaaatcatgggatggaagtagaagatcttatacgtcctttgatggttagtaccccaagtaatcaagcactctctttgcaacgtagcccctctgtcagaatagaaattcaagaagtaccatttctggccaatcttatcctgttagaatccaaagaccttgatgtcatcctagggatggactggttagccagatataaaggtgtgatagactgtgccaacagaaaagtaactctcaccagcaatgatggtcgagttgtaactgttcatgcattgtcttctgagtctttaaggtcaagactgaaccaaatgactttggaagagattcctatagtccgggagtatcccgatgtgttcccagacgatttacctggtatgccgcctaaaagggatatagagttcagaatagatttggtaccaggaacaactccgatccataagagaccttatagaatggcggccaatgaattagcagaagtcaagagacaagtagatgatttgcttcagaaaggatacatcagaccgagttcatctccatggggagctccggttatttttgtggaaaagaaagatcatacccagaggatgtgtgtggactatcgtgcactaaatgatgtgactatcaagaataagtacccgctgcccagaattgatgatttgtttgatcagcttaaaggtgccaccgttttctccaagatagatcttcgatcagggtatcaccagttgagaatcaaagaggaagatatacctaagacagcttttatcactaggtatgggttgtttgaatgtactgttatgtcttttggacttaccaatgcccccgctttcttcatgaacttgatgaataaggtgtttatggaatacctagacaagttcgtggtggtctttattgatgacattcttatctactctcgaacaaaagaagagcatgaagaacatcttcgccttgcactagagaagctacgagaacatcaactgtatgccaagtttagcaaatgtgaattttggttgtttgaagtgaagttccttggtcacgtcatctcagccggaggagttgccgtcgatcctagtaatgtggaatccgtaaccaactggaaacaaccaaagacagtttcagagattcgtagtttcctaggcctcgcaggatattatcggaggtttatagagaatttttccaagattgctaagcccatgacacgattacttcaaaaggatgtaaagtacaagtggtcagaagaatgtgagcagagttttcaagagttgaagaatcgcttaatatcagctcctattttgattttgcctgatccaaagaagggttttcaagtgtattgtgatgcatccaagcttgggttaggttgtgttctgatgcaagatgggaaggtggttgcctatgcatctcgtcagttacgtccgcatgagaagaacaaccctactcatgatcttgagttagctgcagttgttcatgcgttgaagatttggcgtcattatcttttcggtactcgtacagaggtatacaccgatcacaagagtttaaagtacatctttactcagccagatctgaacatgagacaacggagatggttggaattaattaaggattatgacatgggaattcattatcacccgggaaaggctaatgttgtagcaaatgctcttagcaggaaaggctattgcaatgctacggaaggacgacagttgccattggagttatgcaaggaatttgaaagattaaatttgggaattgtcagtagaggttttgttgcagccttagaagcaaagcccactctaattgatcaagttagagaagcccaaattaatgatcctgatattcaagaaatcaagaagaatatgagaagaggaaaagctatcagtttcttggaagatgagcaaggaactgtatggttgggcaagagaatctgcgtccccgacaacaaagatttaaaagatgcaattctgaaagaagctcatgatactttatactccattcaccctggtagtaccaagatgtaccaggatctcaaggaaagattttggtgggcaagtatgaagcgtgaaatcgcagaatatgtagcagtatgtgatgtttgtcagcgagtcaaggcagaacatcagaaacccgcaggtttgctgcagcctttgaagattcctgaatggaagtgggaggaaatcggtatggatttcatcactggtctacccagaacatcattaggccatgactctatttgggtgatagtcgacagacttaccaaagtggctcatttcatcccagtaaagacaacctattccggaagtcggttggcggaattgtatatggcaaggattgtgtgtttgcacggcgtccctaagaaaatagtgtctgatcgaggcagtcagtttacttcaaagttttggaagaagcttcaggaagagatgggttctaagctgaactttagtactgcttatcatccgcagacagacggacaaaccgaaagggtaaaccagattttggaagacatgttgagagcttgtgctttagacttcggtggaagttgggataagaatttgccttacgccgaattctcgtacaacaacagttatcaagctagtcttcagatggctccttacgaagcactgtatggtcggaagtgccgcactccacttttgtgggatcaaacgggagaacgtcaggttttcgggacggatatcctgagggaagcagaagaaaaggtgaaaatcattcaagaaagattgcgtgtggcccagtctcgtcataagagttatgccgacaatcgtcgtagagatctaagttttgacgaaggagattatgtgtaccttcgtgtcacgcctcttcgaggagttcatcgttttcacaccaatggaaaattggcaccgcgttttgtgggaccttataagattgtcagtagaagaggagaggttgcttatcagttggagttacctcaatctttggcaggaatccataatgtgttccatgtgtcgcaattgaaaaagtgtttaagggtacctaccgaagaagctaatcttgaacagatagaagtccaagaggatctgacctatgttgagaaaccaatccgtatcttgaaaatagatgagagaagaaccagaaatcgagttatccatttttgtaaagttcaatggagtaatcactcggaagaagaatcaacttgggaacgagaagatgaattgaagtcagctcatccgcatctgttcgccagttcttccgaatctcgaggacgagattctgtttaa

SEQ ID NO: 14311 - DNA, 4356 bp, Oryza sativa
  Clone ID: TFbOSC900107j.C1.o19.fg
atgaccaggagaagtgctaataccggtgatggcaaccaacccgaaggcatcaacctcaacaaccatggcagcccacctccacctcctcctccgcctccaccaccaccaccagacaccaacgccatcctcacccaaatcctcgcccagcaagccaacatgacggctgctttcctccaccacatccaaaatccaccacagcataatgctccacctccaccaccacccccgcaacactctaagctcgccgagttccttcgcattcgcccgcctaccttctccagctccaataaccccgtggatgccttggattggttgcatgcagtggggaagaagttagacactgtgcagtgcaacgatgaggagaaagtcatctttgccacccaccagctgcaggggcccgcatctctatggtgggaccacttccaggctacgcagcccgaggggcagcctatcacctgggcccgtttcaccgccgctttccggagaacccatgtgcctgccggagtcatggcccttaagaaaagggaattccgggagttgaagcaaggcaaccgctccgtgatggagtatttgcatgagtttaacaacctggcccggtacgccccggaggacgttcgggaagatgaggaaaagcaagagaagttcttggcgggaatggactctgagctgtccgtacgtctggtgtccggggactatccggatttccaacgtctagtggacaagagcatcctcttggaggccaagcacaaagaattggagtcgcacaagcgtcgcttggcgaatttccgcaatcaacagggggctaaccaaagggtccgctacaccaatccctatctagggggatcctcctcgcagcagcaacagcagcaacctcgctccgcgccccgacctcaatttgtggtgcgcgttccccagccgcagcaacctcagggccagcaagggccccgtgcaccccgtcctcctgcgccagctgtgcagcctggtcaaggccacagagacgtacaaggtcagcagcgtctgtgcttcaactgcttcgaacccgggcactttgcggaaaaatgcccgaagccacgacgccagcaaggccaagcgcctccccgccccaacaacggtggtaaggacgtcgctcggggtcatgtgaaccacgtgactgccgaggatgtgctgacaactccagacgtcatcgttggtacgctcctcatccattccatccctgctaccattttgttcgactctggagcttcccactcgtttatatctgtgacattcgtggggagaaatcagttgggtgtagaaaggcttaggaaccctatgctcatcaccacccctggaggggttatgacagcgaagtattatagccctgccattcccatagaaattcagggaattccgtttccctcggatctgattcttctagacaccaagaacttggatgtgatccttgggatgaattggttggctcaattccaaggagtagtggattgtgcaagacgcactgtcactctgtaccgagggccagaacaaccggttgttttctttgcacccccaacctctgtcagtagttcagaacttcatcagataggactgtcagaaatccccatcgtcagagagttcggagacgtgtttccggaagaactacccggtatgccgcccaagcgagagattgagttccggatagatcttgctccaggaaccactcctctgtacaagcgaccctaccgtatggcagcaaatgaactggccgaagttaagaaacagttggaagagttgaaaggaaaggggtatatacgtccgagcacttccccctggggtgctcccgtaatttttgtggagaagaaagacaagacaaagaggatgtgtgtcgactacagagctctcaatgaagttactatcaaaaacaagtaccctcttccccggatcgatgatctgttcgatcagcttaaaggtgccacggtattctccaaaattgatcttcgctccggatatcaccagttgcgcatccgtgaagaagatatcccgaagactgcattcaccatgcgatacgggctgtatgaattcacggtgatgtcgttcggtctgactaatgctcctgctttcttcatgaacttgatgaacaaagtgttcatggagtacttagataagtttgttgtggtcttcatcgacgacattctagtgtactcgcaatcagaggaagaccatcaacaacatctctgtctggtgttgggaaagttgcgggaacatcaattgtatgccaagcttagcaagtgtgagttctggttgtccgaagtcaaattcttagggcacatgatatctgctaaaggagtcgctgtggaccccgaaacagtgaccgccgtcaccgattggaagcaacccaagacagtcactcaaattcgcagtttcttaggtttggcaggatactaccggaggttcatcgagaacttctccaaaatcgctcgacctatgacacagttgttgaagaaagaagagaaatttgtgtggagcccgcaatgcgagaaggcgttcaaaacactcaaagaaaagctggtttcctcgccagtgttaatcttgccggatactcacaaagacttcatggtgtattgtgacgcttcgcgccaaggactggggtgcgtgctcatgcaggaaggtcatgtggtagcctatgcctcccgccagttacggcctcatgaaggcaactaccctacccatgatttggagttagccgcggtgagaagatggttagagctcatcaaggattatgatgtgggaatccactatcatcccggtaaggccaatgtggtcgccgacgctctaagtcgaaaaagccattgcaacactcttaacgtccgtggcattccacccgaacttaatcaacagatggaagccctgaacctaagcatagttggtcgcggattcttggctgcgttggaagccaagcctaccttgctcgatcaaatccgcgaggctcagaagaatgatccggacatgcgtggactcctcaagaatatgaaacatggtaaagccgctggtttcacagaggatgaacacggcaccctatggaacggaaatcgggaagctcacgaaagtccttattccatccaccctggcagtacgaggatgtacttagacttgaaggagaaatactggtgggttagtatgaagcgggaaattgcagagttcgtggccctttgtgatgtgtgccagcgtgtcaaagcagagcatcaacgaccggccggacttctccaacctctccaaataccagaatggaaatgggatgaaattgggatggattttatcactggacttccaaaaacccaaggtggatatgattctatatgggtagttgtggaccgactaaccaaagtagctcgctttattcctgtaaagaccacatatggaggaaacaaactagctgaactctatttcgccaggatcgtaagtctgcgtggcgttcccaagaaaatcgtatctgatcggggaagtcagttcacctctcacttttggaagaaactccaagaagagttgggtacccgattaaatttcagcaccgcgtatcatccgcagacagatggtcaaaccgagcgtctaaaccagatcctcgaggatatgcttcacgcatgtgtcctagatttcgggaaaacctgggataagagtctcccctatgccgagttctcctacaataacagctaccaagccagcatacaaatggcaccctatgaagcgttgtatggacgcaaatgtcggacaccgctattgtgggaccaagttggggaaagccaagtgttcgggaccgatatcctgagagaagccgaagctacggtcagaaccattcgggaaaacctaaaggtggcacagtctcggcagaagagttatgcagacaaccgacgccatgacctggaattcgcagtggatgactttgtgtatctccgggtaacgccattgcgaggggtacacaggtttcagacaaaagggaagctcgcacctcgattcgtgggtcctttccgcatcactgctcgacgcggagaagtagcttaccaattggagctgcctgcttccttgggcaacgtgcatgatgtgttccatgtgtcgcaactcaagaaatgtcttcgagtgccgtccgagcaggctgactcagagcagattgaagttcgcgaagacttgacctacgtggagagaccagtgaaaatcctggacaccatggagcgcaggaccaggaatcgggtaatccgtttttgcaaggtccaatggagcaaccatgccgaggaagaagctacttgggagcgtgaagaagagctgaaggcagcccatcccgatctcttcgccagttcttccgaatctcggggtcgagattccgtttaa

SEQ ID NO: 14312 - DNA, 5430 bp, Oryza sativa
  Clone ID: TFbOSC900142j.C1.o3.np
ctgcttcatttattgtcaaaatataatccttaaaatgttgcttctctattttgtttttgtttgtagatggccggcagcatcacccgtcgtggactggacttgactggcttcgttttggagctgcggggcatgtgcattgtcttggggtatccacatggagtggactaccagggcaggccgctcccggagcaggagggcgacgaggcagagcccgtcgctgcttgggaggtcactgcagtgatcctcttcttctcacctgagaggacttcgctggcagtcaccgcgggtggagattccttctccgccgcttgccagaatgccgctctcctcgccatcggcactctgcaccagcgctacccggacgagttgcagcactcgccctaccgctaccaccctcgccgcggaggagcccgcgactacgccaccttccgggatgctagctcggaggatgacgctaccatcatgcacctggcgcgcatggtggaggcgtacgacgcggctcgcatcgacttccatcagatggtgcgccgtgggttggtcgagaacaacctgaagatcctggagctgcgtcaggagaatttgcagctgaagaaggacctagatgcagtggaggcgcagctgcatcagctcaagatcgcccagggagaggtcggtcgtcccaagcgccgccgcgtctgccgcagccagaagatcaccgctcgcaagagtacctccaggcccgagcttgttcgtcagtccctggcgtggacctgcttcgtggagacccctcgtgccgagcccgcgcccgtggttcctcaggagggggagacctccggcgttggtagcacgaaggatgcgctgctgctcaccttctgtcctggcccgtcgcagcgtcagctctctctgtttgctggttccgtgtggggttttcagatggtgatgaccaggagaagtgctaataccggtgatggcaaccaacccgaaggcatcaacctcaacaaccatggcagcccacctccacctcctcctccgcctccaccaccaccaccagacaccaacgccatcctcacccaaatcctcgcccagcaagccaacatgacggctgctttcctccaccacatccaaaatccaccacagcataatgctccacctccaccaccacccccgcaacactctaagctcgccgagttccttcgcattcgcccgcctaccttctccagctccaataaccccgtggatgccttggattggttgcatgcagtggggaagaagttagacactgtgcagtgcaacgatgaggagaaagtcatctttgccacccaccagctgcaggggcccgcatctctatggtgggaccacttccaggctacgcagcccgaggggcagcctatcacctgggcccgtttcaccgccgctttccggagaacccatgtgcctgccggagtcatggcccttaagaaaagggaattccgggagttgaagcaaggcaaccgctccgtgatggagtatttgcatgagtttaacaacctggcccggtacgccccggaggacgttcgggaagatgaggaaaagcaagagaagttcttggcgggaatggactctgagctgtccgtacgtctggtgtccggggactatccggatttccaacgtctagtggacaagagcatcctcttggaggccaagcacaaagaattggagtcgcacaagcgtcgcttggcgaatttccgcaatcaacagggggctaaccaaagggtccgctacaccaatccctatctagggggatcctcctcgcagcagcaacagcagcaacctcgctccgcgccccgacctcaatttgtggtgcgcgttccccagccgcagcaacctcagggccagcaagggccccgtgcaccccgtcctcctgcgccagctgtgcagcctggtcaaggccacagagacgtacaaggtcagcagcgtctgtgcttcaactgcttcgaacccgggcactttgcggaaaaatgcccgaagccacgacgccagcaaggccaagcgcctccccgccccaacaacggtggtaaggacgtcgctcggggtcatgtgaaccacgtgactgccgaggatgtgctgacaactccagacgtcatcgttggtacgctcctcatccattccatccctgctaccattttgttcgactctggagcttcccactcgtttatatctgtgacattcgtggggagaaatcagttgggtgtagaaaggcttaggaaccctatgctcatcaccacccctggaggggttatgacagcgaagtattatagccctgccattcccatagaaattcagggaattccgtttccctcggatctgattcttctagacaccaagaacttggatgtgatccttgggatgaattggttggctcaattccaaggagtagtggattgtgcaagacgcactgtcactctgtaccgagggccagaacaaccggttgttttctttgcacccccaacctctgtcagtagttcagaacttcatcagataggactgtcagaaatccccatcgtcagagagttcggagacgtgtttccggaagaactacccggtatgccgcccaagcgagagattgagttccggatagatcttgctccaggaaccactcctctgtacaagcgaccctaccgtatggcagcaaatgaactggccgaagttaagaaacagttggaagagttgaaaggaaaggggtatatacgtccgagcacttccccctggggtgctcccgtaatttttgtggagaagaaagacaagacaaagaggatgtgtgtcgactacagagctctcaatgaagttactatcaaaaacaagtaccctcttccccggatcgatgatctgttcgatcagcttaaaggtgccacggtattctccaaaattgatcttcgctccggatatcaccagttgcgcatccgtgaagaagatatcccgaagactgcattcaccatgcgatacgggctgtatgaattcacggtgatgtcgttcggtctgactaatgctcctgctttcttcatgaacttgatgaacaaagtgttcatggagtacttagataagtttgttgtggtcttcatcgacgacattctagtgtactcgcaatcagaggaagaccatcaacaacatctctgtctggtgttgggaaagttgcgggaacatcaattgtatgccaagcttagcaagtgtgagttctggttgtccgaagtcaaattcttagggcacatgatatctgctaaaggagtcgctgtggaccccgaaacagtgaccgccgtcaccgattggaagcaacccaagacagtcactcaaattcgcagtttcttaggtttggcaggatactaccggaggttcatcgagaacttctccaaaatcgctcgacctatgacacagttgttgaagaaagaagagaaatttgtgtggagcccgcaatgcgagaaggcgttcaaaacactcaaagaaaagctggtttcctcgccagtgttaatcttgccggatactcacaaagacttcatggtgtattgtgacgcttcgcgccaaggactggggtgcgtgctcatgcaggaaggtcatgtggtagcctatgcctcccgccagttacggcctcatgaaggcaactaccctacccatgatttggagttagccgcggtggttcatgctctaaaaatctggcggcattatctcattgggaatcgctgcgaaatatataccgatcataagagtttgaaatacatcttcacctagtcggatctgaatcttcggcagagaagatggttagagctcatcaaggattatgatgtgggaatccactatcatcccggtaaggccaatgtggtcgccgacgctctaagtcgaaaaagccattgcaacactcttaacgtccgtggcattccacccgaacttaatcaacagatggaagccctgaacctaagcatagttggtcgcggattcttggctgcgttggaagccaagcctaccttgctcgatcaaatccgcgaggctcagaagaatgatccggacatgcgtggactcctcaagaatatgaaacatggtaaagccgctggtttcacagaggatgaacacggcaccctatggaacggaaatcgggtatgcgttccagataacagagaacttaaacagctgatactttaggaagctcacgaaagtccttattccatccaccctggcagtacgaggatgtacttagacttgaaggagaaatactggtgggttagtatgaagcgggaaattgcagagttcgtggccctttgtgatgtgtgccagcgtgtcaaagcagagcatcaacgaccggccggacttctccaacctctccaaataccagaatggaaatgggatgaaattgggatggattttatcactggacttccaaaaacccaaggtggatatgattctatatgggtagttgtggaccgactaaccaaagtagctcgctttattcctgtaaagaccacatatggaggaaacaaactagctgaactctatttcgccaggatcgtaagtctgcgtggcgttcccaagaaaatcgtatctgatcggggaagtcagttcacctctcacttttggaagaaactccaagaagagttgggtacccgattaaatttcagcaccgcgtatcatccgcagacagatggtcaaaccgagcgtctaaaccagatcctcgaggatatgcttcacgcatgtgtcctagatttcgggaaaacctgggataagagtctcccctatgccgagttctcctacaataacagctaccaagccagcatacaaatggcaccctatgaagcgttgtatggacgcaaatgtcggacaccgctattgtgggaccaagttggggaaagccaagtgttcgggaccgatatcctgagagaagccgaagctacggtcagaaccattcgggaaaacctaaaggtggcacagtctcggcagaagagttatgcagacaaccgacgccatgacctggaattcgcagtggatgactttgtgtatctccgggtaacgccattgcgaggggtacacaggtttcagacaaaagggaagctcgcacctcgattcgtgggtcctttccgcatcactgctcgacgcggagaagtagcttaccaattggagctgcctgcttccttgggcaacgtgcatgatgtgttccatgtgtcgcaactcaagaaatgtcttcgagtgccgtccgagcaggctgactcagagcagattgaagttcgcgaagacttgacctacgtggagagaccagtgaaaatcctggacaccatggagcgcaggaccaggaatcgggtaatccgtttttgcaaggtccaatggagcaaccatgccgaggaagaagctacttgggagcgtgaagaagagctgaaggcagcccatcccgatctcttcgccagttcttccgaatctcggggtcgagattccgtt

SEQ ID NO: 14313 - DNA, 1629 bp, Oryza sativa
  Clone ID: TFbOSC102322j.C1.o2.fg
atggcgaccaaagcggcgctccgatcgttgtggtcggccttcgacaagcaagcgtcatccatcattgacaagctcgtgtggccttggctgatgccagcggacgataccgaggagggcgcgaagaggcgcgcggaggagattactgaggagctcgcgcagctggagaagaccaggatgacgacgtgggcgcgatcggtggtggagagcttcgacacggcgcctcctcctttccctccgccgctgagcgctactacgcctcatcctcctcctccgtcgcctgcgaccagcagcagcaggacggcgacggcgacggcgacggcgacgccgacctcaccgacaccgacacctcccccgagctctgtcactatgctgtgggcccggtctcgcccgacgaaggaggatgagggggagggcctccagcgacgcacggacgcggtggtcgtgctcgtgcggatgcagagaagggcccgcttcgcggcatggacgaatgcggcgctgcacaacttttggggtgtagaaaggctttctcccggttgggccaacgtctaccggttttgggccaacaagtggtatcagagctcaggtgccatgtctggagatggtgtgtacacgccgccaccgccgccaccgatccgtcgcagcagcggtggcggtggcagcagcagcggcaatggagatggtgtgtacacgccgccaccgatccgtcgcggcagcggtggcggtggcagcagcagcggcaacggcggggatggcagcctaggcggccatgagctcgtcgtgcagcaagtgaaggaggcgggggtgacgttacgctaccccatgctcggggagaacaactacggcgtttgggcggtgaaaatgaaaatttttatgcgtgcacaaggtgtgtgggctgccgtggagggcaacgcagccgatgagaagatggatcaaatggctctcgccgccattgtccaagctgtgcctgaggccatggtgatggccatatccgagaaggaaacggcgagggaggcgtgggacgccctcaagcagatgaacatgggtgaagagcgtgtcaagaaggcccgagtacaaactctcaagagagtgcttcatggtatgtacatgggtaatagtgagaaaattaatgattttgctttgaaggttaccacgatcgtgaacgagattcattctctcggcacgaaagtggaggagaccaccgtcgtggagaagctcttgcattccgttcccgacaagttccaatccctcataagcaccatcgagcagtggggggatgtgtcggagatgacggtgacggagacaattagacgtttgcgggcgttcgaggagtcctccaaggggcgacgtcgtgaaaacgcaggggaggagcagctgcttattgcaggggctgagcaacggctcacacgcactgagtgggaggccattgttgctaaagagaagaagagtgatgaggcctctggcaatggtgagaagaagttccgcggcaagttcaacaaatcgaagattgagtgccgcaggtgtggcaagttcggacacttcgctgacgagtgtgatgagccgcggaagatggccaaggcagtgacgcagcttgtcatcgcggacgcggatgatgagccaacgttgctgtga

SEQ ID NO: 14314 - DNA, 1923 bp, Oryza sativa
  Clone ID: TFbOSC23348j.C1.o2.gm
atgggcagtggcgggaatgatcgcgggctgttgattcaccgcgtggtcaaggaggcgggaggtccggcaaacaacccggtgctcatgaagacgaattacaacgtatggtcactgttgatgaagatcaagttgcaagctcgctgcttgtggggagcaatcgacccaggagaggttgagctccatgaagatcggatgacactcgatgccatctgcagcgtggtccccgcggagatgatctccacgctggcgaccaaggagacggcgaaggcggcgtgggactgcatcaagaccatgcgcgtcgtcaacgaccgcattcgcaaggcgagtgcacagaagctgcgctcggaatacgaggctctcgcgtttcgcgacggggagtcggtcgaggatttcgccatgcgcctcaacaccgtcgtgacgcagctgtccacattgggggatcccgagccagatgacaaagtcgtcgagaaatatctctgcgtcgcgcgtcccaggttctcccagctagttctctccattgaaaccctacttgacatctccactttgacgctggaggaagtcactggacgcctcaaggcggttgaggactccggccagtcgtcgtcctcgtcttcaccaggtgccggggccaagctctacctcactgaggaggagtggcttgaacgtcacaagaagaagcagcaggaggccaagaagaggaatggcggagggaacggccgtggcaagcgccgcggcggacaagggcacactagcggcggcggcggtggcgtcgggaacgcggacagcactggcgttggcccagctcgcaagaccgacaagtgccgcaactgtggcaaacttggccactgtgccaaggattgcaggagcaagcccaagcaggagcaggcccacgtggtccaggacgaggatgagcccacgctcatgctcatgacaggcagctgcattgatgaggtggaggagacgggcgcgcagtgcgcgacgccatcgccgctcgcgccgcagcctcgcccagacgtcatcgagctggttgagcaaaaggtgttcaccgcgctggacgacgccaccgaccacgacaacaagtgctggatcctcgacaccggcgcgtcgaaccacatgaccggctcgagggcggcgttctctgacatcgacaccaatgtcgctggcaatgtctggctcggggacagcttactcgtccgcatcggaggacgcgggacggtactgtttgcctgcaagaacagcgaacaccgcatgctgcacaacacatactaccttccgcgtctcgccgccaacatcataagtgtggggcagctggatgagacgggcttcaaggtggtggtcgaggatggcgtcatgcgcgtgtgggatgagcggcgtcgtctgctcgcttgcatagctcgcagcccgggccggctttacttgctcgacatcaaccttgcacggccggtctgcctgatggcgcgcgcgggggaggacgcgtggcgttggcatgctcgtttcggccacatcaacttcgctgcattgcgcaagatgggccgtgagtccctggtacgtggtttgcctgtcttgtcgcaggtcgaacgggtatgcgaggcgtgcctcgccggcaagcaccggcgtgcccccttcgcgcaagaggcactccacaacgccactgagctgctcgcgctgatccatggcgatctttgtggtccgatcacaccggcgacacccagcggcaaccgctacttcctcctgctcgtcgacgactacagccgctacatgtggctgacgctcctcgccaccaaagacggtgcaccggctgccatcaagcgcgttcaggcggcggccgaacgcaagagcggccgcaagctttgggcactccgcaccgatcgcgggggcgagttcaccgtcggccacttcaccgagtattgtgcggagctcggg

SEQ ID NO: 14315 - DNA, 1863 bp, Oryza sativa
  Clone ID: TFbOSC25126j.C1.o1.fg
atggcgaccaaagcggcgctccgatcgttgtggtcggccttcgacaagcaagcgtcatccatcattgacaagctcgtgtggccttggctgatgccagcggacgataccgaggagggcgcgaagaggcgcgcggaggagattactgaggagctcgcgcagctggagaagaccaggatgacgacgtgggcgcgatcggtggtggagagcttcgacacggcgcctcctccttcccctccgccgctgagcgctactacgcctcatcctcctcctccgtcgcctgcgaccagcagcagcaggacggcgacggcgacggcgacggcgacgccgacctcaccgacaccgacacctcccccgacctcggccactttgctgtggccccggcctcgcccgacgaaggaggaggagggggagggcctgcagcgacgcacggacgcggtgctcgtgaagaggctgaggagggcccgcttcgcggcgtggacgagtgcggcgctgcacaagttcgacttcgacgacgccgcccccacggtgcctcctccgccgccggccaccatgatacctcccccgacggtgacggctacgatcacgccgctgtggcctccgcctcccccgacgaagaaggaggagcatgagggcctccagcgacgcacggacgcggtggtcgtgctcgtgcggatgcagaggagggcccgcttcgcggcatggacgaatgcggcgctgcacaagttcgactttggggccgctccccccacggcgcctcctcctcggcagccgctgcctgttgggaatagtcccacattgaaatggtatcagagctcaggtgccatgtctggagatggtgtgtacacgccgccaccgccgccaccgatccgtcgcagcagcggtggcggtggcagcagcagcggcaatggagatggtgtgtacacgccgccaccgatccgtcgcggcagcggtggcggtggcagcagcagcggcaacggcggggatggcagcctaggcggccatgagctcgtcgtgcagcaagtgaaggaggcgggggtgacgttacgctaccccatgctcggggagaacaactacggcgtttgggcggtgaaaatgaaaatttttatgcgtgcacaaggtgtgtgggctgccgtggagggcaacgcagccgatgagaagatggatcaaatggctctcgccgccattgtccaagctgtgcctgaggccatggtgatggccatatccgagaaggaaacggcgagggaggcgtgggacgccctcaagcagatgaacatgggtgaagagcgtgtcaagaaggcccgagtacaaactctcaagagagtgcttcatggtatgtacatgggtaatagtgagaaaattaatgattttgctttgaaggttaccacgatcgtgaacgagattcattctctcggcacgaaagtggaggagaccaccgtcgtggagaagctcttgcattccgttcccgacaagttccaatccctcataagcaccatcgagcagtggggggatgtgtcggagatgacggtgacggagacaattagacgtttgcgggcgttcgaggagtcctccaaggggcgacgtcgtgaaaacgcaggggaggagcagctgcttattgcaggggctgagcaacggctcacacgcactgagtgggaggccattgttgctaaagagaagaagagtgatgaggcctctggcaatggtgagaagaagttccgcggcaagttcaacaaatcgaagattgagtgccgcaggtgtggcaagttcggacacttcgctgacgagtgtgatgagccgcggaagatggccaaggcagtgacgcagcttgtcatcgcggacgcggatgatgagccaacgttgctgtga

SEQ ID NO: 14316 - DNA, 1333 bp, Oryza sativa
  Clone ID: TFbOSC30021j.C1.o1.hg
atggctgctcttactgatgatgccaatggtgagggagcgagtcagcctcgcactggcccatattcttctggacgtgccgggggtagtcgccgtgctgccactgcagaacagcatgatgatgaaccatctcttgctcaactcctggctaatcagaaccgactttttgaaaggatggtagcgaactctgaaaacatgggggctgccatggcacagcaggccaatcaagcaccctccaagctagcagatgttcaacgaacacatccacctcatttctcctctgcggctgatccactcgcagcagatgattggcttcgtgatattgaaatcaagctgaacctttgccggtgtgatcctgtagagaaggctacctttgctgcttactacctgcaaggtgcagcagctgcttggtgggagacatacaagactctcattcctcctgacgagccaatcacttggactgttttccgtgagggattcaggtctgctcacatccctgctggtctcatggaaatcaaaaagaaagaatttcttaacttgaagcaaggaaacatgcccttcatggagttcatggaacgcttcaattatctgggtagatatgccgcttctgacttgaacactgaaacaaagaaggttgagctatgcagagatcgtcttgcacctgaactcaagcatgctcttgctgctcatgaaatcaccagcatgaagacactggttgcccttcgtgttgaatcaagtgaaaaggaagtggttgaagaccgtaagcgtaagtgggctgcaaagaaatttgctggcagcagcagttccactcggcctcgtcttgctccatctcctgcggttcgtcctatggcacctcagccacctcggcagatgtatgtgcctccacgtccgcaaactcagttagttcgtcaagttcctcgcgcagttcaagctgcgggagatgcatctcgtaatgccaatgtcacctgctacaattgcggcaagaaggggcattattctcctagctgtccttatccgaagactggaacatccggaccgtactcgcagggagcaccgcagcagcctcgtggtcctcctcaagttcagcctggacagcgtggagctcctgctgttcccaagccagctccaacttttggaaggggccggctcaaccatgtcactgcagaagaagcaaccgacgcacctggtgtcgtacttgggatgcctccagatcgtgacattgaatttgtgatagatttaatccctgggacagcacctatagccaaaaggccatatcgaatgacttctgaaaatttgatggaattaaagaagaaactcaatgagcaattggctaaag

SEQ ID NO: 14317 - DNA, 1695 bp, Oryza sativa
  Clone ID: TFbOSC400011j.C1.o4.fg
atggcgaccaaagcggcgctccgatcgttgtggtcggccttcgacaagcaagcgtcatccatcattgacaagctcgtgtggccttggctgatgccagcggacgataccgaggagggcgcgaagaggcgcgcggaggagattactgaggagctcgcgcagctggagaagaccaggatgacgacgtgggcgcgatcggtggtggagagcttcgacacggcgcctcctccttcccctccgccgctgagcgctactacgcctcatcctcctcctccgtcgcctgcgaccagcagcagcaggacggcgacggcgacggcgacggcgacgccgacctcaccgacaccgacacctcccccgacctcggccactttgctgtggccccggcctcgcccgacgaaggaggaggagggggagggcctgcagcgacgcacggacgcggtgctcgtgaagaggctgaggagggcccgcttcgcggcgtggacgagtgcggcgctgcacaagttcgacttcgacgacgccgcccccacggtgcctcctccgccgccggccaccatgatacctcccccgacggtgacggctacgatcacgccgctgtggcctccgcctcccccgacgaagaaggaggagcatgagggcctccagcgacgcacggacgcggtggtcgtgctcgtgcggatgcagaggagggcccgcttcgcggcatggacgaatgcggcgctgcacaagttcgactttggggccgctccccccacggcgcctcctcctccgcagccgctgcctgttgggaatagtcccacattgaaatggtatcagagctcaggtgccatgtctggagatggtgtgtacacgccgccaccgccgccaccgatccgtcgcagcagcggtggcggtggcagcagcagcggcaatggagatggtgtgtacacgccgccaccgatccgtcgcggcagcggtggcggtggcagcagcagcggcaacggcggggatggcagcctaggcggccatgagctcgtcgtgcagcaagtgaaggaggcgggggtgacgttacgctaccccatgctcggggagaacaactacggcgtttgggcggtgaaaatgaaaatttttatgcgtgcacaaggtgtgtgggctgccgtggagggcaacgcagccgatgagaagatggatcaaatggctctcgccgccattgtccaagctgtgcctgaggccatggttaccacgatcgtgaacgagattcattctctcggcacgaaagtggaggagaccaccgtcgtggagaagctcttgcattccgttcccgacaagttccaatccctcataagcaccatcgagcagtggggggatgtgtcggagatgacggtgacggagacaattagacgtttgcgggcgttcgaggagtcctccaaggggcgacgtcgtgaaaacgcaggggaggagcagctgcttattgcaggggctgagcaacggctcacacgcactgagtgggaggccattgttgctaaagagaagaagagtgatgaggcctctggcaatggtgagaagaagttccgcggcaagttcaacaaatcgaagattgagtgccgcaggtgtggcaagttcggacacttcgctgacgagtgtgatgagccgcggaagatggccaaggcagtgacgcagcttgtcatcgcggacgcggatgatgagccaacgttgctgtga

SEQ ID NO: 14318 - DNA, 3225 bp, Oryza sativa
  Clone ID: TFbOSC400258j.C1.o20.fg
atgggtgtgccggcgttctaccggtggctggcggagaagtacccgatggtggtggtggacgtggtggaggaggaggcggtggagatcgagggcgtcaaggtgcccgtcgacacctccaagcccaaccccaacggcctcgagttcgacaacctctacctcgacatgaacgggatcattcacccctgcttccaccccgaggataggccctctccgacaacattcgctgaggttttccagtgcatgtttgattatatcgataggctatttgtcatggttcgccctcggaagcttatgtatatggccattgatggtgttgctcctcgtgccaagatgaaccagcaacgctctagacgattcagagctgcaaaagatgctgctgatgcggccgcagaagaagagaggttgcgtgaagagtttgagagggaaggcagaaaacttccaccaaaacagcaatctcaaacatgtgattctaacgttattactccaggaacagagtttatggctgttttatcgattgctttgcagtactacatccatctcaggttgaattatgatcctggatggaaacaagttaaagttattctttctgatgccaatgttcctggtgaaggggaacataaaattatgtcctacattcgcggtcaacggaatctccctggatttaacccaaatactcgccattgtttgtatggcctggatgcagacctgatcatgttagctcttgcaacacacgaagtacatttctctatactgagagaggtagtttatacacctggacagcaggacaaatgcttcttgtgtggtcaggttggacatctagcagcaaactgtgaaggaaaggttaagagaaaagctggggagtttgatgaaaaaggtgaagctattgttccaaagaaaccttaccagttcttgaatatatggaccctccgggagtacttagaatatgagttcagaatgcagaatccacctttcccgattgactttgaacgcatcgttgatgatttcatcttcatgtgtttttttgttggcaatgattttcttccacatatgccaacattagagattcgtgagggagctattaacttgctaatggctgtatacaagaaggaatttccttccatgggtggctatctaactgatgcttgcacgccggatctgaataaagttgaacactttattcaagcagttggctcctacgaggataaaatatttcagaaaagagctcgtttgcatcagcgtcaagctgaaaggataaaacgagaaaaggcccaagcaaaacgaggggatgacctggatccccatgtcagggatgatcttattgtacctgttgcacgcttccaagggtctcgccttgcatctggacctgtgccttcaccatatgaacaaaatggatctgacaaaaacaatgggggaaaaaatagtcgtgctcggaaagctgcacgggtatcatcgtcaggttcaagcattgcggctgctattgttgaagctgaaaatgaccttgaagcacaggaacgcgaaaacaaggaagatttgaagacaatgcttaaagatgcacttcgtgagaaatctgatgtttttaattctgaaaatccagaggaggacaagataaaacttggagaaccaggatggagggaaaggtactatgaagagaagtttggagcaagaacacccgggcagattgaagaaatacgcagagatgtcgttctgaaatatactgaaggtttgtgttgggtaatgcactactattatgaaggtgtctgctcgtggcaatggttttacccttaccattatgctccttttgcttcggatttgagtggtctaggtcaactcaatataacttttgaacttgggtcaccattcaaaccgtttgatcaacttatgggagttttcccagctgctagctcccatgcactccctgtacagtatcggcaattgatgacagatgcaaattcaccaataattgatttttatccaactgattttgaagtagatatgaatgggaagaggtattcatggcaggggatagcaaaactgcccttcattgatgaagcccggttgctagctgaaattaaaaaagttgagcatactttgacgcctgaagaagcaaggagaaacagtatcatgttcaatatgctttttgtgaatggctcccatccactttcgccttatatctactccctcaacagcaaatttggacacctacctgacagagagcgaaatgaaattaaagaaaagattgatccttcttctagctgccttgttttgtgcagtggaggaatgaatggttacatctcactttgtagtggggatccgtgccctcctgtcttcaggtctcctgttgatgggttggaggatatcatggacaatcaagtgatatgtacaatctacaagcttccggattctcataagcacatcgctcgtccacctgttggtgtaatcatacccaagaagactgttgaagctactgacctgaaaccaccacctgtgctatggcatgaagacagtggtaggaggcctcatgataataacaacaggaggccttatgaaaacagcaacaggcaaaacccagctggagcaatatctggccgccaacttggggaagctgcccaccgacttgtggtgaacagcttgaatgctcggagtggcggacaatacaataccccatcgatgccatatcaaaccataatgaatggcatgccttatccaaatgggattccaccaaggatggagcagcctgctcctggctggcatgttcctggtgatctaccaaatggtcaggtaccaccagcttatgcatcatcatcaggtcattatcagaacgataggtctgggccttctcagtatggacgagataaccatggaaggtacccatatgcaagagacaaccaccatgattcaagaggaagggttccaccataccatcagagcggtggaaactcgtatcaatcacattctgctccatcagcaggtcctggacggtatgcgcaacccccaccatatgctggggggtatggtaggagctaccagcctgcaccgtatggaggtggtcagcagtggcagcagcagcagcaacaaccttatggctcctatgctgggtcagggccttatgggggtggggcacctcctgcaaggcctaattcacgaccacagcagtcgcagaaccgttacaataccttagataggaattctaacaggagacctccaccaggtcatgggcgacactaa

SEQ ID NO: 14319 - DNA, 3948 bp, Oryza sativa
  Clone ID: TFbOSC400562j.C1.o1.fg
atgcccttcatggagttcatggaacgcttcaattatctgggtagatatgccgcttctgacttgaacactgaaacaaagaaggttgagctatgcagagatcgtcttgcacctgaactcaagcatgctcttgctgctcatgaaatcaccagcatgaagacactggttgcccttcgtgttgaatcaagtgaaaaggaagtggttgaagaccgtaagcgtaagtgggctgcaaagaaatttgctggcagcagcagttccactcggcctcgtcttgctccatctcctgcggttcgtcctatggcacctcagccacctcggcagatgtatgtgcctccacgtccgcaaactcagttagttcgtcaagttcctcgcgcagttcaagctgcgggagatgcatctcgtaatgccaatgtcacctgctacaattgcggcaagaaggggcattattctcctagctgtccttatccgaagactggaacatccggaccgtactcgcagggagcaccgcagcagcctcgtggtcctcctcaagttcagcctggacagcgtggagctcctgctgttcccaagccagctccaacttttggaaggggccggctcaaccatgtcactgcagaagaagcaaccgacgcacctggtgtcgtacttggtacatttcttgtgcactccattcccttaacagttctttttgattccggtgcaactcattcattcatgtcaaccttgaaagcaaaacaacttgacttgaaaacagaatttcttagcgatgctatgcgcatccaatctcctggatccaccatggtcaccaaacttctatgcaaaggtgtagaacttataatagacggggtaaagtttaaagctaacctcatattattagacaccttgggcctagatgtcattcttgggatggattggttaactaaacatgagggaaccattgattgtgctcatagaactgtaactcttcgtagcaccgatggtcaatttgttaggtttacctttgaacaaacctccacttcaaatcaaccctctatacaatctctctctataccggagttaaaatcagtacccatcgtgaatgaatattccgatgtgtttcctgacgaattaccagggatgcctccagatcgtgacattgaatttgtgatagatttaatccctgggacagcacctatagccaaaaggccatatcgaatgacttctgaaaatttgatggaattaaagaagaaactcaatgagcaattggctaaaggtttcattcgtcctagttcatctccttggggctgtccagtgttgtttgtaccaaagaaagatggaaccatgcgaatgtgcgtggattatcgacctctgaatgaagtcaccatcaaaaataaatatcctcttcctaggatcgatgatttatttgatcagttaaccggagctcgtgtcttctcaaaaattgatcttagattgggatattttcagcttaaaatcagaccggaggacattcctaaaaccgcattcacaactcgctacggtttatttgaatacaccgtagtctcttttggattaaccaatgctcctgcttctttcatgaatatgatgaataaaatcttcatggaatatcttgataaatttgtggtggtattcattgatgatatactcatctactccaagagtgaagaggaacatgcgcaacatttacgtatggtactcgataaactccgtgagcatcaactttatgccaaattctcaaaatgtgaattttggttaaaagaagttgaatttcttggtcatgtactttctgaaggtggtattgctgtgaatccaagaaatgtacagaacgtacttaattggaagcaaccacaaaatgttcctgaaattagaagttttcttggactagctggttactaccgtcgtttcattgaaaatttctccaaaattgctagacccttgactcaacttcttaaaaaagaaaataaattcatatggtctgaggcatgtgaaacaagttttcatgaacttaaaagaaggctcacaacagccccagtgctagtgatgcctgatgttcttaaaccttttcatgtttactgcgatgcctcacatcatggtctcggttgtgtactgatgcaagaaggaaaagtagtggcttatgcttctcgtcagttacgaccacacgagatcaattatccaactcatgacttacagctagcagctgtggtgcatgctctaaagatttggcgccattatttggtcagtaatcggtgcgaaatctttaccgatcataagagtttgaaatatttctttacccaaccagatctgaacctaaggcaaagaagatggttagaactcattaaagattatgatctcggtattcattatcatcccggtaaagcaaatgtagtagctgatactttaagccggaagctacatcaccttgccgttattgagacaataaatcagccatcgttgtcctctgaatttcagaaattgaatttgggattggtagaggatggttatgttgctgcactagcattacaacctactctctattctcaaattaaagctgctcagtccattgatgaggaagtagctgaaattatgaaagaaatcaattcaaagccacaatctatatacactcttaattctgatggtatggttatgcttggcaaacgaatctttgttcccaataatcaacaccttcgagaaaccattcttgatgaagcacatcaaacacctttgtctatccatccgggttgcactaagatgtaccaggatattcgcactcaatattggtggcctagcctgaggcgtgacatagcagcatatgttgcaatttgcgacgtgtgccaacgtgtcaaagctgaacatcaacgacccgctgggctactccaacctttgcaagtacctgaatggaaatttgatgaagttggaatggattttattaccggtcttcctaaaacacccaatggacatgattctatatgggttattatggatcgactgactaaagtggctcacttcattccggtgcatgtgacttatggtggagccaagctagcagagttatatttgactcatattgtaaggcttcatggcgtaccaaaagtcatagtatccgatcgaggaacacaatttacatccagattttggaaaaatttacatgaacttctcggaaccaaattgttcctcagcaccgcctttcatccacaaacaggaggtcaagtggaaagaacaaaccaaatacttgaagacatgctccgagcttgtgtgcttgaacataacactaactgggagaaatgtctatcttttgctgaattctcctacaacaatagctttcaatcaagtatccaaatgtcaccatttgaagctctttatgggagaaaatgtaggactcctctttattggtccgaagtaggagaaagacaattctttggacctgctatcattaatgaagctgaaaagaatgtcactcttattcgggaccgattaaaagaagctcaaactcgtcaaaagagctactctgatcgtcgtcgacgagagctaagttttgatgttggtgaccatgtctatcttaaagtatcacccatgagaggtactcaacgattccaaattcatggcaagcttgctccacgatatattgggccataccaaataatatctaagcgtggacaagtagcctatcaattggaattgccatttcagttgtctaatatacatgatgtattccatgtttctcaacttaagaaatgtcttcgaactccgattgagcacacctcacttgaagacattaatctaaagccaaatctctcctatcaagaatacccaattcgtattctcgaagaaagtgaacggcgtacccgcaaaagctccatcaagatacttcgagtacaatggagcaatcatactgcggatgaagccacatgggaacgagaggaccgacttaaggccgaattccctagtttcttctag

SEQ ID NO: 14320 - DNA, 4485 bp, Oryza sativa
  Clone ID: TFbOSC411214j.C1.o3.fg
atgggttggaaactatgtcacgtcttccgcccgtataccgtggtgatggccggcagcgtcacccgtcgtggtttggacatgactggcttcgtcttggagctgcgcggcatgtgcgtggtcttggggtatccacacggagtggactaccaggccaggccgctcccggagcaggagggtgacgacgcggagccccgcgccggttgggaggtcactgcagtgatcctctccggctctcccgagcggacttcgctggcagtcaccgcgggtggagattccttccccgccgcttgccagaacgccgctctcctcgccatcggcacccttcaccagcgctacccggacgagttgcagcactcgccctaccgctaccaccctcgtcgcggaggagcccgcgaccacgccaccttccgagacgccagctcggaggatgacgctaccgtcgtgcatctggcacgcatggtggaggcgtacgacgcggctcgtattgacttccaccagatggtgcgtcgtggcatggtggagaacaacctgaagatcctggagctgcgtcaggagaacctgcagctcaagaaggacctcgacgcgttggaggcgcagctgcatcagctcaagatcgcccagggagaggacagccgtcccaagcgtcgccgcgtctgccgcagccagaagatcaccgcccgcaagagcacctccaggcccgagcttgttcgtcagtccctggcgtggacctgcttcgtcgagacccctcgtgccgagcctgcgcccgtggttccccaggagggggaagcctccggcgttggtagctcggaggttttattcgtcagctcttcttctctgtttgctggttccgtgtggggttttcagatggtgacgaccaggagaaatgttaacaccggtgaaggcaaccaacccgagggcagcaatcccaactcccaaggcaacccacctccaccaccaccgccagacaccaacgccattctcacccaaatcctcgcccagcaagccaacatgatgaatgctttcctccaccacctccaaaatccaccacaacagaatgctccaccaccacctccccaacactccaaactcgccgagttcctccgcatccgtccacccaccttctctagctccaacaatcccgtggatgcgttggactggttgcatgccgtggggaagaagctagacacggtgcagtgcagtgatgaggagaaagtcatcttcgccgcccatcagctgcaggggcccgcatctctatggtgggaccatttccaggccacgcagcccgaggggcaaccgattacttggactcgcttcaccgccgctttccggagaacccatgtgcccgctggagtcgtggctctcaagaagagggaattccgagagttgaagcaaggcaaccgctccgtgatggagtatttgcacgagttcaacaatctggcccgttacgctccggaggatgtgcgggaagatgaggagaagcaagagaagttcttggcaggaatggaccccgagctgtccgtccgtctagtctctggggactatcctgattttcaacgactggtggacaagagcatccgcttggaagccaagcacaaggagctggaatcgcacaagcgccgtttggcgaatttccgcaatcaacagggtgctaaccagagggtccgctacaccaatccctacccagggggatcctcctcgcagcagcagcagcagcagcagcaacctcgcccagcgccccgacctcaattcgtgctgtgcttcaactgcttcgagcccggacactttgcggataaatgcccgaagccaaggcgtcagcaaggccaagcgcctccccgctccaacaacggcgggaaggatgtcattcggggccgtgtgaatcacgtgacggccgaggacgtgctgacaactccagacgtcatcgttggtacgttcctcgttcattccatccctgctaccattttgttcgactctggagcttcccactcgtttatatctgtgccattcgtggggaaaagtcagttgggggtagaaaggcttagaaaccctctgctcatcaccacccctggaggggttatgatagcaaagtattatagccctgccgtccctatagaaattcaggggattccttttccctcggatctgattctgctagacaccaagaatttggatgtgattcttgggatgaattggttggcccaattccaaggagtagtggattgcgtgagacgcactgtcactctgtaccgagggccagaacaaccggttgttttctttgcacctccaacctctgtcagaagttcagaactgcatcagataggtctgtcagaaatccccatcgtcagagagttcggagacgtgtttccggaagaactacctggtatgccgcccaagcgagagattgagttccggatagatcttgctccaggaaccactcctctgtacaagcgaccctaccgtatggcagcaaatgaactggccgaagtaaagaaacagttggaagagttgaaagaaaaggggtacatacgtccgagtacttccccgtggggtgctcctgtgatttttgtggagaagaaagacaaaacgaagaggatgtgcgttgactacagagctctcaatgaagtcaccatcaaaaacaagtaccctcttccccggatcgatgatctgttcgatcagcttaaaggtgccactgtattctccaagattgatcttcgttccggatatcaccaattacgtattcgtgaagaagatattccgaagaccgcattcactacgcgatatggactgtatgaattcacggtgatgtcgttcggcttaaccaatgctcctgccttcttcatgaacttgatgaacaaagtgttcatggaatacttggataagttcgttgtggttttcatcgatgacattctgatatactcacaatcagaggaagaccatcagcaccatctccgtctggtattgggaaagttgcgggaacatcaattgtatgccaagcttagcaagtgtgagttctggttgtccgaagtcaaattcttggggcacgtgatatctgctaaaggagttgctgtggatcccgaaacagtgaccgccgtcaccgattggaagcaacccaagacagtcactcagattcgcagtttcttaggtttggcaggatactaccggagattcatcgagaacttctccaaaatcgctcgacccatgacacagttgttgaagaaagaagagaagtttgtgtggagcccgcaatgcgagaaggcgttccaaactctcaaagaaaagctggtttcctcgccagtgttaatcttgccggatactcgcaaggatttcatggtgtactgtgatgcttcgcgccaaggattggggtgcgtgctcatgcaggacggtcatgtggtagcctatgcttcacgtcagctacgacctcatgaaggcaactaccctacgcatgacttggagttagcagcggtggttcatgctttaaaaatctggcggcactatctcattgggaaccgctgtgaaatatatactgatcataagagtttgaaatacatcttcactcagtcagatctgaaccttcggcaaaggagatggttagaactcatcaaggattatgatgtgggaattcactatcaccctggtaaggctaacgtggttgccgacgctctaagtcggaagagccattgcaatactctcaacgtccgaggcattccacccgagcttaatcaacagatggaagccctgaacctaagcatagttggtcgtggatttttggccgcgatggaagccaagcccaccttgctcgatcaaatccgcgaggctcagaagaatgatccggacatgcatggactcctcaagaatatgaaacagggtaaagccgcaggtttcacagaggatgaacacggaaccttatggaacggaaagcgggtatgcgttccggatagcagagaacttaaacagctgatacttcaggaagctcacgaaagtccttattccattcacccgggcagtaccaagatgtacttagacttgaaggagaaatactggtgggtcagcatgaagcgggaaattgcagagtttgtggctctatgtgatgtgtgccagcgtgtcaaggcagaacaccaacgaccggccggacttctccaacctctccaagtaccagaatggaaatgggatgaaattgggatggatttcatcaccggacttccaaaaacccaaggaggatatgattctatatgggtagttgtggatcgattaaccaaggtagctcgattcattcctgtgaagaccacctatggagggaacaaactagcggagctctacttcgctaggatcgtgagtctccatggcgttcccaagaaaatcgtatctgataggggaagccaattcacctctcacttttggaagaagctccaagaagagctgggtactcgattgaatttcagcaccacatatcacccgcagacagatggacagaccgagcgtctgaattag

SEQ ID NO: 14321 - DNA, 4194 bp, Oryza sativa
  Clone ID: TFbOSC900174j.C1.o17.fg
atgggcagtggcgggaatgatcgcgggctgttgattcaccgcgtggtcaaggaggcgggaggtccggcaaacaacccggtgctcatgaagacgaattacaacgtatggtcactgttgatgaagatcaagttgcaagctcgctgcttgtggggagcaatcgacccaggagaggttgagctccatgaagatcggatgacactcgatgccatctgcagcgtggtccccgcggagatgatctccacgctggcgaccaaggagacggcgaaggcggcgtgggactgcatcaagaccatgcgcgtcgtcaacgaccgcattcgcaaggcgagtgcacagaagctgcgctcggaatacgaggctctcgcgtttcgcgacggggagtcggtcgaggatttcgccatgcgcctcaacaccgtcgtgacgcagctgtccacattgggggatcccgagccagatgacaaagtcgtcgagaaatatctctgcgtcgcgcgtcccaggttctcccagctagttctctccattgaaaccctacttgacatctccactttgacgctggaggaagtcactggacgcctcaaggcggttgaggactccggccagtcgtcgtcctcgtcttcaccaggtgccggggccaagctctacctcactgaggaggagtggcttgaacgtcacaagaagaagcagcaggaggccaagaagaggaatggcggagggaacggccgtggcaagcgccgcggcggacaagggcacactagcggcggcggcggtggcgtcgggaacgcggacagcactggcgttggcccagctcgcaagaccgacaagtgccgcaactgtggcaaacttggccactgtgccaaggattgcaggagcaagcccaagcaggagcaggcccacgtggtccaggacgaggatgagcccacgctcatgctcatgacaggcagctgcattgatgaggtggaggagacgggcgcgcagtgcgcgacgccatcgccgctcgcgccgcagcctcgcccagacgtcatcgagctggttgagcaaaaggtgttcaccgcgctggacgacgccaccgaccacgacaacaagtgctggatcctcgacaccggcgcgtcgaaccacatgaccggctcgagggcggcgttctctgacatcgacaccaatgtcgctggcaatgtctggctcggggacagcttactcgtccgcatcggaggacgcgggacggtactgtttgcctgcaagaacagcgaacaccgcatgctgcacaacacatactaccttccgcgtctcgccgccaacatcataagtgtggggcagctggatgagacgggcttcaaggtggtggtcgaggatggcgtcatgcgcgtgtgggatgagcggcgtcgtctgctcgcttgcatagctcgcagcccgggccggctttacttgctcgacatcaaccttgcacggccggtctgcctgatggcgcgcgcgggggaggacgcgtggcgttggcatgctcgtttcggccacatcaacttcgctgcattgcgcaagatgggccgtgagtccctggtacgtggtttgcctgtcttgtcgcaggtcgaacgggtatgcgaggcgtgcctcgccggcaagcaccggcgtgcccccttcgcgcaagaggcactccacaacgccactgagctgctcgcgctgatccatggcgatctttgtggtccgatcacaccggcgacacccagcggcaaccgctacttcctcctgctcgtcgacgactacagccgctacatgtggctgacgctcctcgccaccaaagacggtgcaccggctgccatcaagcgcgttcaggcggcggccgaacgcaagagcggccgcaagctttgggcactccgcaccgatcgcgggggcgagttcaccgtcggccacttcaccgagtattgtgcggagctcggggtgcaacgcgagctgacggctccctactcgccgcaacaaaacggcgtcgtcgaacgccggaaccagtccgttgtgggcacggcgcgaagcatgcttaaggccaaaggactcctaggagctcgtccaagagcattggtggcaagaccccatacgagctttggaatggagtcccactggccgtgcaccacctgcgcgttccggtgtgtggcacatgtgaaggtcacggcgccgaacatgaagaagctggacgaccgcagccggccgatgattttcgtcggctatgagcctggctccaaggcgtaccgtgtctacgacccggcgacgcggcgcgtccacgtctcccgagacgtggtgttcgacaaggaggcgcagtggaattgggatggcgaggcggccgccaacgtcgactccggcttcaccatcgagtacaccacggtgtaccacctagcgacggcggccccgacgcaaatcggcacggagcacgggggagctccggcctcgccgcgctcgcctgcatcaggctcgactccgccaactccgcctctggccgaagagccgccggtggagttcgtctctcctccgcctgacgtggaggatgatctcgacgcggaccacgatgacgcgccacttcgtttccatcgcattgacgacgtgcttgggcccgcgacgccgccgggacaggccgttcgcgagctgagcgaggaactgttcgcggtaacagcggaggagccggcgtcgttcgctgaagcagagcagcacagctactggcgacaatcgatgatcaaggagatgcgctccattgaagcaaacaagacgtggcggctcgttgatccgccggctcgccaacatccgatcgggctcaagtgggtctataaggccaagaaagacgccgccggcaacatcaccaagtacaaagcatgcctggtcgcgaaggggtacgtgcagcggcagggcatcgacttcgacgaggtgttcgcaccggtggcgcggctcaagtccgtccgcttgctgctggcgcatgcggcgtgtgagggcagggccgtgcatcacatggacgtcaaatcggcgttcttgaacgagcttctggaggaggtctatgtcgcgcagccgccgggattcgtcgtcgacgggcaagagcacaaggtgctccaccttgacaaggcgctctatgggctgcgtcaggcacagcgcgcttggtacgccaagctcgacgcgtcgctgctaatgctcggttttcaccggagcgactcggaacacgctgtgtacatgcgtggcatgggtgtgcatcggctggtggtcggggtgtacatcaacgacctcatcatcacgggcggccactccggcgagctcatgcagttcaaggaggagatgaagggcacttttcagatgagcgatctcgggctgttgaaatactatctcggcttggaggtgaaccagtctgaggacgggatcacggtgtgccagagtgcctacgctcagaagattcttgaggtggctggcatggccgggagcaatccaagcctgactcccatggagacgcgcctgaaattgagtaagtcaagtactgctcctgctgttgatgccactgattatcggcgaattgtgggctctttgcgctatctggtgaatttgagaccagacttggcgtactatgtgggctatgtcagcagattcatggagaaacccaccgtcgaacacctggcggccgtgaagcgtgtgctgcgatacatcgctagcactatcggctacggctgccactacatgaggaagaaggaggctgcaagtctcgtcggcttcagtgacagtgatctcgccggcgacctcgacactcgcaagagcacctccggcgttttcttcttcctcggcgacaacccaatcacctggcagtcgcagaaacagaaggttgtggcattgtcgtcatgcgaagctgagtacatcgcagcgacaacggtggcctgccaaggcgtgtggctggcgcgtctccttgctgagctccggggagaggaggccgacgccgtcacgttgaagattgacaaccaatccgcaatcatgctcagtaagaaccctatcttccatgatcgcagcaaacatatagacacaagataccactacatcagggaatgcatcgaggagggcagggtgaaggccgagttcatcggcactgacgggcagttggcggacatcctgacgaaggcactcgggcgcgacagattcatcgaacttcgttctcggattggcctcatcgaaatcaaaactccacgcaaggtttag

SEQ ID NO: 14322 - DNA, 3922 bp, Oryza sativa
  Clone ID: TFbOSC9356j.C1.o1.np
atggctggttttgccaatgcactgaggccggataaattcaccggtgtgcattttaagagatggcagatcagggtcactctatggctgacagctatgaaatgcttctgggtgagtactggcaaacctgaaggagttcttactgcagaatagcagaagcaattcgaggaagccactactctctttgtgggatgcattcttagcgttcttggcgatcgtctggtcgaggtgtatatgcatatgaccgacgctaaggagttgtgggatgcactgaatactaaattcggtgctactgatgctagcaatgatctgtatatcatggagcagtttcatgactacaagatggctgataaccgttctatagtcgaacaggctcatgagatacaaaccatggctaaggaacttgaactccttaagtgtgtcttacccgacaaatttgtggccgggtgcattattgcgaaactaagtccatcttggagaagtttcggtactgcactcaaacacaagagacaggaatactccgttgaggggttgatagcgtctcttgatgttgaggagaaagctcaggaaaaagatgccgcgtctaagggcgatggtgggcagtccagtgccaatgttgtgcacaaggcccagaacaagagcaaggggaaatacaaagctcagcagaccaccaacttcaagaagcagaagaagaacaacaacaatcctaatcaggatgaatggacttgctttgtgtgtggccaacttggtcatctggctagtaagtgtccacagcgcaaggggatgaagacacctgcagggcagacatctaagtctgctaatgtgaccattggcaacactagagatggaagcgggtgtggtaatttacctactgttttttcagttaatcagtctactaattggtgggttgatactagggccaatgtacatgtttgtgctgacatctcattgttttcttcttatcaggtcgcacggggttccaccgtcctaatggggaatgggtcacatgcttctgttcatggtgttggcacggtagatctgaagtttacttcgggaaagatcgtgcagctgaagaacgtgcagcatgtctcttctatcgacagaaatcttgttagtggctcccgtctgactagagacggatttaagttgttttttgagtctaataaagtagtcgtgtctaaacatggatattttattggtaaaggttatgagtgcggaggcctgttccgcttttcctttctgatttctgcaataagtctgtgaaccatatttgtggcagtgtggatgatgaggctaatgtttagcactcacgtttatgtcatattaattttggcttgatgtctcggctttccagcatgtgtttaattcctaagttttccattgtcaaaggttctaagtgccatagttgtgtgcaatcgaagtaacctcgcaagcctcacaaggctgccgaggaaagaaacttggcaccactagaactcctacattcagatctttgtgaaatgaatggggtgttgacaaagggtggaaaacgatatttcatgactttgattgatgatgctactagattttgctatgtgtacttgttgaaaacgaaagacgacgctctagactattttaaaatttataaggcagaagttgaaaatcaacttgacagaaagataaaaagacttaggtctgatcgtggtggagagtttttctcaaacgagtttgacttattctgtgaggaacatggcatcatacatgagaggatgcctccctattctcccgagtctaatgggattgctgaaagaaagaaccgcacactgactgacttggtgaatgccatgttggacactgcgggactacctaaggcatggtggggggaggcattgttgaccttgaatcatgtgttaaacagagttcctaacagaaataaggacaaaacaccatatgagatatggattgggagaaaaccatcactttcttacttgcgcacatggggtgcttggcgaaagtcaatgtaccaataacgaagaagcgcaaacttggacctaagactatggactgtgtcattctgggatatgcttatcacagcattgcctatagatttttaatagttaaatctgaggaacctgacatgcatgttggtacaattatggagtctcgtgatgctaccttctttgaaagctttttcccaatgaaggatacacatagtagttcgagccaatcatctgaaataattcccagttcaatcacaccaccagaacaaactgaacatacacatgaacatgtcactgaggaggatgacagtgcagctccacgaaggagtaagagacaaaggacggctaagtcttttggtaaggattttactttgtacctcgtggatgacactcctaagtcaatttcagaagcatatgcatctcctgatgctgactactggaaggagactgtccgtagtgaaatggattccattatcgctaacgggacttgggaggtgacagagcgaccctatgggtgtaaacctatgggatgcaagtgggtgttcaaaaagaagcttaggcctgacggtactattgaaaagtacaaggctcggcttattgctaagggctatactcagaaagaaggcggagatttctttgacacttactcacctgttgctagattgaccacaattcgtgtgctactttccctagcagcctcacatggtcttctcgttcatcaaatggacgttaagacaacttttctgaatggagagctggatgaggagatctatatggatcagcctgatgggtttgtagttgaaggtcaagaaggcaaggtgtgcaaattgttgaagtctttgtatggtctgaaacaagcttctaagcaatggcatgagaaatttgacaaaacattgacatctgcaggcttcgcagtcaatgaggcagataaatgtgtgtactatcgccatggtgggggtgagggagttattttatgcttgtatgttgatgacatactgatatttgagacaaatcttgaggtgataaatgaggttaaatcattcttgtctcaaaattttgatatgaaggatttgggagtagctgatattatcttaaacattaagctaattagaggtgagaatgggattacactcttgcagtcccattatgtggagaagatcttgaatcgctttggctatattgatagtaagccttctccaacacctgatgatcctagcttgttgcttcgcaagaacaagagaattgctaggaatcaactggaatactcccaaatcattatctcgttgatgtacctggctagtgcaactaggcctgatatctcctttgctgtgagcaagttgaaccgatttacctctaatccgggagatgatcactggcgtgtgcttgagcgagtaatgcgctatctgaaaggtactgtggaattggggcttcactatactgggtatcctgcggtactggagggttatagtgattctaactggatctctgatgtggatgagatcaaagccactagtggatatgtcttcacactgggtggcggtgctgtttaatggaggtcttgcaaacagaccattttgacgaggtcaaccatggaagcagagctgatggcactggatactgctactgttgaggcagaatggctgcatgatctattaatggatctgcctattgttgaaaaatcgacatgtgaaaagacgattgaagtctgtcaggaaattaagaaactctagagttataacgttggattacatccaaacagctagaaacctggcagatcctttcacgaagggactatcacgaaatgtgatagacaatgcatcgaaggagatgggtttgagacccatagtattcttcaaagaactcacctttgtgagcttgattgttggtcgcagtctatggagattttgggtgaatcttctaggaagcttactatagacctaggagta

SEQ ID NO: 14323 - DNA, 231 bp, Oryza sativa
  Clone ID: TFbOSC9356j.C1.o2.gm
atgaccgtccattgcgtctacgaaggcacgcaacacgcgaacgaagaggaagacgagccgacgcggacgaacagggagcagtcgcgcaaagcacttcccaaaaaccttattgccaccttctcccggtgcaggagtcgaaggcagagattccggagacctgctctcccgatcgcagggtcgcttgatcagggcgcccgtacgatctccactgcgcgtaaccttaccggataa

SEQ ID NO: 14324 - DNA, 2256 bp, Oryza sativa
  Clone ID: TFbOSC401845j.C1.o5.gm
atggccaaccaacccgctagttccgatgaagagaagcatcaaggcaacgcaattccccaccaagattacagtttcagcctaactccagtgccaggacagaggaatcaaaatgagaaaagaaaatgccgagtccggaaagatatctgttgcttcaattgtcaagaaatgggtcatttcgctgacaagtgcccaaaaccgagaaacatagttgccagcacgtcagtccacgcaactccccgcaatcagaagcttgctcctcaacgaattgtcatccatgcatcccgaagcagtcctatagcccgcgttgcaatagctccaactccattgagtgcactaccacaaggtgtcaatgctcaatttcagccccagccaccagttgacaagatagagaccatgaagaaggacattactccagaaattgtccacgaccaaagcgtaacccgcgccatcaatccggacattatgcacgaagaagacaggaccacaatatcaggcacgcccaaggacctcattgccccagaagcatcctcaacacccggagtgaagagtacctggttgagaaaggtcgaaagtgccggccaccctccagcccgcgtcggcacgccgcccggccgtgccgtcgcctccccttccccggcctgccctcggtttcgccggaatgccgtcgcccgcgccggtctcaccctccgcctcgccggagttccttcggccaccccttcggccgtgcccgtgcgccgcggcatgttccacgctgtcctcgcatccgtgcagctactgccggctgcccttgtcgcctcctcgccggccccggtcgtcgtcgtcgtccacctcctcctctcgtcgttcccggtcgtcatggcgttcgtccctccgtcaagccgttcgcgttcgccgcccgtggttcgtcaagtgagctgctgcagccccatcgtcgtcttcatccttagctccacgtcgtcaagcctcgtgccagccgcgtctcgcattcgtccaaggatcgccgccgaagtcgtcccctcgccgttcgtctccgttgttcccggccgtctccgccgcgcccgttcgtcgttgtcgttcccacgcctcgtcgcgtggtgcaggaggagacagcaaggctatggcaaattacttgccgagattcgtgacgacttcatctccaattttcaaggtaccttcgaacgtcccggcacctacttcgacctctacaatgtgatccagaagcccagtgaataccttcaggattatatccgacgtttttctgagcaacgcaacaagatctctgacatcaccgacgatgtcatcatagccgctttcactaagggtgtccatcatgaactgttagtcggcaaattcggacgcaagcctcccaggacggtcaagcagatgtttgaaaacaccaacgagtatgccaaagccgatgatgccgtcaccgcgtccgagctatcgggcagcaattggaagccaaagaaagatgcgccagcagtcggggggagtggaagtaccaaccataaggattgcaagcgtaagcctgaagaccttgtggcaagtacaacaccttcttcccagcagcggtcacatatcaatactttcgacaagatcatgaatgctcaatgctcgcatcacccgaattcaaaccatgcagccaaagattgttttatctatcagcagttcgcagagcaatatgccaagaaaggaaggaagccgacagacggggagcaaagcacttcaaaaaagatggatgatgaagacgacggtccgactggctttcaagactctcgcaaagaactcaaccatattttcggtggaccccaagcttacgaatcaaaacggaagcaaaagctgactgacagggagatcaacgccgtccagcccaacacgcctcaataccttcggtggtcagagacagcaattaagttcgaccgctcagatcatcctgaccgagtggtccacctggggcggtaccccctggtactggacccagtggttcgcaatgtcaagctccgacgatccctcattgatggtggcagtgcactcaatatcctttttgccaaaacactggatgatatgcacatccctcatactgagctgaagctgagtagtgcgccctttcacggagtcatcccatggttgtcttctactccactcggccagatcactttacccgtcaccttcggtacctgggagaacttctgcacagagaatatttgcttccaggttgctgatttcgagatggcatatcacactacacctacatga

SEQ ID NO: 14325 - DNA, 5376 bp, Oryza sativa
  Clone ID: TFbOSC900110j.C1.o22.np
cgcgccgctcctccccggtccgtggacccgatccgccgtggaccgccctccccgagccgctgaccggtgagcttcctcaccgtgttcgcctggaggtccacggctacgtgggtacctgcctagctaacatggtggtggaggcatctggaggcccagcagatcacgcctgtcaggaggcagcatacctgatgatggctagactacgggagcgccacaactacatattccacgacacggtgtaccggtttcaccctcggcgagccagcagtgatgatgtcagtactttccgtccgacagccggcgagaacgacaccacctttggtcacatgtgtgctgtgatgaggggattggataggatgcactcggacctggacaaggcgaccaaggccttgaatgatgggaagctcatgaggatcgtcgctctgaaggacgagatagcgcgcctgaagagggagaacgctcagttaaagggtcttcccgcgccaggaggagtccggatccgcaccacgccccgcaagacgatgactgcacccgtgcgcatccagcttgcgcccaggaacccacctccatcagcagctcccgcagcacctccagttccgcccgcagttcctgcagctccagctccagctcccgcgtccgctctctccttcgctccagcatcagccgccaggggcccagccagaggcaacggaggttggttgtctgctactcccagtggcagccacgatctcagcagcagcagctccagtggctcagagtcgggcagcggcgagacttatctgccagggtccggaagtcgctcagagggacctgatggtctacaccaggaatggtagccgcgcaacaggcgagggcagcaacggcgaagagcgcactgagggtgtgcatcccaacagcaactccggcaatggtccgccaccacttcccgagaatccgacgctagcccaagtgatggcacatcagacacagatgatggcagccatgatgcagcagatgcagcagcagcaccagcagatgcaccagaggatgctgcagcacgccgaacagcagcaccagcagtttggtccccctccccctcagtccaagttgccagagtttctacgtgtcaggccacccaccttctccagcaccaccaaccctatggaggcgaatgactggctccatgccatagagaagaagctgaatctcctgcagtgcaatgatcaggagaaggttgctttcgccacacaccagcttcaaggtcctgcgtcagcttggtgggacaatcacatggccacccgcccaccaggtactgaagtcacttgggcagagttctgccgtagtttcaggaaggcacaggtgccagatggggtcgtggcacaaaagaagagggaatttcgggcactccatcagggcaacaggactgtgatggagtacctccatgagttcaatcgcctcgcgcgatatgcaccagaggatgtccgtaccgacgccgagaagcaggaaaagttcatggcaggtctggatgacgagctaaccaaccagttgatatctggagattacgccgatttcgagaggctggttgacaaggcaatccgtcaggaggatcaacgcaacaagatggacaggaagaggaaggccgcacagttcagggcacctcagggaagtcaccaaaggccgcgcttcgctcccgggcaacagggtggacctaccaccatgatcgtccgccagtaccgcccgttcaaccctagcaactttccccatggcgccggtggcagtcagacccaccatagaggtcagtccaaccgcggtgcagctccacgcccaccaatggcaccggcacagtcaggcccgcccgcgcaagccaagaaggagactggagcaaaaccagggtcctgcttcaactgtggcgagcttggccacttcgctgacaaatgctcgaagcctaggcgtgccgggccaaggtttatccgggctcgtgtcaaccacgcatctgcggaggaggcacaagcagcaccagaggtcgtactgggtacgttccctgttaactcaatccctgcaacagtactttttgattctggtgcaacgcattctttcatttcaaagaaatttgttgggatgcatgggttaataagagaggaacttagcacaccaatgcgggttcataccccaaggaatagctccacttcggttcaattcagcccttctataacaatagaaattcaaagatcaccatttctagccaacctcattcttctcgaatccaaagacctagatgtcattcttgggatggattggctgaccaagtttaagggggtcatcgattgtgcgaatcgcacagtcaccttgaccaacgagaagggagaaaccgtggtgtacaaatcactagactcatcaaagcgaggggtctttttgaatcagattgagacggaaatcccagtggacaccgtggagaagaacttgaggaaatgggaagatatacccatagtctgcgagtatccggaagtgttccccgaagacctcactaccatgccacccaagagagagattgaattccggattgacttggcaccgggaaccgctccaatttacaagagaccgtacagaatggcggccaacgaattagccgaggtcaagaagcaggttgatgagcagctacagaaagggtacattcgaccaagtacttcaccttggggtgctccggtcatttttgtggagaaaaaggataagacgaagaggatgtgcgttgattatcgcgcactcaacgaggtcacaatcaagaacaaatatcctttgccgcgaatcgatgatttgtttgatcaactgaaaggagctaaagtgttttctaagatagacctgcgatcaggctaccaccagttgagaattcgggaagaggatattccgaagacggccttcaccactcggtacgggctatatgagtgcacggttatgtcgttcggacttaccaacgcacccgcattcttcatgaatctgatgaacaaagtgttcatggaatttttggacaagtttgttgtggtgttcatcgatgacattcttatctattcaaagtccgaagaagaacatgaacaacatctccgtctagtactcgagaagttgaaggagcaccagctatacgccaagttcagcaagtgtgacttctggtcgacggaagtcaaatttctgggccatgtcattacagctcagggtgtggcagttgatccatcgaacgtggagtcggttaccaaatagaccccgccgaagaccgtgtcgcagattcgaagttttcttggacttgcaggttattaccaccaattcatcgaaaacttctccagaatcgctcgacccatgactcagttacttaagaaagatgagaagttcaaatggacagctgagtgcgataagagttttgaggagctcaaaaagaaattagtatccgcaccagttttgattctgcctgaccagatgaaagacttccaagtctattgcgatgcatcccgtcacggacttggatgtgtcctaatgcaagagggcagagtggttgcgtatgcctcgcgacagttacgtccacacgaagggaattatccaactcatgacctggaattggcagcagtggttcatgctttgaagatctggaggcactatctgattggcaaccgctgcgaagtatatacggaccataagagtctgaaatacatcttcacccaaccggacctaaacctccgacaatgaagatggttggaactaatcaaagactatgacatgggtattcactaccacccgggtaaagccaatgtggtggcagacgctttaagccggaaaagttactgcactgccctgtgcatcgagggcatgtgtgaggaattgcggcaggagtttgagcatctcaacgtgggaattgttgaacacgggtttgtggccgctctggaggcacggcctacgctcgtggatcaagtcagagcagctcaagtaaacgattctgaaatagcagagttgaaaaagaacatgagagtcggaaaagcccgggatttccacgaagatgagcatggcacaatctggttgggagaaagattgtgtgtacctgacgacaaggaactgaaggatctgatactcaccgaggctcatcagacccagtactccattcatccaggcagcactaaaatgtatcaagacctcaaagaaaagttttggtgggtcagcatgaggagagaaatagctgaattcgtcgcactctgcgatgtttgccagcgagtgaaggcagagcaccaaagaccagcaggtttactccaacctcttcaaatcccggaatggaaatgggaagagattggaatggactttataacaggactgccccggacatcatcgggtcacgattcaatctaggtagtcgtggatcgactcactaaggtttctcacttcataccagtacataccacatatacgggcaaaaggttggcggagctttacctttcgagaatcatgtgcctacatggagtacccaaaaagattgtatctgaccaagggagtcagttcacctcaaaattctggcagaagctgcaggaagaattggggacccgtttaaatttcagcacggcctatcacccgcaaactgatggtcagaccgagcgagtcaatcaaatcttggaagatatgttgagagcttgcgctcttgattttggtggagcttgggacaaaagcttaccatatgcggaattctcgtacaacaacagctaccaggccagtctacagatggcaccgtttgaagctttatacggccggaagtgccgcacacctctcttctgggatcagacaggcgagcgtcaattgttcgggacagaggtattagcggaagcggaagagaaagtcagaatcatcagggaaaggttgaggattgcccagtctcgacagaagagctacgcggataaccgtcgaagggagctcacttttgaggcaggggattacgtgtatcttcgtgtcactccgctccggggagtacaccgctttcagacgaaaggcaagttggcaccacgcttcgtggggccatacaaaatcctggaacgaaggggggaagttgcttatcagctagaacttccatccaatatgatcggcatccatgacgtgttccacgtgtcccaattaaagaagtgcataagggtacctgaagaacaggctgattcggaacacattgatatccaggaggacctaacatacgtggagaagccggttcgtatacttgataccagcgaaagaagaaccagaaacaagatcaccaggttttgccgagttcagtggagtcatcattcagaagaggaagcaacctgggaaagggaagatgagttgaaagccgcccatccgcacctcttcaccagctcctccgaatctcggggccgagattccgtt

SEQ ID NO: 14326 - DNA, 3364 bp, Oryza sativa
  Clone ID: TFbOSC25042j.C1.o1.np
atggcgttggttccggcaacggcggacccgatgaagtgctttcctttaccgataactcacatcaacaaactacactagttggatgatacgggttcaagcaatgatggaggatcaaggcgtataggagacgatcgagccggcggctggggcggcagtcgacccgaagaaggacaagaaggccaagacgcatcttcttcagtcgctgccggaggatctcttgatgcaggtggcaaagaagtggacggcgaaggaggtgtgggactgcctgaagacaaggttcgtcggggcggactgggtgcgcaatgcgcgccttcaaactctcaagggagatcactagtatggtggtggaagccgaggagacgctgaaccagtacgccggcaggatcaccacgatgggggtccggaattctgctctgggtgcaacaacgtcgatatggtgaaaaagttgttcgacatcgtcccggagaaattcatcagtcttgttgccgtcatcgagcaattctacgacatcgacgaaataccgttcgaagaggctgtgggctatctaaaggcgtatgacgagcgcgtgtgcaagaagaaagctgctgttggcggagtgatcgcctacggctaggtgttgcacactcaggtcgagtggaagcgtgcttcaagaaaaatggcagagaaacttcgcgccacagaagaataagccctatggcgagggggcgaaccgcggccaggacgggtgcggacgtggcaggggtcgcagagctggcagacgcggcggggcacaaaacaacaactcaggaggtggttctggtggcggtggccatgacaagagccacataaagtgcttcaattgtgacgaatttggccactactccacgtagtgcccacaccctaagaagaagaataccgaaactcatcttgcgtagacgaaggatgccggcccagctttgttgctcgccatgacagaggcggtgcagaacacgccgcgtcaaggcgtgcactgtgggctggtcgtgcacgaggaccatgtatggccgcgcctgatgctggcaggcaatggcgccgccgccggtgatgtctggtacctatacaatggtgctagtaatcacatgaatggagatcgtcgaaaattccgggagctggacaaaaccgtgacggggcaagtcaggttcggcgatgcctcatcggtgcagataatagagaagggttcaatccttttctcattcaaaaatggcgaccagtggctactcgacgatgtctactacattgccagcctctgctgcaacatggtgagtctggggcaactcaccgaaactagccaccgagtcatgatggatggggatgacctcgaggtgttcgacaaaatcactgtcgattggtgatcagggtgagaagaaccgtgaacaggttgtatcgcatcgagctgaagttggcgtcccctgtgtgtttgctggccagtctcgactctcgacgacctggtgtggctctggcatgcccggctcgggcacgtgaacttctaggcgttgaagcatttggtggacaaggagatggcgacaggggtgcccgcagtccaccatccaaatcaattgtgccaagcatgttttgtggctaagccgatccggcagccgttcccagcgattgccaattatcgagcagagacaccgctcgagctgctccacatggacttatgtgggccgatcaccccatcaacactggccggtaatcgatactttatgttgatcgttgatgatttttctcgttggatgtgggtgtttgtgatcaagtctaaggaccaagcgctcacggcattcgagaaattcaaaccgttgccagagaacatggcaggccgaaccatcaagacactccgaacagaccgcggcggcgagttcttgtccagcgagttcacgagcgtctgcaccgaggccggcatcgagtgccacctgacagcaccgtactcaccgccacaagcgggtgttcaagctgaagaaaaacactaccggcgaggtgatcaaacacaaggcgcgtttggtggcgaagggctatgttcagaggcaaggtgtggactttgatgaagtgttcgcgccggttgcgtggctggacacggtgcaagccattctcgcagttgctgccaatcggagatgggaggtgcatcatctcgatgtcaagtcggcattccttaatggcgatctagaggaagaggtatttgttgatcagtcggaaggatttgtgaagcaggggaaggagcatcttgtttacaaactgagcaaggctctctacggcctgagacaggcacttcggggctggaacacttgtcttgactggagtatgaaggagcttgggttcagccggtgtgcacaaaagcaagctgtctacaccagaggtacagggaatgccggactaattgtcggggtttatgttgatgatttgatcgtgacaggagaaaactcaagcgagatcacaacatttaaacaacagatggtgggggagtttgatatgagtgatcttggacttctcacttattatttggggattgaagtgatacaatgcaaggtgcaaatgggatcgccatcaagcaggctgcttatgcaaggaagattctgacccagtttgggatgttacattgcaattccacctcaattcctattgagcaccgttcacagctgcataaagatgctaaagggagtccagttgatgccacacaattcaggcgagtgataggttgtctgcgttacttgttgcatacacggccggatctgtcctatgctgtgggtgtagtgagcagactcatggagcgaccgactgtgatgcatttcaaggtagtaaagcaaatcctcaagtatctcaagggtactatcaactgtgggttcacgtttgctgatggcaacggtgcagtggagatcaccagattcacagatagtgatcaggctggtaacactgatgattgtcagagtactagcgggatggcattttatctcaacaatagtttgatttcctggagttcacaaaagcataaaacggtggctctctcgtcctgtgaggctaagttcatggcagccactgcggcagcttgtcacgctctgtggctcaggggattgttgattgagattattggcgcagaacctaggccggtgaagttgtatactgtaaccaattagcgattgcactcatgaagaaccctgtgttttatgggagaagtaagtacatagatacccgctaccatttcattcgggagtgtgttgaaagtgggaagattcaaattgagttcgtccggactaaggagcagcgggcggatgcgttaacgaaaggtttgccagcagcaagattagagacagctcggcacctgctaggtgttcgtgattttgggccatagcagaat

SEQ ID NO: 14327 - DNA, 419 bp, Oryza sativa
  Clone ID: TFbOSC28312j.C1.o4.np
atgctattgcatgcaattaactgcagctccgtacaccgtacgcaccgcagtcgcaaccctcgtgttcaccgtccacgacctcatcgtcatcggccctccacgtccgccgcgccgtgccaggctcgctggcttcgcccttccgtcagtagcctccctgccgccgcggatccacattcaccgcgtgcgtcgggtgcgccgtccatggcgctacccctccaatctctccggtcgccttcggccacgcccggccccgtcttccggtcacgttccgccatcgccggtctgatcgcgagcgaggtcgccgcctccgcaacatcctcgttgtcgccatcgatctcatcgccacggctgacgatctcctgtcgatgcgcgatccccacctcgtgtttcctcctccacatgtcttcttgatccaatgc

SEQ ID NO: 14328 - DNA, 1437 bp, Oryza sativa
  Clone ID: TFbOSC28312j.C1.o5.fg
atgacgatgaggtcgtggacggtgaacacgagggttgcgactgcggtgcgtacggtgtacggacagcgcgtatggcgacgacgcaaattgcacgagttcttgggaagaaggcgcacgggtgcgggtggaccaagccaggctgacacgatcggatcacaagacgagattgtgaagacgaatacagacggtactgagaaaggcgagtattctggtggcgatagaccagtcaggtcgcgggttggcaagttggcgccgacatgtatgaaatttgatttggtgaagtttgacggcttcggaaattttggcttgtggcaaactagggtcaaagatttgttagctcaacaagaagtttcaaaggctttgaagggtgtcaaaccggccaagatggaggatgacgattgtgaggagatgcagttgcaggcggctgcgacaataaggcgatgtctttcagatcagatcatgtaccatgtgatggaggagacctcaccaaagataatttgggaaaagttggaagctcagtttatgtccaagactctgaccaataaacggtatctgaagcagaagttgtatgggctaaagatgcaggaaggggcggatctgacagcacatgtgaacgttttcaatcaactagtcactgatcttgtgaagatggatgtggaagttgacgatgaagacaaggccatagttcttttgtgttcattacctgaatcgtatgagcatgtgatgagaaagaacaaagagggtgaaacatctcaagcagagggtttgctagtcaaagaagatcatgctgggcataaggtaaagaagaacaaaaagaagaagatggtgaagtgcttcagatgtgatgagtgggggcatataagaagggagtgtccaacactgaagggaaaagctaaggctaatgtagcgacttcttcaaatgactcggatagcgatggttgtgatcttctcacgatgtcaagtgcacagtctaaggatgcagaagcgtggatattggattcagctagctcgtttcatgtgacgccaaggaaggagtggttctcttcatataagtctggtgagtttggttttgtctacttaggcgatgacacaagttatccggccgtgggagtaggtgaagtcaaaatcaagctagaagatggaggtgaacatgttcttcaaggagtcaggcatgtaccagggctaaagaggaatctgatttcgcttggaaccttgcatgaagaagggttaatattccgcggtaatcggaataggaagaccattgagatcatgaagggcaagatgactatgatgactggagagaaggtggagtcgcatctttacaagctgcgagggtgcactgttgcaggtgtagtccaggaggaagcggttgctgggatagcaattgcttttggtggcggcgggtctggcgcagactcgtcgggcggcttgcggtga

SEQ ID NO: 14329 - DNA, 3369 bp, Oryza sativa
  Clone ID: TFbOSC412101j.C1.o1.np
atgggcgtaccccgctcagagggatacgtcattgagctgcatcggttgatgaggcgtctgcggtactccagatttccgatctatcgagtgagacagtgtggatctgtttgggaggctcgggtcgaggttcacacatgagttccttcagagtcagactacagcttcccgacacgctaccgtcgcgacttaccagagactgcgatgcaggatgcagcccgggaggccttcctccgacttagctctatccaccgagctgagttggcgagtactgagtttgctcaccacccgtttcgagaggagagcaactccgtctacacagttcaggacacaccttgctgctacaacccgatagtgactcgactgtcacgatgggctgaggcagtagacgacttctacgaggaggctctgttagagatcgacgaccagcagaggcgtgtgggagagttagagaccgaggtgactgacctcacagtgcagcagcttcagctggaggaggagcaccaggcttggggcagtgagatagactcactgaaggcacagctccagctaggttccagtttggagactccgatccaggttgactctgagacagaggggaccgacactgagccagagatagagccagacatcaccgatccttcagaggatgagactcctgttccccacatcaccttcatcggaggccctcgtaccctcagcactgctcgcaagagcacacgacctccgggcaagaagcccaagccagatccagaggccactacttccgagccgtggggactcaggatcatagagaagaaactgacccttgtccgggtacgcgaagccgacaaagtgatcttcgcagtacaccaactggagggacccgctggtgattggtgggatacttacaaggaagcttgggaagaggatgctggagaacccacttgggaagagttcactacagtatttcgcgagaacttcgtgcctgctgcggtaatgcgtatgaagaagaacgagtttagaaggctacgacaagggaacgcaacggtgcaggaatatctgaaccaattcactcagttggcccgctatgcaattggagacctcgcagatgaagaggaaaagatcgacmagttcatagaagggctgaatgatgaattgcgtggacctatgattgggcaagaccatgagagcttccagagcctgatcaacaaagtcgttaggctggagaacgatcaaaggactgtagagcacamccgctagaggaggcttgctatgaatcgcccacctcagggagtgcctcagcgactcaagggagccactttgtctgggtggaagccccctattgtggcaaccaaccgtcccaccgtgcctagtaattttaacaggccggttgtgattcagaaccgcacccctacaccaactctggctgcccctgtagccaagagaatgtggactgcttcaactgcggggagtatgggcactacgccaacaactgccctcatccacgcaaaactcctgtccgtactggcgctaatgcaatgactgttcgtggaactactacccctactaccggacgaggtttattcaagactccgcaaactaacaggaccgctaccggatttgggcgcggacaagtgaaccatgtccgagcggaagaggcccaggaagatcagggcatactaatgggtatgttctctatcaattctaccccggttaaagttctcttcgattctggtgcatcgcattcattcatatctctgaaggctagtcaaaagcacaacttagccctagtgggacttagaaagcctatgatagtacactcacctaggggcgagataaccgtgagtcatgcttgcatcgacgtacctattcgtcttaggaatgtggtgtwtccctccaaccttatggttttgatacctaagaccctggatgtcatatkgggtatgaatkggttaacaaagaacagaggggtaattgactgtaggcgtagagaagttatcctgaccacaccctggggatcggatatgagaacaactatggatcaagatcctagactggccgagcgtgccggaggcatattcaccatgctacccatgaaaggaatgcctgtggtgcaacgatttcccgatgtgtttccagaagatttacttggaatgccgccagatcgtgacatagagttcattattgatctgatacccagaactgcccctatatccaagagaccatatcggatgccggtcaatgagttggaggaacttaaaaagcaaatcagataattgcaagaaaagagatttgtacgccccagttcgtcaccttggagagccccagtgctattcgtcaagaagaaagatggtagcatgagaatgtgtgtagactaccgttcacagaaagtaactatcaagaacaagtatccactaccacggattgatgatctttttgatcaactcaaaggagctaaggtgttctctaagattgaccttcgatcaggataccaccaattgaaaattaggaccggggatatacccaaaaccgcgttctcaacacgctatggattgtatgagttcaccgtaatgtcgtttggtttaaccaacaccccggcatactttatgaatctcatgaaaaaagtgttcatggattacttggacaaatttgtggtagtattcatcgatgatattttaatctactccaaagacgaggaagagcatgcgaaacacttgcgattggtactcgagaaacttcggaagcataagttatatgcaaaattcagcaagtgtgagttctggttaaaagaagtcgcctttctaggccacgtaatctcagcaggtggagtagcagtggatcctgctaaagtggaggctgttacgaaatgcaaagcacccaaatctatgactgaaattcggagttttctaggcttggccggatactaccgaaggttcattgaggggttctctaggatagctcgaccaatgacacaactactcaagaaggaaaagaagtttgcatggtcagaacagtgtcaggaaagctttgaacagctcaaagaaaagttgacctctgcacctattctagtccttcccgacatcaggaaaaattttgttatatattgtgatgcatcaaggcaagggctgggaggagtgctgatgcaggacggaaaggttgtggcctatgcgtcgtgacaattgcgaccacacgaggaaaactaccctacccatgacttagaactcgcagctgtggtgcatgcgctaaagatttggagacactatttgattggaaaccattgcgatatctacactgaccacaagagtctgaagtatattttcacccagtcagatctcaacttgaggcaaaggcgatggttggaattaatcaagaactatgatttagaggttc

SEQ ID NO: 14330 - DNA, 1618 bp, Oryza sativa
  Clone ID: TFbOSC13700j.C1.o1.fg
cgtgttgcttacatcattggtgagaatggtgaacacccgcactggaagtggaagtggaagtggtcacaatgaaggagatcccacacttgcccaacaagcgcagaaccagcaggcaaataacaacaatcaaccaccacctccacaaaacaagttggcagattttctacgtgtgagaccacctaccttctcaagcaccactaacccagtagaggcaggtgattggctgcatgctgtggaaaagaagttagatttgattcagtgcaccgagcaggagaaggtttcctttgcttcgcatcagttgcatggtcctgttgctgagtggtgggatcactttcgtctaaacagagccgcgggagagcctatcacttggcgggagtttactgctgctttcaagaagacacacataccatcaggtgttgtggcacttaagaagagagagttcagagcattcaatcggggatcccgttctgtcacagagtaccttcatgactttaatcgcttagctcgttatgccccagaagatgttcgcactgatgaagagcgtcaggagaagtttttagagggattgaatgatgagttgtcttatgcattgatggctatggagtaccgggatttccagcagttggtggacaaggcgagtcgccaagaagacaagtacaataggatggaacagaagaagcgtagggctgctcaattcaaggctcaacagggtagtagccagaggccgcacattggtatgggacctcaagctgcaccatacccacagggaggatcctcttcagttgttcgccctcaacgccagttctacaacaacaacactggtaatcgcagcaacaacaatcgtaatgtggtcactcgtcctgtagcagctccaacacagaatcagtctgtcaggaaggaacaaggaagcaagccaggggtgtgcatcaattgtggtgatccaggacattatgctgataagtgtccaaatcctcgacgtgtgaagaatgctcctgtccagaatgactccaatgctccagcaccgaaggctcgtgttaatcatgttgtagctgcagaagcccagaatgcacctgatgtggttttgggtacgtttcctgttaactctatacccgcaactgtgctttttgattccggtgctacagttttctccaagatagatcttcgttccggatatcaccaacttcaaatccgtgaggaggatatacctaagaccgcttttaccacacagtatggtttgttcgagtgtaccgttatgtcgttcggactcactaatgccccgtcctttttcatgaacttgatgaataaagtgtttatggaatatctggataagtttgtcatggtgtttattgatgacatccatatctactccaagacaaaagaaaagcatgaagagcatcttcgtcttgctttagagaaactacgtgagcatcagctctatgccaagtttagtaattgtgaattttggttgcccgaagtgaagttccttggtcatgtcatctcagctggaggagttgctgtggatccaagcaatgtcgagtcagtgctaaattggaagcaacctgtcacgtcccaaaacgaccctaaaatacatcctcgaaattgtgccgagaataattaa

SEQ ID NO: 14331 - DNA, 3918 bp, Oryza sativa
  Clone ID: TFbOSC400795j.C1.o74.gm
atgcagaggtggatcctggcagggatcctcgggtgtttacgagcgaaagttgaagaatatgagggcgagttagctgggcgggacggcggcggctctgaggtacgtctggacaagaagaagcaacaacagttagtggtagaggagccgctggctacgccgtgctccgccgtcgctccagctgtcgctgccgctcgggaagaccgccgtcgtcatcgccaagtcgccgccgtcctcgtccgccctttcgcagccgtcgaaacccgccggagcttcgtcgccgtcgacaacccgaaggtagccgccgcttccttctcgtcgccgtcgtcgtccgttccttttccgccgccgttttggtcaccggtgtgttcgccgcgttgtcctctacgtgctggtgccctccgttggtgccgtggtgccgccgttcgccggcgagtgtccgccgcccgagccgtcttcttcgtcgagccgccgccgtcgtcgatgccgcgttacaagcctgagtacctgtttggtgttgagggttttgtccaggagttgcatacgatgtcctttgtcattggatttgggactgcccctttttatgcccagattcctcatgatcgtcatgaagagaagtgccgagtcaaagtcaccttgaacagcaatagtgaagaggtcccctcagtaatgttcgaagctggaggaagaaactacatccatgcatgtcaggaagtggcaaggatcgccataggagagctccgtgatcgctacagtgatcaattggccgacactgagtatcgctaccatcctcgccaacctcagggaagtgaccgtggcagttaccttgagactgaaggaattgagaatgatgttaccacgaaacatttggttgagatgttgtgggctatggatgaaagtcgtgcggagactgtgttagcagctcaagatcgtgaagatcggaatcgtggtaagatttgcaagctagaagacaaggtggatcgtttggagaaggaattagccgcattgaagggagaagcaccgccgcagaaggccaagattcgtcttaccgcaaggaagagagctctattcgtccctcgctatcaactagcgccaaaggttcgtgtggtggagaaagaagttgctccagctcaagcggatcctccggtcatcatcataagtagtgatgaagaagaagaatctaagcgcaacaattccaagattgagtgggtagcaactcaagatgatgaagacgagccttcaatcgacctccgatgcttggaagaactagataccactaatcctgttgaagctagtgattggctgcatgccatagagaagaagttggatttacttcagtgtactgatcaggagaaggtctcatttgcatcacatcagttgcatggccctgcatctgaatggtgggatcacttccgccttaacaggactactgctgaacctatcacttggcttgaattcaccgctgctttccggaagacgcatataccatcgggagtagtgtctctcaagaagaaggagttcaggtcgctttcccagggatctcgctctgttacggagtatctgcacgagttcaatcgtcttgctcgttatgctccggaagatgtgcgcaatgatgaagagcgccaggagaagtttttgggaggacttaatgatgagctttcttacccactcatggttggagattatcctgatttccagaagttagtggataaggctattcgtcaggaggacaagtacaatcgcatggagcagaagaaacgtcggattgctcaattcaagacacaacagggaaataatcagaagccgcgtcttaatttaggaccccagtccatgccacagggaggttcttcgtctgttgttcgtccgcaacgtcagttcttcaacaacaatgctggcaacaacatccgtaatcaagcttcacgtcctgttgcagctccagcacagcaacaacccgccaagagggagcaaggcagcaagcccgtggtgtgtttcaactgtggagatccaggacattatgctgacaagtgtggggcccacctgtcgggcccgtctccctcctcccgccgatcccggcgcgccgccgcgcccgcaaccgtcgccgcgcccacgtctccgccttccccggccctcgtcgaccacgcccgcgcgtgcgccgcgtcccccgcgcccacttccctctctctcccgctcgcgcccgcgcccgagatggccgggattcgaaaatcgaatcccgcctctctctcctcccccactccccacgtcggccggcgattcccgccgctcccggccacgctcgccgccgtcttgcgccgtcgccgccgttcgattcgcgtggccgagatccaccccgtccacccctcctccgtcgaagtcctcccggagcccgtcgccgtcgtcctcccgtctctcatcgttgctgttcgccgtcgctcctccctcgcgccggccgagcccctcggccgccttcctcctttccccgtgaaccgccgcccggtgggccccgcttgccagccgcgcccctcccgccttgtgccactgcccgagttgaagtccttctcagttgaagatgtctcggagaggttggtttcgtcgctgccgtcaaggtcaagactgaaccagataactttggaagagattcctatagtccgggagtatcctgatgtgttcccagatgatttacctgccaatgagttggcagaagttaagaggcaagtagatgatttgctacagaaaggatacatcagaccgagttcatcaccatggggagctccggttatttttgtggaaaagaaagaccatactcagagaatgtgtgtggactatcgtgcactaaacgatgtgactatcaagaataagtatccactacccaggattgatgatttgtttgatcaacttaaaggtgccactgttttctccaagatagatcttcgatcagggtatcatcagttgagaatcaaagaggaagatatacctaagacagcttttaccactaggtatgggttgttcgaatgtactgttatgtcttttggacttaccaatgcccctgctttcttcatgaacttgatgaataagccctcgccttcgcctctcgtcgtcggaagagctctagcgccgtgtgccctagctttgccgtcgccgccgccgcttcagccgtgctccgccgtcgctccagctgtcgccgccgctcgggaagaccgccgtcgtcatcgccaagtcgccgccgtcctcgtccgccccttcgcagccgtcgaaacccgccggagcttcgtcgccgtcgacaacccgaaggtagccgccgcttccttctcgtcgccgtcgtcgtccgttccttttccgccgccgttttggtcaccggtgtgttcgccgcgttgtcctctacgtgctggtgccctccgttggtgccgtggtgccgccgttcgccggcgagtgtccgccgcccgagccgtcttcttcgtcgagccgccgccgtcgtcggaaggtgcgctgcagtggattgtgttatgcgaggggtatcgtcacaactcctttccgagataccgtggtggtattgaggcacatggtgacatgatgtggggttgtgtcttgtgggtacagtggtacacctctggccagagtaaaactattcgaatagccgtgcccgcggttatgggcggcggcggctcgtctagcgggtccatcagagtgttgatgttggctgtcgaggaccacgccgttggctcacactccgccgccttcgactcgccgaccgccggcgtcatcgcactccacttagcttggattgtctccaccgcgttcttcgctctatccaccattgtgtcgccccgaacgcccaccgagtcctcattgtcgtcggcggcggcggcaccgggcggggacagggatggtgccgctcccggctgcctcccatcgaagtcgcgttga

SEQ ID NO: 14332 - DNA, 1998 bp, Oryza sativa
  Clone ID: TFbOSC401829j.C1.o21.gm
atggtgaacacccgcactggaagtggaagtggaagtggtcacaatgaaggagatcccacacttgcccaagagaaggtttcctttgcttcgcatcagttgcatggtcctgttgctgagtggtgggatcactttcgtctaaacagagccgcgggagagcctatcacttggcgggagtttactgctgctttcaagaagacacacataccatcaggtgttgtggcacttaagaagagagagttcagagcattcaatcggggatcccgttctgtcacagagtaccttcatgactttaatcgcttagctcgttatgccccagaagatgttcgcactgatgaagagcgtcaggagaagtttttagagggattgaatgatgagttgtcttatgcattgatggctatggagtaccgggatttccagcagttggtggacaaggcgagtcgccaagaagacaagtacaataggatggaacagaagaagcgtagggctgctcaattcaaggctcaacagggtagtagccagaggccgcacattgctatgggacctcaagctgcaccatacccacagggaggatcctcttcagttgttcgccctcaacgccagttctacaacaacaacactggtaatcgcagcaacaacaatcgtaatgtggtcactcgtcctgtagcagctccaacacagaatcagtctgtcaggaaggaacaaggaagcaagccaggggtgtgcatcaattgtggtgatccaggacattatgctgataagtgtccaaatcctcgacgtgtgaagaatgctcctgtccagaatgactccaatgctccagcaccgaaggctcgtgttaatcatgttgtagctgcagaagcccagaatgcacctgatgtggttttggacgctacagcttcggaagatccactcttcgtggaagttgaagccgacgtttgggaaagcgagcaaggcaagctgggctcggggtgcatggttttgatggtagcacctcggccatataaggaccggtcttcgggcctctgttgcaaagcactaccgtacttccacatgtctagtggggcaaatgaaggctacacgagctgcggcccggtagtcgagatgtcatggcagagggttggtgccctgctgctaggggctcagtcctgcctgcctgtcccggaggttccggccgtaggcgggattgggtcgatggccggcagcgtcacccgtcgtggtttggacatgactggcttcgtcttggagttgcggggcatgtgcgtggttctggggtatccacacggagtggactaccaggccaggccgcttccggagcaggagggtgacgatgcagagccccacgctggttgggaggtcactgcagtgatcctctctggctctcccgagcggacttcgctggcagtcaccgcgggtggagattccttccccaccgcttgccagaacgccgctctcctcgccatcggcactcttcaccagcgctacccggacgagttgcaacactcgccctaccgctaccaccctcgtcgcggaggagcccgcgactacgccaccttccgggatgctagctcagaggatgacgctaccatcgtgcacctggcgcggatggtggaggcgtacaacgcggctcgtatcgacttccaccagatggtacgtcgcgggatggtcgagaacaacatgaagatcctggaactgcgccaggagaacctgcagctcaagaaggacctagacgcggtggaggcgcagctgcatcagctcaagatcgcccagggaaaggtctgtcgccccaagcgtcgccgcgtctgccgcagccagaagatcaccgcccgcaagagcacctccaggcccgagcttgttcgtcagtccctggcgtggacttgcttcatcgagacccctcgtgccgagcccgcgcccgtggttccccaggagggggaagcctccggcgtcggtagcacggaggatgcgctgttgctcaccttccgtcctggcccgtcgcagcagtag

SEQ ID NO: 14333 - DNA, 1389 bp, Oryza sativa
  Clone ID: TFbOSC405043j.C1.o1.fg
atggtgaagacaaggaatgatccccgtgactccaacgacgccagtggcagcgaagagcagacagatgaagctcataccagtggtgcacctggtagcagttcatctccaccgcccgagaacccaacagtccctcagatgatgacaatgatgatgcaacagatgcagcaacattaccatcagatgttgcagcaggcgcaacagaaccagcagtttggtcctccaccatcacacgtgtccaaactgttagactttcttcgtatccagccacccactttctcaagcaccaccaacccaatggaggccaacgactggctccgtgctattgagaagaagctgaacctactgcaatgcaacgaccaagagaaagttgcttttgctacacaccagttgcaaggtcccgcttctgtctggaaggcacagattcctgaagggattatggcacaacagaagagagagttccgtgcattgcaacaaggaaccagaacggttacagagtacctgcacgagttcaaccgcctcgcgcgctacgctcctaaggacgtgcgcaccgatgctgagaagcaggagaagtttttgtttgggctcgatgatgaattgaccaaccagctaatctccagagtctatgaggactttgagaagcttgtggacaaggctatccgccaggaagagcaacgcaacaaaatggaccgaaaaagaaaggcagctcagatcagctttcctcaggggaacaaacagaagcctcgcttcatgacgggacagctaggtgggccttccaccctgatcgtctgtcagcaccgtccctatcacccgagtaacttcaacaacgattacaacggtggcagtcacaacaacagtaagcagcacaaccacaactcgactccacccccactaatggcaccagctcagtcagattcgccagctgtgtcagctcagtcagaacagcccaagaagggggctgtaggaaagccaggaccctgcttcaactgtggcaagcacgaccactttgctagcaagtgtccgaagctgaatcgcactggacccaggttcatccaggcccgcgccaatcatgtgtctgcagaggaagcacaggtagcaccaaaggttgtgttgggcacgtttccagtgaactcatatccagcaacagttctctttgattcaggtgcctcgcattctttcatttccaaaagatttgctgggacacatggattctattcgacattgacgaaggctccatgtctctatggttctataccaagatcgactaaggcgagtacgacaaatgtcgacaaagctccgtcgcagattctgcgccttctcgatcactcgagaacggttggtggatctcgacaaggaatacggaatgaagagatggtgtacccgccgagataa

SEQ ID NO: 14334 - DNA, 6339 bp, Oryza sativa
  Clone ID: TFbOSC900110j.C1.o18.fg
atggctactacagatacaaccatagctcacattatggatgaacaagatgatatcaagatcaagtcctccaagtgctggaatccgattcggccacctgctacactgctgacttcaaacggctaccgaatttgcatacgacctccgttttcggcccatgagtacttgatggaaagttctcggagtcctctttccaacagatctggcctcatcagcagactccatctcgtttggccgcaaatacaaaaacaaggtgctgcgtcacctgtcatgggccaatgggcttgtaacttcgtttgggaccccggcccaagtggggcccatgtggggaatagggttgatctgcaccggcaagatcaacaacccacggagagttatcacaactcaccgaaagatcgggccaacaacagccttgagtgtcgagaggaactcagggttcatcaggtggtctcagagctttcatttctcggattgcgcaagggaatacgagaacatcgacttctacaccttcgacgagatatgacgacttcttcatgtgatgcatatgaggaagttcagaaaagtctccaaaatgagaagaacgatatgtttgagatgtcacttccatcactcgcgaatgaggagatggctgatgcagctacattatctgaagagggcataaaaggtaaattaaatggtgcagaaattactcaaggaatagggttgatctgcaccggcaagatcaacaacccacggagaggtgtatcgattgctaaggcgcaacacaacgtctcactagcaccaatattacaagagatggtttccactaatcagagtgctttcataaggaagagagctatacatgacaacttcatgtatgtgcaaaacccggtcaagagactgcatagaaggaaaacacccaccttgttgctcaaacttgacatctcaaaggcattcgactctttgttgctggatttcctaggagctgttcaaggcttcccaaccagttacttagcctacctcttcaccttagaaaactatggaagaggcatggactccccagcgacccccatgaacttctcgccgcttctcagtctagcaccccgtaatgaaccatgctatacaaaagaagaaaatcaagatgtgacaatttcatccctctcattgaaaaaattggctccagaattccaggacgagtgccctcgtggccgggttgacgcgcaccacaagttcgcggcgaccattggagacggtccagagaataaagatgaggagggtgcatctcattccccacgcaccaaaggcaccatccaatactttacaaggaaagtgaagcagcacacagaaagacttgagacagatttgcaggtgacaaatgagaagattggacaattggagtccacgcagatcttcaccaacactaagcttacagggctggagacagcggtcgcccgcattgacactagccttgctgcacttgtgaggcattttgatgctctcaatgctggaggcaatggtgggggtaatgacgatgacattgacggagagtacgtcgaggataatttggaggatgaatatattgctgacactgagcaagatgatcgagatgctcgagatcatcgacggctacacaacaatcgacgagaggaaactgaggatgctgccatggctagatttttgggtgggttaaaccgcgagatttatgacatcgtagactataaagattacactaatatgacccgattgtttcatcttgcttgtaaaacttcatcatggcagacacgcaccactcctccggccggccgtactgcttctccatcttccacacccgcaaccagtcgggcagcacctcctccatctagtgacaagtcagcgacaaaggctgctcagccagcactgagtgcttcttcagtggcatccacaggccgaacgagagatgttcagtgccaccgttgcaagggctttgggcatgtgcagcgtgactgccctagcaagcgagttttggtagtcaaaaacgatggtagaccatggcaatttgatagggattctatgcatcatggtaggtcaaaccagtactcttttctgtaccatgataagaaaattgtgttgcatcccatgtctcctgaagatattttgcgtgatgatgttgctaaggctgccaaatccaaatgtgagagtgataaaaaagcccaatctaatggcaagaaacctgagacaatcaatttgaaacccaaatgcttacttgctactaaatctgatattaatgagttgattgcatcaccttcagttgtctatgctttggagtactctgatgtgtttcccaaggaagtgccaccggggctgccaccggtgcgcggcattgagcatcaaatcgacttaatcccaggtgcttccctacccaaccgtgcgccataccgaaccaaccctgaggaaaccaaggagattcagcgtcaagttcatgagttgcttgataaaaggttagatgatatgcttgatgaattgagtggctctattgtgttctccaaagttgatttgcgtagtggttaccaccagattcgtatgaagttgggtgatgaatggaaaacagcatttaaaacgaagtttgggttgtatgagtggttagtgatgccttttggtttaactaatgcacccagcactttcatgaggttgatgaatgaggttttgcgtcctttcattggaaaatttgtggtggtctactttgatgatatcttgatttacagtaagtctatgggtgaacattttaatcatttacgtgctgtttttaatgctcttcgtgatgcacgtttatttggtaaccttgagaagtgcaccttttgcacagatcgagtttcttttcttggctatgttgtaactctgcaggggattgaggttgatcaagccaaggttgaggcaattcagagttggccgactcctaaaacggtctcacaagtgcggagttttctaggactcgcggggttctatcgccgctttgtgcaggatttcagcaccattgctacaccattgaatgcgcttacaaagaagggagtgcctttcacttggggcacatcacaagagaacgccttccacatgttgaaagataagttgacccatgcacctctcctccaacttcccgattttaataagacttttgaacttgaatgtgatgctagtgggattggattgggtggtattttgctacaagaaggaaaacctgttgcatattttagtgaaaagttgagtgggcctgttctgaattattctacttatgataaggaattgtatgctcttgtgcgaactttagaaacatggcagcattatttgtggcccaaggaatttgtcatacattctgatcatgagtctttgaagcatattcgtagtcaagggaaactaaactgtagacatgctaaatgggttgaatttattgaatcttttccttatgttatcaaacacaagaaagggaaggagaacatcattgctgatgctttgtctaggagatacactttgttgacacaacttgactataagatttttggcctggaaacaatcaaagaccaatatgcgcatgatgctgattttaatgatgtgttgctgcattgtaaggatggaagaatatggaacaaattcgtcatcaatggtgggtttgttttcagagctaacaagctatgcattccagctagctccgttcgcttgttgttgttgcaggaagcgcatggaggcggtttgatggcacattttggtgccaagaagacacatgacatccttgctagtcatttcttttggccacagatgcgaagagatgttggcagggctgttttgaagaaaaatatcaagatgtgggaagaatgcttgcctcatattgaatttgcttataatcgttccttgcattctactacaaaaatgtgcccatttcagattgtgtatggtttgttgcctcgtcctccaattgatttgatgcctttaccatcttctgaaaaactgaattttgatgctaagcaacatgctgagttgatgttaaaactgcatgagacaactaaagaaaacatagagcgcatgaatgctaagtataagtttgctggtgacaaagatttcagggttagtcccacatttaacattgcagatttgaagctgtatttgggagaagaagatgagcttgagtcgaggacgactcaaatgcaagaaggggaggatgatgaggacatcaacaccatcgatacatccacgttccccccatgtacaccatcgatacatccacgccgcctccatgtacagcatgatggtcctattacccgcgctcgtgcacgtcaactaaattatcaggacgagtgccctcgtggccgggttgacgcgcaccacaagttcgcggcgaccattggagacgcttttggtcagatccgactcattaagcctcttgatgggtcaaattatgctaagtggaaggctgacgtgttactcaacttaggcatactcgattatgattatgccatcagagaggaccgtcctgaggagccttttagtgttgagcacgattatgaggagaaactgaacttatatcatgagaaaactaatgaatgggagaagtccaataggatttctctcatgtacatcaagagtgccatatcaaatgtcattattggtggtattgtggactctgatgatgttaagacttacttagaaaatattgataggaacttcaggagttcttctaagtcttacgctagctctataattaagcgtctaatgtccatgtgctataattataaagatggtaataatcagagggataagtggtccattgaagaaatcatttctcattctgttgaggaggaggatcgtcagaaggctgacaaacagaagcataaggatcagctgaacctccttcatggtgctaagggcggtaagaaaaagttctatcgaggggagtccagcaactcccaaaacaagaagaagaagcccaacactccttccactcaggcttctaatggtgcccataagggcaaagctcaggttctagcaggtcagaactctgctggtaagttcctttgcaagttttgcaaggcagaaggtcatgcacagacagactgtgaaggctttcgggcttggcttgctaagaaaggtactaatgttgatattgtctctaatgttgatgaattactttacgttgaattttctcataaatcatggtggattgactcaggtgccactgtgcacgttgcgaactcattacagggattccgttccgtgaggacgctaagaaagggggagtggatcctaagagtggctgatggagctgaaattaaagtgatggccattggggagcttcatcatcgacttccaagtgatgatttctcccgttatggatatgttttccccattaaagatagatctaaatcactcgataagtttaaaatattcaaagctgaggttgaaaatcagcatgatgcaaaaattaagatacatggaataattgcccaatattccatgcctggagaaccacaacaaaatggagtggctgagcgtcgcaaccgtacacttatggacatgaggcacttaaaacagctgcacacatactcagtcgagttccaaaccgtagtagcaccagatgaaaattctggtgataccgactatgttgaaaataataatgaattaaataatgacactcaacagacttctggggcacaaaatgaagaaattctcgaagaaccttctcaaccgctagtgatcgaaagtgaaccacttacaatattacaacgggagaggagatctgccattctaaattattatgaggtttatttaggtgaagatattgggaatgtagatgatcccacctcatttaaagaagcaataatgagtgaacatttatccaaatggcttgaagccatgaaagatgaattaaaatctatgagtcataatggagtctgggacttagtagaaattcctaaaggagccaaaacagcaggctgtaagtgggtctacaaaactaagcttgactccaaagggaaaatcaaaaggttcaaggcaaggcttgtagcaaagggtttttcacaaagagaggaaatagattacaatgaaattttttctcccgtctctaagaaagactcatttagaattgtcatggcgcttgttgctcattatgatttagagctccatcagatggatgtaaagactgcatttcttaatggtgacttgcatgaggatgtatacatggcacaacccgagggttttgttatggaaggcaaggaccatttggcttgcaaacttaagaaatctatctatggacttaaacaagcgtcaaggcaatggtaccttaaattcgatgaaataattaagagatttggatttaaggagaatgaggtggataattga

SEQ ID NO: 14335 - DNA, 1518 bp, Oryza sativa
  Clone ID: TFbOSC6294j.C1.o1.gm
ggcgaattcgagctcggtacccggggatcctctagagtcgacctgcaggcatgcaagcttcgtgcaaggagcgagaagatcagttcaaagtcgtcgttccgcgatgatcaagagttcccaatatcggcaccgaagacccctgtcaaaatgcggtcaagatccccgaagataacgacagccaagtcaacgtcagaccaaaggaaagtaagtgctacctgttatgactgtggtgagcaaggtcattatgtaaggaactgtccatggaaggtgttcgccaggtcacctgaaaaagacgagaagcagtgcccagggagtaaccaagctccaagtcagtctaccgacaagaaggatggtactttgcagcgcaactctggagcgaataggacagtgatatggaagatggataatggcaggaccatcatcatcaccagttcagaatttactcctgaagatgcagcaaggatacccaagcgagaacggttttctgctgacgacgatgacgacaacgatgatgataatgatgacaatgatgatgcgacccttgacagtttcagggaaagagagttgaagttcaaagcatgtgctagatgtgggatagtcggacacactgctagtttatgcctccccacctgccgctgtgatcatgtgcctaaggactgtcagttgaacgcggtcatagctaagaccaagaaagaacaagggacaaccgtgcaacccattcgtcaaccaatgacaatcgacaacagcggtcacaatccttctgctctttctctaactccagctccagtggaagccaaccatggaagaagcaacgtcaccaaggatgttcataagcctctgcttgttcccgtttcagctgccaaagtgcataatcagaagcctgcaccccaagaccaagcaagtcgattatgtcgcaactgtcgtaagccaggacatcgtttcagtgattgtcctcttccaagagcagcaaaggcagttcgtcgtgattcacaagttaccagcactgcccacgacaccaaacgacacctgaatgtgcaacctccgccccaacggattatcgtcaagggcaccgtcaaaggtcgcattgttccaccggcaatcgtttcaagcctacaacaccaacgccagcagggtaagcaatgccaggagaacaacagctcgctacagctacaaagaggcggtacgctccttcgtcagcacccgcagcaagtgttgtcagcaccgggtcgcccaactgttgtcagttctagcaatgcacctggtattgctccaatctggaggcccatcgacaaatcaccgctcggtaaccccacgggcaagaagatcctacccgttacagctgacaagatagttgcccctccaccatcgaagatcaacaagcagagcaacgttcccgagactcttgggaactccctaaccttggaagctgttacaggatggacccgttcaagcggacgtaggatcaatgagttacaaatgccagatgcaagtcttaggaacaacttcacccttctctag

SEQ ID NO: 14336 - DNA, 978 bp, Oryza sativa
  Clone ID: TFbOSC10584j.C1.o3.fg
atggacaggaccttggccgaattgtatgggatgctaaagactgccgaggaaagcattaagaaaaactctaaccatgtgatggttatgcataagcgcaagcccaataacaagaagactggtcaaaagagaaagctaaactctgatgagatcacgagtactggcaactctaagaccaaggttcaaaagacagggcccgctaaggatacagagtgcttcttttgcaaggagacaggtcactggaagaggaactgtaggaaatacctagagcacctcaagcagatgcagcaggatggaaagagttccaccttaggtattaatgttatagaaattaatcttgctacttcctctactgattcttgggtatttgatagcagtttttcaatgaaggacttaggggaagcagtatatattctgggcataaggatctatagagatagatcaaataggctaattggattaagccagagtacatacattgacaaggtgttgaagaggctcaacataagaactaaggttatgttcctagtttatggaggacaggaagagctcgttgtaaatggttacacggacgcaagcttccaaaccgacaaagatgattttagatcgcagtctggatttgtgttctgcctaaatggtggcgctgtgagttggaagagttccaagcaagatatagtcgctgactctacaacaaaacccgaatacattgccgcttctgaagcagcaaaggaggctgtttggataaacaaatttgtttctcaattgggtgtgatggctagtgcttccagccctatggacctctattgcgataatagtggtgccattgcgcaagctaaggagcctagatcgcatcaaaagtccaaacacattttacggcggtatcacctcattcacgagatagtgggtagaggagatgtgaagatatgcaaaatacatatggatttgaacgttgcagatccgttgacaaagccactcccttag

SEQ ID NO: 14337 - DNA, 2409 bp, Oryza sativa
  Clone ID: TFbOSC401685j.C1.o102.fg
atgccggtcccgtgcttgccggaccagtcggcggcgctgctccggttgaagcgctccttcaccatcacaaacgactcccagtgcaccctcgcgtcgtggcgggccggcacggactgctgccgctgggagggcgtccgctgcggcggcgccaacggcgacggccgcgtgagaagcctcgatctggcaaggtgtttcttggagagtgcagcaattgaccctgcacttttcgatctaacttcactcaggtatcttaacctcgcacgtaatgacttcaatggctcggagctcccagctactgggtttgagccaggggcgggcccactatgtattcatgggtattcagatgtatacccaagatttttgagaaaaaatagacatttagtttgtaggattgtagaactatctagcagaactaatttgaaaagtctagcagaactatctatgatgcttatcaaaacagagagggttcgtcggtgtatgaacattttttttaccccttcctatttcgaatacccaagtttaaaaagctgggcccgccactggtttgagcgcctcaagcatctcacccatctcaacctgtccgatgcgagcatccaaggcaagataccagttgggataaggcacctgaccaatttggtatctcttgacctctccacaacattttatcttatagatcaggacgactattacctctcattcggtacatggtcagatccttcttggtgggtcgtagaaccaaacattgggtcgctagtagcaaatctcagcagtttgagagagctttatctcggcagggtggacttgtctgacaacggtgaagattggtgcactgccttaacaaactccagtactcctcaactccaggttctgagtttacggcattgcagactctttggtcccatctgcacatctctctctagcatacattcactcactgagattaatctacagtataatgacctgtatggtccagttccagactccttcgctgatttgcacttcttacgcgttcttgatcttgctgataatgatcttgaaggattgtttccaaaaagaatattacaaaacaggaacttaacaactgttcatatcagctataataccaacatctacggttctttgcccaatttctcaccagacagtagcttgacaactttgattgttagcagcacaaacttctctggtcctattcccagttccataggcaatctcaaatcgttgaacgagttgggcgttgcatcaaatgactttagacaagagcttccctcttcaattggacaactcacatccttaaaattattagaggcaacaggagctggtatagtaggaactataccatcttggatcgcaaatttaacctccttggtacttctccggttctctaattgtggtctatctggaccgataccttcttcaatagtgagaaagagagaggtgtgtgtgcgagtgagtgtttgggctgacaagtggtatcagaacctcgttcgagagatgccgaagatcggcgatggcagcaaggctgttgccggcgacgacgacaacagcaagctagtggtgcagcaagtgaaggaggcaggggtgacgctacgttaccccatgctcggggagaacaactacggcatttgggcggtgaaaatgaaaattttcatgcacgcacaaggggtgtgggctgctgtggagggcgacgcagccgatgagaagatcgaccaaatggctctcgccgccattgtccaagctgtgccggaggccgtggtgatggccatatccgagaaggagacggcgaaggaggcgtgggatgccctcaagcagatgaacatgggtgaagagcgtgtcaagaaggctcgagtacaaaccctcaagagggagcttgatggtatgtacatgagtaattctgagaaaattaatgattttgctttaaaggttaccacgatcgtgaacgagattcgctctctcggcacgaaagtggaggagaccacggtggtggagaagctcttgcattccgttcccgacaagttccaacccctcataagcaccatcgagcaatggggggatgtgtcggagatgacggtgacggagacgatcgggcgtttgcgggcgttcgaggagtcttcaaaggggcaacgacgtgacaaagagggggagcagcagttgttggccgcgtgtgccgagccacggctgacgcgtgctgagtgggaggcgaaggttgctgaagagagcagtggtggctccggtagcaacggtgttggtgagaagaagtttcgcggcaagttcgacaagtcgaagattgagtgtcacaggtgtggcaagttcggacacttcgccgacgagtgtgacgagccgcggaaaatgaccaaggcagtggtgcagcttgctattgccgacgcagatgatgaacccactttgctgtga

SEQ ID NO: 14338 - DNA, 2832 bp, Oryza sativa
  Clone ID: TFbOSC413099j.C1.o1.fg
atgtcgtggcacagggccggtgtcctgctgctaggggctcagtcctgcctgcctgtcccgggggttccggccatggccggcagcgtcagccgtcgtggtctggacctgactggtttcgtcttggagctgcggggcatgtgcgttgtcttggggtattcgcatggagtggactaccagggcaggacgctcccggagcaggagggtgacgatgcagagccccacgctgcttgggaggttactgtagtgatcctcactggctcacccgagaggacttcgttggcagtcaccgcgggtggagattctttctccgccgcttgccagagcgccgctctcctcgccatcggcactcttcaccagcgctacccggacgagctacagcactcgccctaccgctaccaccctcgtcgcggaggagcccgcgactacgccaccttccgggatgccagctcggaggatgacactaccatcatgcacctggcgcgcatggtggaggcgtacgacacggctcgtatcgacttccatcagatggtgcgccgtgggatggtcgaggacaacctgaagatcctggagctgcgtcaggagaatctgcagctgaagaaggacctagacgcagtggaggcgcagctgcatcagctcaagatcgcccaggaagaggtctgtcgccccaagcgtcgctgcgtctgccgcagccagaagatcaccgcccgcaagagcacctccaggcccgagcttgttcgtcagtccctggcgtggacttgcttcgtggagacccctcgtgccgagcccgcgcccgtggttcctcaggagggggaagcctccggcgtcagtagcacggaggatgcgctgttgctcaccttccgtcctggcccgtcgcagcggagaaatgctgccaccagtgatggcaaccaacctgaaggcagcaaccacaacaaccatggcagcccacctccacctcctccaccgcctccaccaccaccaccagacaccaacgccattctcacccaaatcctcgcccagcaggccaacatgatggctgctttcctccaccacatccaaaatccgccacaacataatgctccaccaccacccccacaacactctaaactcgccgagttcctacgcatccgtccacctaccttctctagctccaacaaccccgtggatgcgttggattggttgcatgccgtggggaaaaagttagacaccgtgcagtgcagcgatgaggagaaagtcatcttcgccgcccaccaactgcaggggcccgcatctctatggtgggaccatttccaggctacgcagccagtggggcaacctattacttgggcccgcttcaccgccgccttccggaggacccatgtgcccgccggagtcatggcccttaagaaaagggagttccgagagttgaagcaaggcaaccgctccgtgatggagtatttgcatgagttcaacaacctggcccagtacgccccggaggatgtacgggaagatgaggaaaagcaggagaagttcttggcaggaatggatcctgagctgtccgtctgtctagtctccggggactatccggatttccaacgtctggtggacaagagcatccgcttggaagccaagcacaaggaactggagtcgcacaagcgtcgcttggcgaattttcgcaaccaacagggtgctaaccaaaggatccgctacaccaatccctatccagggggatcttcctcgcagcagcagcaacctcgctccgcgcctcgacctcaattcgtggtgcgcgtcccacagccgcagcaacagcagagccagcaagggacccgtgcgccccgtcctcctacgccagccgcgcagtctggacaaggccgcagggacgttcaaggtccgcagcctctgtgcttcaactgcttcgagcccgggcactttgcggataaatgcccgaagccgaggcgccagcaaggccaagtgcctccccgctccaacaacggtggtaaggatgtcatttggggtcgtgtgaaccacgtgacggccgaggacgtgctgacaactccagacgtcatcgttggtacgttcctcatccattccatccctgctaccattttgttcgactctggagcttcccactcgtttatatctgtgccattcatggggagaaatcagttgggggtagaaaggcttaggaaccctctactcatcaccacccctggaggggttatgacagcaaacgtgtcaaggcagagcaccaacgaccggccggacttctccaacctctccaagtaccagaatggaaatgggatgaaattgggatggatttcatcaccggacttccaaaaacccaaggtagctcgatttattcctgtgaaggccacctatggagggaacaaactagctgagctctactttgctaggatcctccggtccgccgccgttgtcgccccggaccacctctcccctcggcgccacctccttcggcttcgccgcatccccggcgacctcgtccacccctccgtttcgctcgccgaccgccggagcaccgtcgaccccgtccacccgagccgcgccgccgccttcctccgctccggtcgccgtttccgtcttcgccgtcgacccggggtgagccgtggaccgccgcttcttttcccccttcccttcccctccctcggccgccgctccgccgtgcctatggacgccgccggcgaccataggggcgcgggcgcgccgcctcccgccgctgcgccggtgtggccgtcttcgggcgcaccgtgcggctgccgcgtggggcccggctgtcagccgcccgcgccctcgggtgcggctgacgcgtgggacccacggcgccggccggtgtga

SEQ ID NO: 14339 - DNA, 5856 bp, Oryza sativa
  Clone ID: TFbOSC419041j.C1.o8.fg
atgtcgggccaagcgggggatgggaacaatggtgataagggagctaagatcccttatgactatccctccacatctacatcttatgtgagtacctatagcggcaaagctccgtacttcaatggtacggactatgccgcttggaagcataagatgaagatgcatttgaagtctattaacccatctatttggagaatagtcgaaaaaggctatgttttgcagaatcccgaagatcccaccaaggaggacgacgagaacgagcacaagaacgctcaagccgctaatgcaatacttagcgccttgagtggaagtgagttcaaccgtgtggatggcattgagagtgccaaagtgatttggtacacgcttcggaacttgcatgaaggcacgtatagtgttcgtgagtccaaggtggagatcctcaaggggcaatttgagagatttgtgatgttagatggtgagagcccaagcgacatgtacgaccggttaagcaagatcgtcaatgaaatcaagggacttgactccaaggacatgaccgatgaggttgtggtcaagaagatggttcgagcaatcactccaaggaactctaccttggtgaccatcattcgtgagcgtccggactacaagactctcacacctcatgatttgctcggatgcatccttacccatgacatgctcgtgcaagagtctaaggatgtcatccaatacatcaaccaaagctcaaccgcaagcatcaagaatgaagacttggctttgaaggcaaaggaagaagaagaagagaaccgcaagagcaagagcaaggcggagatcaatgatgaagagatggctctcttcgtcaagaagttcggcaagttcatgaggcgaagcggcttcttcaagggaggatcttccaagcactactccaacaagtcaagtggaagacactccgcaaaagtgtgctacgtgtgcaaagcgcctggacacttcattgtggattgcccccacctcaaggatggttcccacatcaaggaagataagaagaagagtgagaagaaggatgagaagaaggagaagcacaagcatagcaagagggaacattatggccaagctcaccttgggatgatcttcggctccgactccgagtcaagctcaagtgatgaagaaggagtcgccacgtttgccgtcaagccttcatcaccaccgagactcttcgactactcaagtgatgaggatgctcccgtttgcctcatggcaaaggagcctaaggtaccttctcctcacaagtcatttaatgttgatcttgttagtgatgaggaggatgaggttatggatgacgaattgttcaagtccataactaaggaatccctaccacacttgagtgagttgcttgggagaattaaggaccaatatggaactcttgagaggcaagagagtttgctcattcgtaagaaagagcggtctcatgaactcaagagtgagcttgctaaagagagagagaaaaatgaggcattggtacgactttacaagcaaaccaaagagtctcatgctaatcttgaggtggcgaacgctcaacttcaagagagagtggatggcttggacaaagcatacctcactcttgaagagaagttcgaaaccttaaaaaatagtgtctctctccctagcgagccatcttgttccaaaattgtcccaagcaatgaaccatgtgtgagatgcaaagatattgatattgaagcttgtgctactaactctatttccttgagtgctttgcaaaagcaaaatgagaagcttatgggactccttcacaatggcctacttaagtgccatatgggtagtaaggccctaaaggagtacctagactatcaaagggacaacttcaaccatgagggtcttgggtatgttcctccaccaaaaggaaaggtggacaagagtgtgatgatcaagaggccccaaggtcttagcaattttgttaaggccaaaagtatcattcctaatgattatgcttcacattgttcttttgatgcatcttatgttcttaggaagaatgctagtggtcgtattgttgctaagtatgtaggcccaaggggcaagaatatttctatcaagagagtactttgggtgcctaaggcacttgttactaacatgagaggacccaagcaagaatatgtctccggtggaagaagttgggtgattgatagtggatgcacaaatcacatgactggagaagaatcaatgttttcaactcttgatccaaatggcacttcacaagataacatagttttcggggacaacggaaagggaaaggttatgggattgggtaacattgcaatatctaatgatctttccattgccaacgttctcttggtaaaatctctaaactacaatcttttgtctgtttctcaattatgttctatgggttacaattgtctttttaccgatgttgatgtgaccgtctatagaaggaatgattcctcggtagtctttaagggtgtcctcaagggaaagctttaccttgtggatttttcctcaagtaaagccaaacatgagacatgctttgtggctaagtccaacacggggtggctttggcatcggaggctagcccatgttggtatgaggaatcttcacaagcttctaaagcacgatcacatccttggactaacaaatattcaatttgagaaagatagggtgtgtagcacatgtcaagccggcaaacaaattggagcacatcaccccgtcaagaatgtgatgaccactacaagactattggagcttctccacatggacctcttcggaccaattgcttatctaagcattggaggtaacaaatatggtcttgttattgttgatgacttttcacgcttcacgtgggtgttctttttgcatgacaagagtgagacacaagctatcttcaagaagtttgcaagaagagcacaaaacgagttcgacctcaagatcaataaggctagatcctctaagttcgctcctaaagtggatgagggattcttgcttgggtatgggtcaaatgaatacgcataccgcgttttcaacaaaacctccggtattgttgagatcgcgcgtgatgtgacatttgacgaaactaatggctctcaagtagagcaagttgactcacatgtgttaggtgaagaagaggatccgagcgaagcaatcaaaagattggctcttggggacgtacgtcctagggagccacaacaaggagcctcttcctcaacacaagtggagccacctacatcaacccaagccgacgatccctctatctcaagcttggatcaaggtgaagaaggcgagcaagtgccaccctcaccgatcaacttagctcgcccaagaatccaccaaagtatccaaagagatcatcccaccaacaacatcttaggagacatcaacaagggagtatccactcgttctcgtattgcaaatttttgtgagtattactcgtttgtgtcttctcttgaacctctaagggtggaagaagctcttaatgatccggattgggtgatggcgatgcaagaggagttgaacaatttcacccggaatgaagtgtggactttggtggagcgacctcggcaaaatgtgattggcacaaagtggatcttccgcaacaaacaagacgaggccggggtcgtaataaggaacaaggcgaggttagtggcgcaagggttcacccaaatcgaaggattagatttcggtgaaacttttgcgccgcgccttcctcaacgggcctatcaacgagttggtatacgtggagcaaccaccgggcttcgacacgtgtacaagctccacaaggcactctatgggcttaagcaagcccctagagcttggtatgagtgtcttcgcaattttcttgtgaaaaacggctttgaaatcgggaaagccgattcaacccttttcactaaaagacatgataatgatatttttgtgtgccaaatatatgtcgatgacattatatttggttctactaacaagtcttttagtgaagagtttagtaggatgatgaccaaacgttttgagatgtccatgatgggtgaattgaagttcttcctcggccttcaaatcaagcaactcaaggaaggaactttcatttgccaaacaaagtatttgaaggacatgcttaagaagtttgggatggagaacgccaagccaatccacactcccatgccatcaaatggccacctcgacctcaacaagcaaggtaaagacgtcgatcaaaaggtataccgttccatcattggctcacttctttacctttgtgcatctaggcccgatattatgcttagtgtgtccatgtgtgcaagatttcaagccgctccgaaggagtgtcaccttgtggccgtgaagagaattcttagatatttagtgcacacacctaaccttggtctttggtatcctaagggagcgaggtttgatctcattggctatgccgatgcggattatgccgggtgcaaagtggataggaaaagcacatcgggtacttgccaattcttgggtaggatgcctccccgcaagcaaacctcccacaagtccaagcgcccgagggatcgctctcccactccatcctctcatgatgattcggacagtgattggtccggtggagaggatgcggttcctcaggttgcgcgggtggctcggcggtctactcaagctcatggtggtggtggtgatggtgagggctcctctcgtcaaccgcaaacgccgccgcaccaacccaatgtccccattgggcctctccgcattcatacccccgagagggatctggcggtgattcgccaagtgtatgattggcggcgcaagtctgaggttgttgctcctcgtcgggatgaggatccgcgctcccttcggcgcaccgccacggatccgcgtttttggaccctctttcagcaagacttttatgagtctgtgattaagtccaaagctcatcccactgttcccatgcaatggatcaattgggaggagttgcaggcacacaatgatccggtgattgactctgtgattgccaattgtgatctcatgggtatccgctccttcatgacgttgcaccaaaattggtgcaacgagctcaaccttgatgaccttcataatcttcaaattcctgccaacacagaatttcttcccctttacactccaaatgatccaaatgtggtgttgggcaaggtcgacggcctcaagccatactttgcctacttgaaccggatgtttcgccggtcttttgtgcctaaggatggtgatgctagcagcattaaccacctttctaggaccgtgcttctccggtttgatccccctcctcaccgcttccatgtctatcactttgtgtgggaggagattcgcatggcttcaattcagtacaagaaggggttggtctatgcccctcacattatgcggatgatcgagactgtgactcaactccagtttcgccatgatgtgactcattctcagcttcacttgcgccttcttaaggccccccgctcctcagctgctcgggacataccctcctcttccactcagccgcctcctgctcctgagcgccctgcctctgtggctcgtcgtgagccgtctcccttattccgcattttgcggagtctttttggtctttgctccgcgaaggccaaaaagaaccgccgattgcggaattcggcgaagaaaacggctcgtgatgtcaagttcctcaaggcaaggtattatgaggaccaccacattgatatccctccttctcctccgggtttcgaggccgagcccgatgagccagaggatgaagcgattgaggatccttttgctgggttgccttccgattttgacttctttggatatggccatggctatggctatcctcctccaccccctccagaggatcctcctcaggcgcccttcgcttga

SEQ ID NO: 14340 - DNA, 392 bp, Oryza sativa
  Clone ID: TFbOSC9385j.C1.o1.fg
atgactggtcaaaagagaaagctaaactctgatgagatcacgagtactggcaactctaagaccaaggttcaaaagacagggcccgctaaggatacagagtgcttcttttgcaaggagacaggtcactggaagaggaactgtaggaaatacctagagcacctcaagcagatgcagcaggatggaaagagttccaccttaggtattaatgttatagaaattaatcttgctacttcctctactgattcttgggtatttgatagcagtttttcaatgaaggacttaggggaagcagtatatattctgggcataaggatctatagagatagatcaaataggctaattggattaagccagagtacatacattgacaaggtgttgaagaggctcaacat

SEQ ID NO: 14341 - DNA, 2364 bp, Oryza sativa
  Clone ID: TFbOSC401185j.C1.o9.gm
atgggaattgttagtgtgttgatgggccttgggaatgaatgggcggtgcaagctctggtccttttcagcttcacgctgcaagtcaccctcctctcgcttgcttggatccgtcggcacagcatcgccaccatgccaaagctggtcctatgggtggcgtaccagctagccgactccaccgcgctcttcaccctaggccacatggccatcagcagcaggtcgagggaggagcagccgctcatggcgttctgggcaccgttcctcatcctacatctcggcggtcaggacaacatcaccgcctactccttcgaggacaaccggctgtggctgcgccacctgcagaccctcgtcgtgcaggtgatgggtgcttcgtatgttctctacaagtacatgcccggcaaggagaccctggtcatggcggccgccgtgctcatcttcgtggtgggcattctgaagtatggcgagaggatatgggccctccgggaagccaccttcgacaatatagccaggtgtttggaccagcaggaggattatgccagcgctcgcgaacgcgaaggcgacgatcttctccagcatgttctacaaggaaggagctctatggacgaggagaacgttctgattggagcacatggcctgctcgacatttgccgagggctgttcatcgggtcacgcggtgggaggcgcggctacctcaggcatgtcctgctgtccttccaaatgtatgtccgtcttgataagctgatggagttggagctgtccctcatgtatgacatcctctacaccaaggccaccgtgatccacacatggatcgggtgctgcatccgtgtcatcgcgcttgccgccacggtgaccgccacgttcctcttcctgctcagcagcaaacacgggcacagcaggaaagatctcgccgtgacatacgtcttgttggccggggccttgctcctggaaatgatatccatggtgagggcagtcttttccacctggacggtcgtcttcttgtacaagctgaaatggtattggctctatggcgaggttctctccatccgccgtgttttcaggagattggcgagaacaagaccggcaatcgggtctcaacctggcgtgcgcgcgttcaaagctctcggcctggacggcagcctcggctggaggaccatccaagacatcggcttcgaggatagtatcatggcgtggcatctcgccagtgacatctgcctcttcagtgaccgcagcaacaagctggatttgcacgagggggtggcggttctgtccaactacatgatgttcctcctcgtgcaccgccggtacatgctgccaggccccgtgcgtcgcacgcggtacgagcaggtgcgcgacgatctcaacaagtttatgcatcgaaagggccgcgctcgctcgccgcaggacttgttcgtgtgggctcttcgcaggggcctccatgatcatctcaactccgacgatcctccggcgcagtacgacaccggagtaagacttgccgccgtgctctaccaccggttggacaggcttgatatcatctttggggagctctgcctcttcctcactgcaccgcgcacagttcattgcatgcaagagccatgtcgcctccgacgccacacgtctcgcattcgccgcatcgtcaatcccgctcgcctcctccgcgccgtggtcgctgttggcctggcgccgcttgggacttgggaggacaggatggtgttggaggccgtcctcaaggcggtccccgctgatctgctgccggtgctcgctgtcaaggagatgacgaaagacgcctgggatgccatcaagacgatgcgcgtcggcgtcaaccgtgtccgcaagtcaaaagcgcaggagctgcgcaagcagttcgatgcgatcgagttcaaggaaggggagtccgtggaggaattctccatccggctgagctggctcgtcaacaactttgcgtactcgggatccagcttgaggaatcaagataccctgtcgcttgagcagctgacaggggtgaagaacagtggtccactcgtgccgaggaacaggcagtccggcgagggatcgtcgggcaagaagcaggcatcaaccaccgccgccgcggtgggcaagaaaaaaaccgagggcgctgccaatggcgagcggtgcgcgcgcgatcaattgcgcgacaagtgcaaaaactgtggtcgtctcggtcattgggagaaagactgtcgccagcccaagaaacaagccgaggcacacgccgtccagggtgaggaggaagatgacgagccggttttgctaatggctcacgctgttgagctggcgcaacctccaccatcgccaccaccaactgaaccgttcgacctcgttgagcccaaggtgttcacactgttatga

SEQ ID NO: 14342 - DNA, 4536 bp, Oryza sativa
  Clone ID: TFbOSC401709j.C1.o24.fg
atggtgaagacaaggaatgatccccgtgactccagcgacgccaggggcagcgaagagcagaccgatggagctcatgtcagtggtgcatctgacagcagttcatctccaccgctcgggaacccaacggtcactcaaatgatgacaatgatgatgcaacagatgcagcaacatcaccatcaggtgttgcaacaggtgcagcagaaccagcggtttgctcctccaccatcacacctgtccaaactgttagactttcttcgtatccagccacccactttctcaagcaccaccaacccaatggaggccaacgactggctccgtgttgttgagaagaagctgaaccttttgcaatgcaacgaccgagagaaggttgcttttgctacacatcaattgcaaggtcctgcttctgcctggtgggataactacgtggtgacccgtccagatgcaacgaaggttacttgggtagagttttgtcaaaactttaggaaggcacagattcctgaagggattatggcacaacagaagagggagttccgtgcattgcaacaaggaaccagaacggttacagagtacctgcacgagttcaaccgcctcgcgcactacgctcctgaggacgtgcgcaccgatgctgagaagcaggagaagtttttgtttgggctcgacgatgaattgaccaaccagctaatctccggagtctatgaggactttgagaagcttgtggacaaggctatccaccaggaagagcaacgcaacaaaatggaccgaaaaagaaaggcagctcagatcagctttcctcaggggaacaatcagaagcctcgcttcatgacgggacagctaggtgggccttccaccctgatcgtctgtcagcaccgtccctatcacccgagtaacttcaacaacgattacaacggtggcagtcacaacaacagtaagcagcacaaccacaactcgactccacccccactaatggcaccagctcagtcagatccgccagctgtgtcagctcagtcagaacaacccaagaagggggctgtaggaaagccaggaccctgcttcaactgtggcaagcacggccactttgctagcaagtgttcgaagctgaatcgcactagacccaggttcatccaggcccgcgccaatcatgtgtctgcagaggaagcacaggcagcatcagatgtcgtgctgggcacgtttccagtgaactcatatccagcaacagttctttttgattcgggtgcctcgcattctttcatttccaagagatttgctgggacacatggattatcggtaatggaacttaaaataccgatgcaggttcatacctctggaaatgacatgaagacatcacactattgcccctcagtgactatagagatcaagaggtcacaatttctatccaacctcatccttctcgaatccaaagacctggatgtcattctcggaatggattggttgaccagacacaagggggtgattgactgcgcaggccgcaccatcaccctaaccaacgacaaaggggagaagatcaccttccgttctccagtgtcacagaagtccgtagcgagtctgaatcaggctgctattgagggtcagacagaaacagtggagaaaagtcccaggaagttggaggatattcctatagtacaagaatatcctgaggtatttcctgaagacctcactacaatgccaccgaagagagaaatcgagttccgaattgatctggcacccggaactgctccaatttacaagaggccgtacagaatggcagctaatgagctagcagaggtcaaaaagcaagttgatgaacagctgcagaaagggtacattcgaccgagtacttcaccttggggtgctccggttatctttgtggagaagaaagacaagactaagaggatgtgcgttgattatcgggcccttaatgaggtcacaatcaagaacaaatatccgttgccaagaattgatgacctgtttgatcagctaaaaggagctaaggtgttttccaagatagacctgcgattaggctatcatcagttgagaattcgggaagaggatattcccaagacagccttcatcactcggtatgggttgtttgagtgcacggttatgtcatttggactcaccaatgcaccggctttcttcatgaacttgatgaacaaagtgtttatggagtttcttgacaagtttgtcgtggtattcattgacgacatacttgtgtattcaaaatcagaagaggaacatgagcatcatcttcgtctggtactcgagaaattgaaggagcaccagttatatgccaagtttagcaagtgtgacttctggttatcggaggtcaaatttctgggtcacgtcatttctgctcaaggcgtggcagtggatccatcaaatgtggaatcagttacaaagtggaccccaccaaagacagtttctcaaatccggagttttcttggacttgcgggctattaccgtcggttcatcgaaaatttctccaagattgccaggcccatgacacagttgctaaagaaagatgaaaaattcaagtggtcagctgagtgcaaccaaagttttgaagaactcaagaagaggttagtctctgcaccagttctaattttgccagatcagacaaaagacttccaagtctactgtgatgcatctcgccaagggttgggatgtgtgttgatgcaagaaggcagagtggtcgcatacgcttcgcgacagttgcgtccacaagagaccaattaccccactcatgaccttgagttggcagcagtggttcatgctctgaaaatctggcggcactatcttattggcaaccgctgtgaagtatacactgatcacaagagtctgaagtacatcttcactcagcctgacttgaatctccgacagcgaagatggctggagttaattaaagattatgacatggggatacattatcatccaggcaaagcaaatgtggtagcagatgctttgagcaggaaaagctattgcaatgccttatgcactgaagacatgtgtggcaaattgcagcaagatcttgagcacctaaatttgggcatcgtggaacacgggtacgtagctgccctagaggcacggcctacgctcgtggatcaagtcagagcagctcaagtaaatgatcctgaaatagctgagctgaaaaagaatatgagggttggaaaagctcgagatttccatgaggatgagcatggcacaatctggttgggagaaagattgtgtgtgcctgacgacaaagaactgaaggatctcatactcacagaagctcatcaaactcagtattcaattcatcccggcagtactaaaatgtaccaggacctcaaagagaaattctggtgggtcagcatgagaagagagatagccgaattcgtcgcactttgcgatgtttgtcagcgagtcaaagcagaacatcagaggcccgcaggactgctacaaccccttcagatcccggaatggaaatgggaagaaatcggaatggatttcataacaggtttgcccaggacatcgtcggggcacgattcaatctgggtggtcgtggatcgactcaccaaagttgctcatttcattccagtacacactacctatactggaaaaaggttggcagagctttatctttcaagaatcatgtgtttgcatggggtacctaagaagattgtatctgatcgaggaagtcaattcacttcaaagttctggcagaaactgcaagaagaattggggactcgtttgaatttcagcacggcttatcatccgcaaacagatggtcagaccgagcgagtaaatcaaatcttggaagatatgttgagagcttgtgcacttgactttggtggagcctgggataaaagtctaccgtatgcggaattctcttacaacaacagctatcagtccagtttgcaaatggcaccgtttgaagcattgtacggacgaaagtgctgcacaccacttttctgggatcaaacaggtgagcgccaactgtttgggacagaagtgttaaccgaagcagaggagaaagtcaggaccgtcagggaaagactgcgaatcgcccagtctcggcagaagagttatgctgataaccgccgaagagagcttactttcgaagcaggggattatgtgtaccttcgtgtcactccgctccggggagtacaccggttccagacgaaaggcaaattggcaccacgctttgtgggaccatacaggattttggaacgcagaggtgaagtcgcttaccagctagagcttccatctaatatggttggtatccacgatgtgtttcatgtatctcaattgaagaagtgtttgagggtacctaaggaacaagctagctcagagcacattgacatccaggaagatctgacttatgtggagaagccgattcgtatcctcgagaccagtgagagaaggaccagaaacaaggtgatcaggttttgcaaagttcagtggagccaccactcggaagaagaggccacctgggaaagagccgctcatccgcacctctttgccaactcttccgaatctcggggtcgagattccgtttaa

SEQ ID NO: 14343 - DNA, 7149 bp, Oryza sativa
  Clone ID: TFbOSC900175j.C1.o19.gm
atggagtataaggcgggcccgcccgccaccctcgctgacgggtggggcccacctgtcatcgcctacctcgcgccgcgcccgccgcccgcccgtgccctagggccgccgccgccgccgccgaatccgccgcatcccgccgtccccgcgcgccataaagagggggaaatcactccccgtgattccctctcccttttcccccgtttttccctctctctctccctcggattcgtttggaatctctcccgcaatcctcgccggcgcaatcaatggcggccggatcctccgcgccggtttccatctcctccggccgccctctctcactcccgacgctatataatcgctcctcgtgcttcgctcctccgtttccgccactcgccgcacactctccccgtcggattcgtgcccgcgccgtcttcctctctctccgccgtcgccgccgagctccggttcgccgccgtcgtcgctccggacctcctcccgactcggcgtcacctccttcggcttcgccgcgttcccgtcgacctcgtccaccccttcgtttcgcccgccgactgtcggagcgccgccgtcctcgtcgatccgaaccgcgccgccgccttcctccgctccggttgtcgtttccgccgtcctcgtcgtcccggggtgagccatggaccgcctccttcgcttcccccttccctcccctctctcggccgccgctccgccgcgccgttggtcgccggcggcgaccatcggggcgcgggtgcgccgcctcccgtcggccgtgccggcgaggccgccttcgggcgcgccccgcggctgccaggtgggcccggccgtcagccgcccgcgcccgcgggtgcggctgacgcgtgggacccacggcgccggtcggcgtcagccgcgtgcacccggtccaccgtggaccgagaggctgacgcgtgggccccactcccgtggacccggctgggctcggggtgcatggttttgatggtagcacctcggccatataaggaccggtcttcgggcctctgttgcaaagcactaccgtacttccacatgtctagtggggcaaatgaaggctacacgagctgcggcccggtagtcgagatgtcatggcacagggccggtgtcctgctgctaggggctcagtcctgcctgcctgtcccgggtgttccggccgtaggcgggattgggtcgatggccggcagcgtcacccgtcgtggtttgggcatgactggcttcgtcttggagttgcggggcatgtgcgtggccctggggtatccacacggagtggactaccaggccaggccgcttccggagcaggagggtgacgatgcggagccccgcgctgcttgggaggtcactgcagtgatcctcgctggctcttctgagcggacttcgctgacagtcaccgcgggtggcgattccttccccgccgcttgccagagcgccgctctcctcgccatcggcactctccaccagcgctacccggacgagttgcagcactcgccctaccgctaccacccccgccgcggaggagcccgcgactacgccaccttccgggatgctagctcggaggatgacgctaccatcgtgcacctggcgcgcatggtggaggcgtacgacgcggctcgtatcgacttccatcagatggtgcgccgtgggatggtcgagaacaacatgaagatcctggagctgcgtcaggagaacctgcagctcaagaaggacctggacgcggtggaggcgcagctgcatcagctcaagatcgcccagggagaggtctgccgccccaagcgtcgccgcgtctgccgcagccagaagatcaccgcccgcaagagcacctccaggcccgagcttgttcgtcagtccctggcgtggacttgcttcgtcgagacccctcgtgccgagcccgcgcccgtggttccccaggagggggaagcctccggcgttggtagcacggaggctctctctgttgctggttctgtgtggggttttcagatggtgacgaccaggagaaatgctgttaccggtgatggcaaccaacccgaaggcagcaaccacaaccaccagggcaacccacctccacctccacctccgcctccaccaccaccaccagacaccaacgccattctcacccaaatcctcgcccagcaagccaacatgatgactgctttcctccaccacctccaaaatccgccacaacataatgctccaccaccacccccacaacactctaaactcgctgagttcctccgcatccgcccacctaccttctctagctccaacaaccccgtggatgcgttggattggttgcatgccgtgggaaaaaagttagacactgtgcagtgcagcgatgaggagaaagtcatcttcgccgcccaccaactgcagggacccgcatctctctggtgggaccacttccaggctacgcagccagaggggcaacctatcacttgggcccgcttcaccgccgcttttcggagaacccatgtgcccgccggagtcgtggcccttaagaaaagggaattccgagagttgaagcaaggcaaccgctccgtgatggagtatttgcatgagttcaacaatctggcccgttacgccccggaggatgtgcgggaagatgaggagaagcaagaaaagttcttggcaggaatggaccccgagttgtccgtccgtctagtctctggggactatccggattttcaacgactggtggacaagagcatccgcttggaagctaagcacaaggagctggagtcgcacaagcgccgcttggcgaatttccgcaatcaacagggtgctaaccaaagggtccgctacaccaatccctatccagggggatcctcctcgcagcagcaacaacagcagcagcaacctcgctccgcgcctcgacctcaattcgtggtgcgcgtcccacagccgcagcagcagcagggtcagcaggggactcgtgcgccccgtcctcctacgccaactgtgcagcctggtcaaggccgcagggacgctcaaggtcagcagcgtctgtgcttcaactgcttcgagcccgggcactatgcggataaatgcccgaagccaaggcgtcagcaaggccaagcgcctccccgctccaacaacggtgggaaggatgtcattcggggtcgtgtgaatcacgtgacggccaaggacgtgctgacaactccggacgtcatcgttggtacgttcctcgttcattccatccctgctaccattttgttcgactctggagcttcccactcgtttatatctgtgccattcgtggggagaaatcagttgggggtagaaaggcttagaaaccctctgctcatcaccacccctggaggggttatgacagcaaagtactatagccctgccgtccctatagaaattcaggggattccttttccctcggatctgattctgctagacaccaagaatttggatataggactgtcagaaatccccatcgtcagggagttcggagatgtgtttccggaagaactacccgagaagaaagacaagacgaagaggatgtgcgtcgactacagagctctcaatgaagtcaccataaaaaacaagtaccctcttccccggatcgatgatctgttcgatcagcttaaaggtgccactgtattctctaagatcgatctccattccggatatcaccaattacgtattcgtgaagaagatattccaaagaccgcattcaccacgcgatacgggctgtatgaattcacggtgatgtcgttcggtttgaccaatgcacctgccttcttcatgaacttaatgaacaaagtgttcatggaatacttggataagtttgttgtggttttcattgatgacattctaatatactcacaatcagaggaagaccatcagcaccatctccgtctggtgttgggaaagttgcgggaacatcaattgtatgccaaacttagcaagcgtgagttctggttgtccgaagtcaaattcttagggcacgtgatatctgctaaaggtgttgctgtggaccccgaaacagtgaccgccgtcaccgattggaagcaacccaagacagttactcaagtccgcagtttcttaggtttggcaggatactaccggagattcatcgagaacttctccaaaatcgctcgacccatgacacagttgttgaagaaagaagagaaatttgtgtggagcccgcaatgcgagaaggcgtttcaaactctcaaggaaaagctggtttcctcgccggtgttaatcttgccggatactcgcaaggacttcatggtgtattgtgacgcttcgcgccaaggattggggtgcgtgctcatgcaggacggtcatgtggtagcctatgcctcccgtcagctacgacctcatgaaggcaactaccctacccatgatttggagttagcagcggtgattcatgatctaaaaatctggcggcactatctcattgggaatcgctgtgaaatatatactgatcataagagtttgaaatacatcttcacccagtcagatctgaatcttcggcaaaggagatggttagaactcatcaaggattatgatgtgggaattcactatcatcctggtaaggccaacgtggttgccgacgctttaagtcgaaagagccattgcaacactcttaacgtccgtggcatcccacccgaacttaatcaacagatggaagccctgaacctaagcatagttagtcgtggatttttggccgcgttagaagccaagcccaccttgctcgatcaaatccgcgaggctcagaagaacgacccggacatgcatggactcctcaagaatatgaaacagggtaaagccgctggtttcacagaagaggaacacggaaccctatggaacggaaaccgggagaaatactggtgggttagtatgaagcgggaaattgcagagttcgtggccctttgtgatgtgtgccagcgtgtcaaggcagagcaccaacgaccggccggacttctccaacctctccaagtaccagaatggaaatgggatgaaattgggatggatttcatcaccggacttccaaaaacccaaggcggatatgattctatatgggtagttgtggatcgattaaccaaggtagctcgatttattcctgtgaagaccacctatggagggaacaagctagccgagctctacttcgctaggatcgtgagtctccatggcgttcccaagaaaatcgtatctgataggggaagccaattcacctctcacttttggaagaaactccaagaagagctgggtacccgattaaacttcagcaccgcctatcacccgcagacagatggacagaccgagcgtctaaatcagatcctagaagatatgctccgcgcatgtgtcctagatttcgggaagacctgggataagagtctcccctatgccgagttctcctacaataacagctatcaagccagcatacaaatggcaccttatgaagcgttgtatgggcgcaaatgccggacaccactattgtgggaccaagttggagaaagccaagtgttcgggactgatatcctgagagaagctgaagctaaagtcagaatcattcgggaaaatctaaaggtggcacagtcccggcagaaaagttatgcagataaccgtcgccgcgacctggaattcgcagtggatgactttgtgtatcttcgggtcacgccattgcgaggtgtacacaggtttcagacaaaagggaagctcgcacctcggtatgtgggtcctttccgtatcattgctcggcgcggagaagtcgcttaccagttggagctgcccgcctccttgggcaacgtgcatgatgtgtttcatgtgtcgcaactcaagaaatgtcttcgagtgccatccgagcaggccgactcagagcaaattgaagttcgcgaagatttgacctacgtggagaggccagtgaaaatcctggacaccatggagcgcaggaccaggaaccgggcgggcccgcccgccaccctcgctgacgggtggggcccacctgtcatcgcctacctcgcgccgcgcccgccgcccgcccgtgccctagcgccgccgccgccgccgccgaatccgccgcatcccgccgtccccgtgcgccataaagagggggaaatcactccccgtgattccctctcccttttcccccgtttttccctctctctctccctcggattcgtttggaatctctcccgcaatcctcgccggcgcaatcaatggcggccggatcctccgcgccggtttccatctcctccggccgccctctctcactcccgacgctatataatcgctcctcgtgcttcgctcctccgtttccgccactcgccgcacactctccccgtcggattcgtgcccgcgccgtcttcctctctctccgccgtcgccgccgagctccggttcgccgccgtcgtcgctccggacctcctcccgactcggcgtcacctccttcggcttcgccgcgttcccgtcgacctcgtccaccccttcgtttcgcccgccgactgtcggagcgccgccgtcctcgtcgatccgaaccgcgccgccgccttcctccgctccggttgtcgtttccgccgtcctcgtcgtcccggggtgagccatggaccgcctccttcgcttcccccttccctcccctctctcggccgccgctccgccgcgccgttggtcgccggcggcgaccatcggggcgcgggtgcgccgcctcccgtcggccgtgccggcgaggccgccttcgggcgcgccccgcggctgccaggtgggcccggccgtcagccgcccgcgcccgcgggtgcggctgacgcgtgggacccacggcgccggtcggcgtcagccgcgtgcacccggtccaccgtggaccgagaggctgacgcgtgggccccactcccgtggacccggctgggctcggggtgcatggttttgatggtagcacctcggccatataaggaccggtcttcgggcctctgttgcaaagcactaccgtacttccacatgtctagtggggcaaatgaaggctacacgagctgcggcccggtagtcgagatgtcatggcacagggccggtgtcctgctgctaggggctcagtcctgcctgcctgtcccgggtgttccggccgtaggcgggattggtcttgctcaatttttcccaagcccagaagaggagctccttgaagatgaaggctttggtgtctag

SEQ ID NO: 14344 - DNA, 2203 bp, Oryza sativa
  Clone ID: TFbOSC15176j.C1.o1.np
atgccgcgctacaagcctgagtacctgtttggtgttgagggttttgtccaggagttgcgtacgatgtcctttgtcataggatttgggactgcccctttttatgctcagattcctcatgatcgtcatgaagagaagtgccgagtcaaagtcaccttgaatagtaatagtgaagatgtcccctcagtgatgttcgaagctggaggaagaaactacatccatgcatgtcaggaagtggcaaggatcgccataggagagctccgtgatcgctacagtgatcggttggctgacactgagtatcgctaccatcctcgtcaaccacagggaagtgaccgtggcagctaccttgagactgaaggaattgagaatgatgctaccacaaggcatttagttgagatgctgtgggctatggatgaaagccgtgcagagactgtgttagcggctcaagatcgtgaagattggaatcgtggtaagatttgcaagttagaagacaaggtggatcgtttggagaaggaactagccgcgttgaagggagaagcaccaccgcagaaggccaggattcgtcttaccgcaaggaagagagctctatttgtccctcgctatcaattggcgccaaaagttcgtgtggtggagaaagaagttgccccagcagatcctccggtcatcatcataagtgatgatgaagaagaagaatccaagcgcacccattccaagattgagtgggtagcaactcaagatgatgaagacgagccgaacgagcctacaatcgacctccgatgctcggaagaactagacaacgggaatggccccaacagcaacaataacaacaacaatggagagaacccaacacttgctcaagttcttgctcaacagactcagttaatgaacatgatgatgcagcaacttcagaatcagcaaaaccaaggaaataaccatgcacctccccagaacaagttagcagaatttcttcgtgtgaggccgcctattttctctagtaccactaatcctgttgaagctggtgattggttgcatgccatagagaagaagatggatttgcttcagtgcactgatcaggagaaggtctcatttgcatcacatcagttgcttggccctgcctctgaatggtgggatcacttccgcctgaataggattactgctgaacctattacttggcttgaattcaccgctgctttccggaagacgcatataccatcgggagtggtgtctctcaagaagaaggagttcaggtcgctcacccagggatctcgctctgttacggagtatctgcacgagttcaatcgtcttgctcgttatgctccggaagatctgcgcaatgatgaagagcgccaggagaagtttttgggaggacttaatgatgagctttcttacccactcatggttggagattatcctgatttccagaaattagtggataaggctatacgtcaggaggacaagtacaatcgcatggagcagaagaaacgccggattgctcacttcaaggcacaacaggggagtaatcagaagccgcgtcttactttaggaccccagtctgtgccacagggaggttcttcgtccattgttcgtccgcagcgtcagttcttcaacaacaatgctggcaacaacatccgtaatcaagtcccacgtcctgttgctgcctcgacacagcaacaacctgccaagaggaagcaaggcagcaagcccgtggtgtgtttcaactatggagacccaggacattatgctgacaagtgtccgaagccccgacgcgtgaaggttgtccctgcccagaataactctgctgtaccagcatcaaaggcccgtgtcaatcatgttgctgctgcagaagctcaagatgctccagatgtgattttgggtacgttccctgttaactcagttcctgcaactgtgcttttcgattctagtgctacacattcattcttatctatgagttttgcgggaaatcatgggatggaagtagaagatcttagacgtcctttgatggttagtaccccaagtaatcaagcactctctctgcaacgtagcccctctgtcagaatagaaattcaaggggtaccatttctagccaatcttatcttgttagaatctaaagaccttgacgtcattctagggatggactggttagccaaacataaaggtgtgatagactgtgccaacagaaaagtaactctcatcagcaatgatggtc

SEQ ID NO: 14345 - DNA, 4182 bp, Oryza sativa
  Clone ID: TFbOSC16841j.C1.o2.fg
atggtgctcactcgcagcaacgggaatggccccaacagcaacaataacaacaacaatggagagaacccaacacttgctcaagttcttgctctgcagactcagttaatgaacatgatgatgcaccaacttcagaatcagcaaaaccaaggaaataaccatgcacctccccagaacaagttagcagaatttcttcgtgtgaggccgcctattttctctagtaccactaatcctgttgaagctggtgattggttgcatgccatagagaagaagatggatttgcttcagtgcactgatcaggagaaggtctcatttgcatcacatcagttgcttggccctgcctctgaatggtgggatcacttccgcctgaataggattactgctgaacctattacttggcttgaattcaccgctgctttccggaagacgcatataccatcgggagtggtgtctctcaagaagaaggagttcaggtcgctcacccagggatctcgctctgttacggagtatctgcacgagttcaatcgtcttgctcgttatgctccggaagatctgcgcaatgatgaagagcgccaggagaagtttttgggaggacttaatgatgagctttcttacccactcatggttggagattatcctgatttccagaaattagtggataaggctatacgtcaggaggacaagtacaatcgcatggagcagaagaaacgccggattgctcacttcaaggcacaacaggggagtaatcagaagccgcgtcttactttaggaccccagtctgtgccacagggaggttcttcgtccattgttcgtccgcagcgtcagttcttcaacaacaatgctggcaacaacatccgtaatcaagtcccacgtcctgttgctgcctcgacacagcaacaacctgccaagaggaagcaaggcagcaagcccgtggtgtgtttcaactatggagacccaggacattatgctgacaagtgtccgaagccccgacgcgtgaaggttgtccctgcccagaataactctgctgtaccagcatcaaaggcccgtgtcaatcatgttgctgctgcagaagctcaagatgctccagatgtgattttgggtacgttccctgttaactcagttcctgcaactgtgcttttcgattctagtgctacacattcattcttatctatgagttttgcgggaaatcatgggatggaagtagaagatcttagacgtcctttgatggttagtaccccaagtaatcaagcactctctctgcaacgtagcccctctgtcagaatagaaattcaaggggtaccatttctagccaatcttatcttgttagaatctaaagaccttgacgtcattctagggatggactggttagccaaacataaaggtgtgatagactgtgccaacagaaaagtaactctcatcagcaatgatggtcgagttgtaactgttcatgcattgtcatctgagtttttaaggtcaagactgaaccagataactttgggagagattcctatagttcgggagtatcccgatgtgttcccagatgatttacctggtatgccgcctaaaagggatatagagttcagaatagatttggtacctggaacaactccgatccataagagaccttatagaatggcagccaatgagttggcagaagtcaaaaggcaagtagatgatttgcttcagaagggatacatcagaccgagttcatcaccatggggagctccagttatttttgtggaaaaaaaagaccatacccagaggatgtgtgtggactatcgtgcactaaatgatgtgactatcaagaataagtatccgctacccagaattgatgatttgtttaatcagcttaaaggtgccactgttttctccaagatagatcttcgatcagggtatcaccagttgagaatcaaagagtatgggttgttcgaatgtacggttatgtcttttggacttaccaatgctcctgctttcttcatgaacttgatgaataaagtatttatggaatacctagacaagttcgtggtggtctttattgatgacattcttatctactcccgaaccaaagaagagcatgaagaacatcttcgccttgcattggagaagctacgagagcatcaactgtatgctaagtttagcaagtgtgaattttggttgtctgaagtgaaattccttggtcacgtcatctcagccggaggagttgccgtcgatcctagtaacgtggaatccgtaaccaattggaagcaaccaaagacagtttcagagattcacagttttctaggcctcgcaggatattatcgaaggtttatagagaatttttccaagattgctaagcccatgacacgcctgcttcagaaatatgtgaagtacaagtggtcggaagaatgtgagcagagttttcaagagttgaaaagtcgtttaatatcagctcctattttgattttgcctgatccaaagaagggtttccaagtgtattgcgatgcatctaaacttgggttaggttgtgttctgatgcaagatgggaaggtggttgcctatgcatctcgtcagttacgtccgcatgaaaagaactaccctactcatgatcttgaattggccgcagtagttcatgcgttgaaaatttggcatcattatcttttcggtactcgtacagaggaatttgaaagattaaatttgggaattgtcagtagaggttttgttgcagccttagaagcgaagcccacactaattgatcaagttagagaagctcaaattagtgatcctgatattcaagagatcaagaagaatatgagaagaggaaaagctatcggtttcttggaggatgagcaaggaactgtatggttgggcgagagaatttgtgtccctgacaacaaagatttaaaggatgcaattctgaaagaagctcatgatactttatactccattcaccctggtagtactaagatgtaccaggatctcaaggaaagattttggtgggcaagtatgaagcgtgaaatcgcagaatacgtagcggtatgtgatatttgccagcgagtcaaggcagaacatcagaaacctgccggtttgttgcagcctttgaagattcctgaatggaaatgggaagaaatcggtatggattttatcactggtttacccagaacgtcatcaggccatgactctatttgggtaatagtcgacagacttaccaaagtggcacatttcatcccggtaaagacaacttattccggaagtcggttggcagaattatatatggcaaggattgtgtgtttgcatggtgtccctaagaaaatagtgtctgatcgaggcagtcagtttacttcaaatttctggaagaaacttcaggaagaaatgggttctaagctgaactttagtactgcttatcatccacagacagacggacaaaccgaaagggtgaatcagattttggaagacatgttgagagcttgtgctttagatttcggtggaagttgggataagaatctaccttatgcagaattctcgtataacaacagttatcaagctagtcttcagatggctccttacgaagcactgtatggtcggaagtgtcgcactccgcttttgtgggatcaaacgggagaacgtcaggttttcgggacggatatcttaagagaagcagaagaaaaggtaaagatcattcaagaaagattgcgtgtggctcagtctcgtcataagagttatgccgacaatcgccgtagagatttgagttttgaagaaggagattatgtgtatcttcgtgtcacgcctcttcgaggagttcatcgttttcacaccaaaggaaaattggcaccgcgttttgtgggaccttataagattgtcagtagaagaggagaggttgcttatcagttagaattacctcaatctttggcaggagtctataatgtgttccatgtgtcacaattgaaaaagtgtttaagggtacctaccgaagaagctaatattgagcagatagaagtccaagaggatttgacctatgttgagaaaccaatccgtatcttggaaacaaatgagagaagaaccaggaatcgagttatccgtttttgcaaagtccagtggagtaatcactcggaagaagaatcaacttgggaacgagaagatgaattgaagtcagctcatccgcatctgttcgccagttcttccgaatctcgaggacgagattctgtttaa

SEQ ID NO: 14346 - DNA, 1790 bp, Oryza sativa
  Clone ID: TFbOSC32899j.C1.o2.gm
atggtgctcactcgcagcaacgggaatggccccaacagcaacaataacaacaacaatggagagaacccaacacttgctcaagttcttgctcaacagactcagttaatgaacatgatgatgcagcaacttcagaatcagcaaaaccaaggaaataaccatgcacctccccagaacaagttagcagaatttcttcgtgtgaggccgcctattttctctagtaccactaatcctgttgaagctggtgattggttgcatgccatagagaagaagatggatttgcttcagtgcactgatcaggagaaggtctcatttgcatcacatcagttgcttggccctgcctctgaatggtgggatcacttccgcctgaataggattactgctgaacctattacttggcttgaattcaccgctgctttccggaagacgcatataccatcgggagtggtgtctctcaagaagaaggagttcaggtcgctcacccagggatctcgctctgttacggagtatctgcacgagttcaatcgtcttgctcgttatgctccggaagatctgcgcaatgatgaagagcgccaggagaagtttttgggaggacttaatgatgagctttcttacccactcatggttggagattatcctgatttccagaaattagtggataaggctatacgtcaggaggacaagtacaatcgcatggagcagaagaaacgccggattgctcacttcaaggcacaacaggggagtaatcagaagccgcgtcttactttaggaccccagtctgtgccacagggaggttcttcgtccattgttcgtccgcagcgtcagttcttcaacaacaatgctggcaacaacatccgtaatcaagtcccacgtcctgttgctgcctcgacacagcaacaacctgccaagaggaagcaaggcagcaagcccgtggtgtgtttcaactatggagacccaggacattatgctgacaagtgtccgaagccccgacgcgtgaaggttgtccctgcccagaataactctgctgtaccagcatcaaaggcccgtgtcaatcatgttgctgctgcagaagctcaagatgctccagatgtgattttggaccttgacgtcattctagggatggactggtcaagactgaaccagataactttgggagagattcctatagttcgggagtatcccgatgtgttcccagatgatttacctggatattatcgaaggtttatagagaatttttccaagattgctaagcccatgacacgcctgcttcagaaatatgtgaagtacaagtggtcggaagaatccttagaagcgaagcccacactaattgatcaagttagagaagctcaaattagtgatcctgatattcaagagatcaagaagaatatgagaagaggaaaagctatcggtttcttggaggatgagcaaggaactgtatggttgggcgagagaatttgtgtccctgacaacaaagatttaaaggatgcaattctgaaagaagctcatgatactttatactccattcaccctggtagtactaagatgtaccaggatctcaaggaaagattttggtgggcaagtatgaagcgtgaaatcgcagaatacgtagcgccgtcgccgtcgctcgggaagaccaccgtcgtgctcgccaagtcgtcgccgtcctcgtccgcctcttcgctgtcgccggagatcaccggagcagcatcgccgtcgtcgacccgaaggttcccgccgcttcctcctcgtcgccgtcaccgtccgttggtcttccgccaccgtttaggtcaccg

SEQ ID NO: 14347 - DNA, 4002 bp, Oryza sativa
  Clone ID: TFbOSC400415j.C1.o9.fg
atgtcgaacgaggtgaaccatgtagggaaggctcccatgtttaatggcacaaactactccacttggaaaattaaaatgtctactcacctcaaagctatgagcttccatatttggagtattgtggatgtaggctttgccatcaccggcacacccttgacggagattgatcaccacaacctccaactcaatgcccaagccatgaatgccttgttcaactctttgagccaagaggagttcgatagagtgagcaaccttgagaccgcatatgagatttggaacaagttggcggagatccatgagggtacaagtgagtacaaggatgccaagcttcatttcctcaagatccaatatgagacattctccatgttgcctcatgagagtgtgaatgacatgtatgggaggctcaatgtcattgtgaatgatctcaagcggcttggggcaaactacaccgatcttgaggttgcccaaaagatgcttagagccctaccggagaagtatgagacccttgtcaccatgctcatcaactccgacatgtcaagaatgacacccgcaagcctcttggggaagatcaacaccaatgacatgtacaagttgaagaagaaggagatggaggaagcctcaccctccaagaagtgcattgctctccaagccgaagttgaagacaagagcaagagcaaggtgaatgaagtcaatgaggacttggaggaagagatggtccttcttgctagaaggttcaatgatctcttgggaaggagaaaggagagaggaaggggctccaactccaataggagaagaaatagaagacccaacaagactctctccaacttgaggtgttttgagtgtggtgaaaagggacactttgcttccaagtgcccttccaaggatgatgatggagacaagtcatccaagaagaagagtggaggctacaagctcatgaagaagcttaagaaggaagggaagaagattgaggccttcatcggggaatgggactcaaatgaggagagctccgcctcatccgggtccaaggaagaaggtggtgatgatgcaagctccaagaagaagaagatggccgttgttgccatcaaggaggctccatcactcttcgctccactttgtctcatggcaaagggctcctctaaggtaacatctcttagtgatagtgagagtgatgatgattgtgatgatgtttcctatgatgagcttgtgagtatgtttgaggagctccatgcttatagtgagaaggagattgtcaagttcaaggccctaaagaaggatcatgcttctttggaggtcttgtatgaggagctaaagacctctcatgagagactcaccatttctcatgagaagcttaaggaagctcatgacaacctcctttccactactcaacatggagctcacattgatgttggcatatcttgtgatttgcttgatgatagtgctacttgccatattgctcatgttgcatcatctagcatttctacctcttgtgatgatcttatggatatgcctagccctagctctagctctagctcttgtgtttctatttgtgatgcctcacttattgttgagaacaatgagcttaaggagcaactggctaagctcaacaagagtttggagagatgcttcaagggtaagaacactcttgacaagattttgagtgagcaacggtgcatccttaacaaggagggacttggattcattccaaagaagggtaagaaaccttctcaccatgccactcgttttgtcaagagcaatggtaagtattgctccaagtgtcgtgaggttgggcatttggtgaactaccgcaccggtgggagccattggatgcttgatagtggatgcactcaacacatgaccggtgatagggctatgttcaccacatttgaagtaggagggaatgaacaagagaaagtgacatttggagacaatagcaaaggaaagtctattgttgccgagcttttcaaaaaatttgcaaaaagggcccaaaatgaatttagttgcactcttgtgaaaattagaaatgacaatggttccgaatttaagaataccaatatcgaggactattgtgatgatcttggtatcaaacacgaactttccgctacctactcacctcaacaaaatggtgtagtggaaaggaaaaatcgtacattgattgagatggcaaggactatgctagatgaatatggtgtttctgattccttttgggcggaagccataaacaccgcttgccatgcaaccaataggctttatttgcatcgtctcttgaaaaagacttcctatgagctaattgttgggaggaagccaaatgttgcctattttcgagtttttggttgcaagtgttatatttaccgaaagggtgttagactaaccaaatttgaaagtcggtgtgatgaagggtttcttctaggttatgcctcaaatagcaaggcctaccgggtctacaacaagaacaaaggtattgtgaaagaaaccgccgatgttcaatttgatgagactaatggctcccaagaggagcacgagaatttggatgatgtaggtgatgaaggcttgatgggagctatgaaaaacatgtctattggagatgtcaagcctattgaaatggaagacaagccatccacctccactcaagatgagccatctacttccgcttcgccaaatgaagctctttgtgatccggattggatgaatgctatgcatgaagagctcaacaactttgcaagaaacaaggtgtggactttggttgaaagacctagagaccacaatgtcatagggacaaagtggatctttaggaacaaacaagatgagaacggattggtggtgagaaacaaggcaaggttggtggcgcaaggtttcacacaagttgaagatcctaaaaatcctaaccatgtttacaaactctcaaaagctctttatggtttaaaacaagctcctaaggcttggtatgaaagattgagagattttcttttgtcaaaggatttcaaaattgaaaaagttgacaccactcttttcacaaaaatcattggtgatgatttctttgtgtgtcaaatttatgttgatgacatcatattcggttctactaatgaggtattttgcaagaaatttggtgatatgatgtctagggaatttgagatgtccatgattggagagttgagcttcttccttggacttcaaatcaagcaacttaaggatgggacgttcgtgagccaaaccaagtacatcaaggatctactcaagaggtttggcttggaagatgtgaagcccatcaagacacctatggcaaccaacgggcatctcgaccttgatgagggaggtaaaccggtagatttaaagctttatcgttccatgattggtagcttgctttaccttaccgcatctaggccggatatcatgtttagtgtttgcatgtgtgcacgatttcaagccgctcctaaggagtgtcacttagtggccgtgaaaaggattctaagatatttaaagcattcctctactattggcttgtggtacccaaaaggtgctaaatttaagcttgttggctattccgattcggattatgccggttgcaaagtggatagaaagagcacatccggtagttgccaaatgcttggtagatcccttgtatcatggtcatccaagaaacaaaactccgtagacctctctaccgtcgaggcggaatatgtttcggcgggtagttgttgtgcccaattgctttggatgaaacaaaccttgttggactatggtatatccttcaccaaaaccccactcctatgtgataatgatagtgccataaaaatagccaataacccggtccaacattctagaaccaagcatattgacattcgccatcacttcctaagagaccatgttaccaagtgtgacatagtcattagccacataagaaccgaggatcaactagccgacatttttaccgagcctcttgatgaaacccgcttttgcaagttgaggaatgagttaaatgtcatagacttctctaatgtggcttga

SEQ ID NO: 14348 - DNA, 3469 bp, Oryza sativa
  Clone ID: TFbOSC400979j.C1.o3.np
attccgtcgtttccggagagttcgttttcgccggagaagagtttgaagagttccaaggccagcaaggcaactcctggtttggaatggtatattcctggtttggagatagaactgtgcagccgggatggttgttcagaatggttgggcctatgcaacaggatgccgcgctacaagcctgagtacttgtttggtgttgagggttttgtccaggagttgcgtacaatgtcctttgtcattggatttgggactgcccctttttatgctcagattcctcatgatcgtcatgaagagaggtgccgagtcaaagtcaccttgaacagtaatagtgaagacattctatcagtgatgttcgaagctggaggaagaaactacatccatgcatgtcaggaagtggcaaggatcgccataggagagctccgcgatcgctacagtgatcaattggccgacactgagtatcgttaccatcctcgtcaaccacagggaagtgaccgtggcagttaccttgagactgaaggaattgagaatgatgctaccacaagacatttggttgagatgctatgggctatggatgaaagtcatgcagagactgtgttagcagcccaagatcgtgaagattggaatcgtggtaagatttgcaagctagaagacaaggtggatcgtttggagaaggaactagctgcgttgaagggagaagcaccgccgcagaaggccaggattcgtcttaccgcaaggaagagagctctatttgtccctcgttatcaattggcgccaaagatggtgaacactcgcagcaacgggaatggtcccaacctcaacaaccccaacaacaacaataacaatgaagggaacccaacccttgctcaagttcttgctcaacagactcagctaatgcacatgatgatgcaacaacttcagaatcagcagaaccaaggaaataaccatgcacctcctcagaataagttagcagaatttcttcgtgtgaggccgcctattttctctagtaccactaaccctgttgaagctggtgattggctgcatgccatagagaagaagttggatttgcttcagtgcactgatcaggagaaggtctcatttgcatcacaccagttgcttggccctgcctctgaatggtgggatcacttccgcctgaataggactactgctgaacctatcacttggcttgaattgaccgctgctttccggaagacgcatataccatcgggagtggtgtctctcaagaagaaggagttcaggtcgctcacccagggatctcgctctgttacggagtatctacacgagttcaatcgtctagctcgttatgctccagaagatgtgcgcaatgatgaagagcgtcaggagaagttcttggaaggacttaatgatgagctttcttacccactcatgactggagattattctaatttccagaaattagtggataaggctattcgtcaggaggacaagtataatcgcatggagcagaagaaacgccggattgctcaattcaagatacaacaggggaataatcagaagccgcgtcttacttttgtaccccagtccatgccacatggaggttcttcatctgttgttcgtccgcagcgtcagttcttcaacaacaatgctggcaacaacatccgtaatcaagctccacgtcctgttgcagctccaacacaacaaccgcctgccaagagggagcaaggcagcaagcccgtggtgtgtttcaactatggagacccaggacattatgctgacaagtgtccaaagccccgacgcgtgaaggttgtccctgcctagagcaactctactataccagcatcaaaggcccgtgtcaatcatgttgcagctgcagaagctcaagacgctccagatgtgattttgggtacgttccctgttaactcagttcatgcaacagtgcttttcgattctggtgctacacattcatttctatctatgagttttgcgggaaatcatgggatggaagtagaagatcttagacgtcctttgatggttagtaccccaagtaatcaagcactctctttgcaacgtagcccctctgtcagaatagaaattaagggagtaccatttctggccaatcttatcttgttagaatccaaagaccttgatgtcatcctagggatggactggttaaccagacataaaggtgttatagactgtgctaacagaaaagtaactctcaccagtagtgatggtcgagttgtaactgttcatgcattatcttctgagtctttaaggtcaagactgaaccagataactttggaagagattcctatagtccgggagtatcccgatgtgttcccagatgatttacctggtatgccgcccaaaagggatatagagttcagaatagatttggtacctggaacaactccgattcataagaggccttatagaatggcagccaatgagttggcagaagtcaagaggcaagtggatgatttgcttcagaagggatacatcagaccgagttcatctccatggggagctccggttatttttgtggaaaagaaagatcatacccagaggatgtgtgtggactatcgtgcattaaatgatgtgactatcaagaataagtatccactacccagaattgatgatttgtttgatcagcttaaaggtgccactgttttctctaagatcgatcttcgatcagggtatcaccagttgagaatcaaagaggaagatatacctaagacagcttttaccactaggtatggattgttcgaatgtactgttatgtcttttggacttaccaatgcccctgctttcttcatgaacttgatgaataaggtgtttatggaatacctagataagtttgtggtggtctttattgatgacattcttatctactctcgaacaagagaagagcatgaagaacatcttcgccttgcactagagaagctacgagaacatcaactgtatgctaagtttagcaagtgtgaattttggttgtctgaagtgaagttccttggtcacgtcatctcagcaggaggagttgccgttgatcccagtaatgtggaatccgtaaccaactgcaaacaactaaagacagtttcagagattcgcagtttcttaggcctcgcaggatattaccggaggtttatagagaatttttccaagattactaagcccatgacacgactgctacagaaagatgtgaagtataagtggtcggaagaatgtgagcagagttttcaagagttgaagaatcgcttaatatcagctcctatcttgattttacctgatccaaaaaagggtttccaggtgtattgtgatgcatccaaacttgggttaggttgtgttctgatgcaagatgggaaggtggttacctatgcatctcgtcagttacgtccgcatgagaagaactaccctactcatgatattgagttagctgcagtagttcatgcgttgaaaatttggcgtcattattatttagacactcggtctgtcc

SEQ ID NO: 14349 - DNA, 3279 bp, Oryza sativa
  Clone ID: TFbOSC401018j.C1.o32.gm
atggcgcgcggactgggtccacgggagtggggcccacacggcagcctcacgccgcggggcgcgcccgaaggcggcctcgccggcacagccgacgggaggcggcgcacccgcgccccgatggtcgccggcggcgacctccggcgcgacggagcggcgcccgagagaggagagggaagggggaaacgaaatgggcggtccatggctcaccccgggtcgacggcgacgacgggaacggcgaccgaagcggaggaaggcggcggcgcggctcgggtcgacgaggacggcggcgttccggcggtcggcgggcgaaacgaaggggtggacgagatcggcgaggacgcggcgaacccgaagaaggcgacgccgaaacgggaggaggcccggggcgacgacggcggcggaccggagctcggcggcgacggcggagagagaggacgacggcgcgagctcgattccgacggggagagagagcggcgagtggcggaaacgaaggagggaggcacggggagtgtttatatgccgcgctacaagcctgagtacctgtttggtgttgagggttttgtccaggagttgcgtacgatgtcctttgtcataggatttgggactgcccctttttatgctcagattcctcatgatcgtcatgaagagaagtgccgagtcaaagtcaccttgaatagtaatagtgaagatgtcccctcagtgatgttcgaagctggaggaagaaactacatccatgcatgtcaggaagtggcaaggatcgccataggagagctccgtgatcgctacagtgatcggttggctgacactgagtatcgctaccatcctcgtcaaccacagggaagtgaccgtggcagctaccttgagactgaaggaattgagaatgatgctaccacaaggcatttagttgagatgctgtgggctatggatgaaagccgtgcagagactgtgttagcggctcaagatcgtgaagattggaatcgtggtaagatttgcaagttagaagacaaggtggatcgtttggagaaggaactagccgcgttgaagggagaagcaccaccgcagaaggccaggattcgtcttaccgcaaggaagagagctctatttgtccctcgctatcaattggcgccaaaagttcgtgtggtggagaaagaagttgccccagcagatcctccggtcatcatcataagtgatgatgaagaagaagaatccaagcgcacccattccaagattgagtgggtagcaactcaagatgatgaagacgagccgaacgagcctacaatcgacctccgatgctcggaagaactagacaacgggaatggccccaacagcaacaataacaacaacaatggagagaacccaacacttgctcaagttcttgctcaacagactcagttaatgaacatgatgatgcagcaacttcagaatcagcaaaaccaaggaaataaccatgcacctccccagaacaagttagcagaatttcttcgtgtgaggccgcctattttctctagtaccactaatcctgttgaagctggtgattggttgcatgccatagagaagaagatggatttgcttcagtgcactgatcaggagaaggtctcatttgcatcacatcagttgcttggccctgcctctgaatggtgggatcacttccgcctgaataggattactgctgaacctattacttggcttgaattcaccgctgctttccggaagacgcatataccatcgggagtggtgtctctcaagaagaaggagttcaggtcgctcacccagggatctcgctctgttacggagtatctgcacgagttcaatcgtcttgctcgttatgctccggaagatctgcgcaatgatgaagagcgccaggagaagtttttgggaggacttaatgatgagctttcttacccactcatggttggagattatcctgatttccagaaattagtggataaggctatacgtcaggaggacaagtacaatcgcatggagcagaagaaacgccggattgctcacttcaaggcacaacaggggagtaatcagaagccgcgtcttactttaggaccccagtctgtgccacagggaggttcttcgtccattgttcgtccgcagcgtcagttcttcaacaacaatgctggcaacaacatccgtaatcaagtcccacgtcctgttgctgcctcgacacagcaacaacctgccaagaggaagcaaggcagcaagcccgtggtgtgtttcaactatggagacccaggacattatgctgacaagtgtccgaagccccgacgcgtgaaggttgtccctgcccagaataactctgctgtaccagcatcaaaggcccgtgtcaatcatgttgctgctgcagaagctcaagatgctccagatgtgattttggaccttgacgtcattctagggatggactggtcaagactgaaccagataactttgggagagattcctatagttcgggagtatcccgatgtgttcccagatgatttacctggatattatcgaaggtttatagagaatttttccaagattgctaagcccatgacacgcctgcttcagaaatatgtgaagtacaagtggtcggaagaatccttagaagcgaagcccacactaattgatcaagttagagaagctcaaattagtgatcctgatattcaagagatcaagaagaatatgagaagaggaaaagctatcggtttcttggaggatgagcaaggaactgtatggttgggcgagagaatttgtgtccctgacaacaaagatttaaaggatgcaattctgaaagaagctcatgatactttatactccattcaccctggtagtactaagatgtaccaggatctcaaggaaagattttggtgggcaaccgtcgccgtcgctcgggaagaccaccgtcgtgctcgccaagtcgtcgccgtcctcgtccgcctcttcgccgtcgccggagatcaccggagcagcatcgccgtcgtcaacccgaaggttcccgccgcttcctcctcgtcgccgtcgccgtccgttggtcttccgccaccgtttaggtcaccggtgagttcgccgcgttgtcctctccgtcttggtgccctccgtttgcgtcctagcgccgccgttcgccggcgagcgtgcgccgttcgagccgtctcctccgccgagccgccgccgctgtcggtgacgtcaccgctgacgtcatcggggtcgtccgccgtgagccgccgtggacccgatcgatctcggccgtccgttttggatcaagttgatctcggccgtccgttcgtgtga

SEQ ID NO: 14350 - DNA, 2202 bp, Oryza sativa
  Clone ID: TFbOSC404369j.C1.o33.gm
atggtgaacactcgcagcaacgggaatggccccaacaacaacaataacaataacaatgaagggaacccaactcttgctcaagttcttgctcaacagactcagttaatgaacatgatgatgcagcaactccagaaccagcagaaccaaggaaataaccatacacctccccagaacaagttagcagaatttcttcgtgtgaggccgcctattttctctagtaccactaatcctgttgaagctggtgattggttgcatgccatagagaagaagttggatttacttcagtgcactgatcaggagaaggtttcatttgcatcacatcagttgcatggccctgcttctgaatggtgggatcacttccgcctgaataggattactgctgaacctatcacatggcttgaattcaccgctgctttccggaagacgcatataccatcgggagtggtgtctctcaagaagaaggagttcaggtcgctcactcagggatctcgctctgttacggagtatttgcatgagttcaatcgtctggctcgttatgctccggaagatgtgcgcaatgatgaagagcgccaagagaagttcttggaaggacttaatgatgagctttcttacccactcatgactggagattattctgatttccagaaattagtggataaggctattcgtcaggaggacaaatacaatcgcatggagcagaagaaacgccggattgctcaattcaagcgccagttcttcaacaacaatgctggcaacaacatccgcaatcaagctccacgtcctgttgcagctccaacacagcaacaacctgccaagagggagcaaggcagcaagcccgtagtgtgcttcaactatggagacccaggacattatgctgacaagtgtccgaagccccgacgcgcgaaggttgtccctacccagagcaactctatcgcaccagcatcaaaggcccgtgtcaatcatgttgctgctgcagaagctcaagatgctcaagatgtgattttggtccgggagtatcccgatgtgttcccagatgatttacctgccaatgagttggcagaagtcaagaggcaagtagacgatttgcttcagaagggatacatcagaccgatttcgtcaccatggggagctccggttatttttgtggaaaagaaagatcatacccagaggatgtgtgtggactatcgtgcactaaatgatgtgactatcaagaataagtatccgttacccagaattgatgatttgtttgatcagcttaaaggtgccaccgttttctccaagatagatcttcgatcagggtatcaccagttgagaatcaaagaggaagatatacctaagacagcttttaccactaggtatgggttgttcgaatgtactgttatgtcttttggacttaccaatgcccccgctttcttcatgaacttgatgaataaggtgtttatggaatacctagacaagttcgtggtagtctttattgatgatattcttatctactcccgaaccaaagaagagcatgaagaacatcttcgccttgcattggagaagctacgagaacatcaactgtatgctaagtttagcaagtgtgaattttggttgtctgaagtgaagttccttggtcacgtcatctcagcaggaggagttgccgtcgatcctagtaatgtggaatccgtaaccaactggaaacaaccaaagacagtttcagagattcgcagtttcctaggcctcgcaggatattatcggaggtttatagagaatttttccaagattgctaagcccatgacacagctgcttcagaaagatgtgaagtacaagtgccgtgcgccgccgccgttccggtcgtcgtcgtcgctcgggaagatcgccatcgtggtcgccaagtcgtcgccgtcctcgtccgctccttcgccgccgccgaagaccgccggagcaccgccgccgtcgtcaagccgaaggtcgccgccgcttcttcctcgtcgccgtcgccgtccgttgctcctccgccgtttctttggtcaccggtgggttcgccgtgccgtccgctacccgttggtgcccttcgttcgtgccgaagcgccgccgttcgccggcgagtttgcgcgcccgagccgccgagccgccgccggtggtgacgtcaccgctgacgtcatcgtggccgtctgccaggaagagttctacaatgatgctgatggtgtggaggattag

SEQ ID NO: 14351 - DNA, 4326 bp, Oryza sativa
  Clone ID: TFbOSC411591j.C1.o1.fg
atgtcgaacgaggtgaaccaagtagggaaggctcccatgtttaatggcacaaactactccacttggaaaattaaaatgtctactcacctcaaagctatgagcttccatatttggagtattgtggatgtaggctttactatcaccggcacacccttgacggagattgatcaccgcaacctccaactcaatgcccaagccatgaatgccttgttcaactctttgagccaagaggagttcgatagagtgagcaaccttgagaccgcatatgagatttggaacaagttggcggagatccatgagggtacaagtaagtacaaggatgccaagcttcatttcctcaagatccaatatgagacattctccatgttgcctcatgagagtgtgaatgacatgtatgggaggctcaatgtcattgtgaatgatctcaaggggcttggggcaaactacaccgatcttgaggttgcccaaaagatgcttagagccctaccggagaagtatgagacccttgtcactatgcttatcaactccgacatgtcaagaatgacacccgcaagcctcttggggaagatcaacaccaatgacatgtacaagttgaagaagaaggagatggaggaagcctcaccttccaagaagtgtattgctctccaagccgaagttgaagacaagagcaagagcaaggtgaatgaagtcaataaggacttggaggaagagatggtccttcttgctagaaggttcaatgatctcttgggaaggagaaaggagagaggaaggggctccaactccaataggagaagaaatagaagacccaacaagactctctccaacttgaggtgttttgagtgtggtgagaagggacactttgcttccaagtgcccttccaaggatgatgatggagacaatatgtttgaggagctccatgcttatagtgagaaggagattgtcaagttcaaggccctaaagaaggatcatgcttctttggaggtcttgtatgagaagctaaagacctctcatgagagactcaccattcctcatgagaagcttaatgctacttgccatattgctcatgttgcatcatctaacatttctacctcttgtgatgatcttatggatatgcctagccctagctctagctctagctcttgtgtttctatttgtgatgcctcacttgttgttgagaacaatgagcttaaggagcaagtggctaagctcaacaagagtttggagagatgcttcaagggtaagaacactcttgacaagattttgagtgagcaacggtgcatccttaacaaggagggacttggattcattccaaagaagggtaagaaaccttctcacagtgccactcgttttgtcaagagtaatggtaagtattgctccaagtgtcgtgaagttgggcatttggtgaactaccgcaccggtgggagccattgggtgcttgatagtggatgcactcaacacatgaccggtgatagggctatgttcaccacatttgaagtaggagggaatgaacaagagaaagtgacatttggagacaatagcaaaggaaaggtaattgggttagttgcaaaaacttctttgggttggctttggcatagaaggctagcccatgttggcatgaatcaattgagcaaactttcaaaacgtgatctagttgtgggcttgaaagatgtgaagtttgagaaagataagctttgtagtgcttatcaagccggcaagcaagttgcatgttctcatcctactaagagtatcatgtccacatctagaccattggagctcttgcatatggatttgtttggcccaacaacctataagagcattggtggtaatagtcattgtcttgtgattgttgatgattattctcgctatacttgggtgttctttttgcatgataagtctattgttgccgagcttttcaaaaagtttgcaaaaagggcccaaaatgaatttagttgcactcttgtgaaaattagaagtgacaatggttccgagtttaagaataccaatatcgaggactattgtgatgatcttggtattaaacacgaactttccgctacctactcacctcaacaaaatggtgtagtggagaggaaaaatcgtacattgattgagatggcaaggactatgctagatgaatatggtgtttctgattccttttgggcggaagccgtaaacaccgcttgctatgcaaccaataggctttatttgcatcgtctcttgaaaaagacttcctatgagctaattgttgggaggaagccaaatgttgcctattttcgagtttttggttgcaagtgttatatttaccgaaagggtgttagactaaccaaatttgaaagttggtgtgatgaagggtttcttctaggttatgcctcaaatagtaaggcataccgggtctacaacaagaacaaaggtattgtggaagaaaccgccaatgttcaatttgatgagactaacggctcccaagaggggcacgagaatttggatgatgtaggtgatgaaggcttgatgagagctatgaagcacatgtctattggagatgtcaagcttattgaagtggaagacaagccatccacctccactcaaaatgagccatctacttccgcttcaccaagtcaagctcaagttgaagtggaggaggagaaggcacaagatccacctatgcctccaaggatacacaccgctctttccaaggatcacccaattgaccaagtgttgggtgacattagtaagggtgttcaaactcgatctcgtgtcgcttcgatttgtgaacattactcatttgtttcttgtcttgagccaaaacatgtagatgaagctctttgtgatccggattggatgaatgctatgcatgaagagctcaacaactttgcaagaaacaaggtgtggactttggttgaaagacctagagaccacaatgtcatagggacaaagtgggtctttaggaacaaacaagatgagaacggattggtggtgagaaacaaggcaaggttggtggcgcaaggtttcacacaagttgaaggtttggactttggtgaaacttttgcccccgtgacaagacttgaggctattcgcatctttcttgcatttgcatcatgctttgatataaaactatttcaaatggatgtgaaaagtgcttttctaaatggtgaaattgccgaacttgtctttgttgaacaacctcccggttttgaagatcctaaatatcctaaccatgtttacaaactctcaaaagctttttatggtttaaaacaagctcctagggcttggtatgaaagattgaaagattttcttttgtcaaaggatttcaaaattggaaaagttgacaccacccttttcacaaaaatcattggtgatgatttctttgtgtgtcaaatttatgttgatgacatcatattcggttctactaatgaggtattttgcaaggaatttggtgatatgatgtctagggaatttgagatgtccatgattggagagttgagcttcttccttggacttcaaatcaagcaactcaaggatgggacgttcgtgagccaaaccaaatacatcaaggatctactcaagaggtttggcttggaggatgcgaagcccaccaagacacctatggcaaccaacaggcatctcgaccttgatgagggaggtaaaccggtagatttaaagctttattgttccatgattggtagcttgctttaccttaccgcatctaggccggatatcatgtttagtgtttacatgtgtgcacggtttcaagccactcctaaggagtgtcacttagtggccgtgaaaaggattccaagatatttaaagcattcctctactattggcttgtggtacccaaaatgtgctaaatttaagcttgttggctatttcgattcggattatgccggttgcaaagtggatagaaagagcacatccgatagttgccaaatgcttggtagatcccttgtgtcatggtcatccaagaaacaaaattccgtagccctctctaccgccgaggcggaatatgtttcagcgggtagttgttgtgcccaattgctttggatgaaacaaaccttgttggactatggcatatccttcaccaaaaccccactcctatgtgacaatgatagtgccataaaaatagccaataacccggtccaacattctagaaccaagcatattgacattcgccatcacttcctaagagaccatgttgacaagtgtgacatagtcattagccacataagaaccgagaaccaactagccgacatctttaccaagcctcttgatgaaacccgcttttgcaagttgaggaatgagttaaatgtcatagatttctctaatgtggcttga

SEQ ID NO: 14352 - DNA, 5180 bp, Oryza sativa
  unsure (1)..(5180): unsure at all n locations
  Clone ID: TFbOSC9403j.C1.o3.np
attccgtcgtttccggagagtccgttttcacaggagaagagtttgaagagttccaaggccagcaaggcaactcctggtttggaatggtatattcctggtttggagatagaactgtgcagccaggatggttgttcagaatggttgggcctatacaacaggatgccgcgctacaagcctgagtacctgtttggtgttgagggttttgtccaggagttgcgtacaatgtcctttgccataggatttgggactgcccctttttatgcccagattactcatgatcgtcacgaagagaagtgccgagtcaaagtcactttgaacagtaatagtgaagatatcccctcagtgatgttcgaagctggaggaagaaactacatccatgcatgtcaggaggtggcaaggatcgccataggagagctccgcgatcgctacagtgatcagttggccgacacggagtatcgctatcatcctccagtcgtcaatgtaagtgatgatgaaggagaagaatcgaagcgcactcattccaagattgagtggggagcaactcaagctgatgaagacgagccgaacgagccttcaatcaactccgatgctcggaagacctagaaagccttgtcgaaccgttgtcttagatcgttgtgttagtttgcttgagtcttcagtttgtaataatgaaactcacttaagatcaataaaagttaaagtaattctctgtcctaagtagtttcccccggtttctcttcttgtgccctgcccataccagatggtgaatactcgcagcaatgggaatggccccaacaaccccaataacaacaacaatggagagaatcccacacttgcccaagttcttgctcaacagacacagctaatgaacatgatgatgcagcaactccagaaccagcaaaaccaaggaaataaccatgcacctccccagaacaagttagcagaatttcttcgtgtaaggccgcctactttctctagcaccgctaatcctgttgaagctggtgattggttgcatgccatagagaagaagttggatttgcttcaatgcactgatcaggagaaggtctcatttgcatcccatcagttgcatggccctgcctctgaatggtgggatcatttccgcctgaataggactactgcggaacctatcacttggcttgaattcaccgctgctttccggaagacgcatataccatcgggagtggtgtctctcaagaagaaggaattcaggtcgctcacccagggatctcgctctgttacggagtatttgcacgagttcaatcgtttggctcgttatgctccggaagatgtgcgcaatgatgaagagcgccaggagaagttcttggaaggacttaatgatgagctttcttacccactcatgactggagattatcatgatttccagaagttagtggataaggctattcgtcaggaggacaagtacaatcgcatggagcagaagaaacgccggattgctcaattcaagacacaacaggggaataatcagaagccgcgtcttactttaggaccccagtccatgccacagggaggttcttcgtctgttgttcgtccgaagcgttagttcttcaacaacaatgctggcaacaacatccgcaatcaagctccacgtcctgttgcagctccagcacagcaacaacctgccaagagggagcaaagcagcaagcccgtggtgtgtttcaactatggagacccaggacattatgctgacaagtgtccgaagcccagacgcgtgaaggttgtccctacccagagcaactctaccgcaccagcatcaaaggctcgtgtcaatcatgtcgctgctgcagaagcacaagatgctccagatgtgattttgggtacgttccttgttaactcagttcctgcaacagtgctttacgattctggtgctacacattcattcttatctatgagttttgcaggaaatcatgggatggaagtagaagatcttagacgtcctttgatggttagtaccccaagtagtcaagcactctctttgcaacgtagcccctctgtcagaatagaaattaaaggagtaccatttctggccaatcttatcttgttagaatccaaagaccttgatgtcatcctagggatggactggttagccagacataaaggtgtgatagactgtgctaacagaaaagtaactctcaccagcaatgatggtcgagttgtgactgttcatgcattgtcttctgagtttttaaggtcaagactgaaccaaataattctggaaaagattcctatagtccgggagtatcccgatgtgttccccgatgatttgcctggtatgccgcctaaaagggatatagagttcagaatagatttggtaccaggaacaactccgatccataagagaccttatagaatggcagccaatgagttggcagaagtcaagcggcaagtagatgatttgcttcagaaaggatacatcagaccaagttcatctccatggggagctccggttatttttgtggaaaagaaagatcatacccagaggatgtgtgtggactatcgtgccctaaacgatgtgactatcaagaataagtatccgctacccagaattgatgatttgtttgatcagcttaaaggtgccactgttttctccaagatagatcttcgatcagggtatcaccagttgagaatcaaagaggaagatatacctaagacagcttttaccactaggtatggattgttcgaatgtactgttatgtcttttggacttaccaatgcccccgctttcttcatgaacttgatgaataaggtgtttatggaatacctagacaagttcgtggtggtctttattgatgatattcttatctactctcgaaccaaagaagagcatgaagaacatcttcgccttgcactagagaagctacgagaacatcaactgtatgctaagtttagcaagtgtgaattttggttgtctgaagtgaagttccttggtcacgtcatctcagctagaggagttgccgttgatcctagtaatgtggaatccgtaaccaactggaaacaaccaaagacagtttcagagattcgcagtttcctaggtcttgcaggatattatcggaggtttatagagaatttttccaagattgctaagcccatgacacgattgtttcagaaagatgtgaagtacaagtggtcagaagaatgtgagcagagttttcaagagttgaaaagtcgcttaatatcagcacccattttgattttgcctgatccaaagaagggttttcaagtgtattgcgatgcatctaagtttgggttaggttgtgttctgatgcaagatgggaaggtggttgcctatgcatctcgtcagttacgtccgcatgaaaagaactaccctactcatgatcttgagttagctgcagtagttcatgcgttgaaaatttggcgtcattatcttttcggtactcgtacagaggtatataccgatcacaagagtttaaagtatatctttactcagccggatctgaacatgagacaaaggagatggttggaattaattaaaggattatgacatgggaattcattatcacctgggaaaggctaatgttgtagtagacgctcttagcaggaaaggctattgcaatgctacggaaggacgacagttgtcattggaattatgcaaggaatntgaaagattaaatttgggaattgtcagtagaggttttgttgcagccttagaagcgaagcccactctaattgatcaagttagagaagcccaaattaatgatcccgatattcaagagatcaagaagaatatgagaagaggaaaagctatcggtttcttggaggatgagcacggaactgtatggttgggtgagagaatctgcgtccccgacaacaaagatttaaaagatgcaattctgaaagaagctcacgacactttatactctattcaccctggtagtactaagatgtaccaggatctcaaggaaagattttggtgggcaagtatgaagcgtgaaatcgcagaatacgtagcagtatgtgatgtttgtcagcgagtcaaggcagaacatcagaaacctgccggtttgctgcagcctttgaagattcctgaatggaagtgggaagaaatcggtatggattttatcactggtttacccagaacgtcatcaggccatgactctatttgggtaatagtcgacagacttaccaaagtggcacatttcattccggtaaagacaacttattccgaaagtcgcttagcggaattgtatatggcaaggattgtgtgtttgcatggcgtccctaagaagatagtgtctgatcgaggcagtcagtttacttcaaatttttggaagaagcttcaggaagagatgggttctaaactgaactttagtactgcttatcatccgcagacagacggacaaacagaaagggtgaatcagattttggaagatatgttgagagcttgtgctttagacttcggtggaagttgggataagaatctaccttatgcagaattttcgtacaacaacagttatcaagctagtcttcagatggctccttacgaagcactgtatggtcggaagtgccgcactccgcttttgtgggatcaaacgggagaacgtcaggttttcgggacggatatcctaagggaagcagaagaaaaggtaaagatcattcaagaaagattgcgagtggctcagtctcgacataagagttatgccgataatcgccgtagagatttgagttttgaagaaggagattatgtgtatcttcgtgtcacgcctcttcgaggagttcatcgttttcacaccaaaggaaaattggcaccgcgttttgtgggaccttataagatcgtcagtagaagaggagaggttgcttatcagttggagttacctcaatctttggcaggagtccataatgtgttccatgtttcgcaattgaaaaagtgtttaagggtacctaccgaagaagctaatcttgaacagataaaagaccaagaggatctgacctatgttgagagaccaatccgtatcttggaaatagatgagagaagaaccaggaatcgggttatccgtttttgcaaagtccaatggagtaatcactcggaagaagagtcaacttgggaacgagaagatgaattgaagtcagctcatccgcatctgttcgccagttcttccgaatctcgaggacgagattccgtt

SEQ ID NO: 14353 - DNA, 5247 bp, Oryza sativa
  Clone ID: TFbOSC100051j.C1.o2.fg
atgacaagtggaggtgattcctttgtgcgcatgatgtccgaggacactgatgtcgaagtgctaatgccaaatgaagaccttcgtacttcaacaaatggtgcaaaaggaagtgccaaaagatcaagcaactatactcgtaaggaggacattcaattgtgcatttcatggcagagcattagctcagatcctattattggcaatgagcaaccagggaaggcatattggcagaggatcgcagagcactaccatgctaaccgtgattttgagtctgataggaatgcaaactctcttgagcaccattggggtaacattcagaaggaagtaagcaagtttcaaggttgctacaatcaaattgagcgtcatcatccaagtggcataccacatcaagagcttgttcttgaagctgaggcattatactcgtccactgcaccaaagaatagggcatttcagtttaatcattgttggctcaagttgaggaattctccaaagtttcaaacactagaatcccacaagaggccacggtctaggaagtctttgaccccaattgagagagctggtgaagaagatgaaggagatgatgctagcaagagtacagctcctgatttatctcagccgagtgctaaaaagagaccaataggtaggaagcaagcaaaggagaagttgaagaatggaggagaagatggaccatacaaagaggcgatgaaagatttgcttgacgctaaagagaaagaagcgaaattgaaagaagagagatggaaggaaactaaggagattcaagagcgcaagctcttatttgctgagcgtaagttagtgtgggatcaagaacagaagattatgttttgtgatgtttccaccttggaaccggatgtgagaacgtatgtgttggctatgagggcacagattgcagcttcaaaggtggctgccctcaatggtggatttgatggtagtagtggctttggagatattgagtctccaaaatatataagttctgatgaggacatcaacaccatcgatacatccatgtccccccatatacagcatgatggtcctattacccgcgctcgtgcacgtcaactaaattatcaggacgagtgccctcgtggccgggttgacgcgcaccacaagttcgcggcgaccattggagacggtccagaggataaagatgaggagggtgcatctcattccccacgcaccaaaggcatcatccaatactttacaaggcaagtgaagcagcacacagaaggacttgatacagatttgcagatctccaccaacactaagcttacagggttggagacagcggtcgcccgcattgacactagccttgctgctcttgtgaggcattttgatgctctcaatgctggaggcaatggtgggggtaatgacgatgacattgacggagagtacatcgaggataatttagaggatgaatatattgctgacactgaacaagatgatcgagatgctcaagatcgtcgacggctacacaacaatcgacgaggtatgggtggtcgccgccgacgcgaggtacgcaacaatgatgatgctttttctaaaattaaatttaagattcctccttttgatggaaaatatgatcctgatgcgttcctctcttgggagattgctgttgaccaaaaatttgcataccatgagtttcctgagaacactagagttagagctgctacgagtgagttcaccgattttgcttcggtttggtggatagaacatggcaagaaaaatcctaataacatgccacaaacttgggatgctttgaaacgggtcatgcgggctagatttgttccttcttactatgcacgtgacttgctgaatagattgcaacaattgagacagggtgcgaaaagtgtagaggaatattatcaggagttacaaatgggcttgcttcgttgtaatttagaggaaactgaggacactgccatggctagatttttgggtgggttaaaccgcgagatttatgacatcgtagactataaagattacactaatatgacccgattgtttcatcttgcttgtaaggctgaaagggaagtgcaaggacgacgtgctagtgccaaggctaatttttctgcaggtaaaacttcatcatggcagacacgcaccactcctccggccggccgtactgcttctccatcttccacacccacaaccagtcgagcagcacctcctccatctagtgacaagtccgtgacaaaggccgctcagccagcaccgagtgcttcttcaatggtatccacaggccgaatgagagatgttcagtgccaccgttgcaagggctttgggcatgtgcagcgtgactgccctagcaagcgagttttggtagtcaaaaacgatggtgagtactcctctgctagtgatttcgatgatgatacacttgctttgcttgcggctgaccatgcagataatgagccaccggaagagcacattggggctgcatttgcggatcactatgagagcctcattgtgcagcgtgtccttagcgcacaaatggagaaggcggagcaaaatcagcgacacacgttgttccaaacaaagtgtgtcctcaaagagcgttgttgccgcatgatcattgatggaggtagctgcaacaacttggctagcagcgagatggtggagaagcttgcacttagcaccaaaccgcacccacatccatactacatccaatggctgaacaacagtggtaaggtgaaggtaacaaaactggtgcacattaattttgcaattggaaattaccatgatgttgttgaatgtgatgttgtgcccatgcaagcatgtaatattctgctaggtagaccatggcaatttgatagggattctatgcatcatggtaggtccaaccagtactcttttctgtaccatgataagaaaattgtgttgcatcccatgtcttctgaagatattttgcgtgatgatgttgctaaggctgccaaatccaaatgtgagagtgataaaaaagcccaatctgatggcaagaaacctgagacaatcaatttgaaacccaaatgcttacttgctactaaatctgatattactgagttgattgcatcaccttcagttgcctatgctttggagtactctgatgtgtttcccaaggaagtgccaccggggctgccaccggtgcgcggcattgagcatcaaatcgacttgatcccaggtgcttccctaccgaaccgtgcgccataccgaaccaaccctgaggaaaccaaggagattcagcgtcaagttcatgagttgcttgataaagggtatgtacgcgagtctcttagtccatgtgcggttccggtaattttggtaccaaagaaagatggttcatggcgtatgtgtgttgattgtagagctattaataacattaccattcgatatcgtcatcctattcctaggttagatgatatgcttgatgaattgagtggctctattgtgttctccaaagttgatttgcgtagtggttaccaccagattcgtatgaagttgggtgatgaatggaaaacaacatttaaaacgaagtttgggttgtatgagtggttagtgatgccttttggtttaactaatgcacccagcactttcatgaggttgatgaatgaggttttgcgtcctttcattggaaaatttgtggtggtctactttgatgatatcttgatttacagcaagtctatgggtgaacattttaatcatttacgtgctgtttttaatgctcttcgtgatgcacgtttatttggtaaccttgagaagtgcaccttttgcacagatcgagtttcttttcttggctatgttgtaactccgcaggggattgaggttgatcaagccaaggttgaggcaattcagagttggccgactcctaaaacggtctcacaagtgcggagctttctaggactcgcggggttctatcgccgctttgtgcaggatttcagcaccattgctgcaccattgaatgcgcttacaaagaagggagtgcctttcacttggggcacatcacaagagaacgccttccacatgttgaaagataagttgacccatgcacctctcctccaacttcccgattttaataagacttttgaacttgaatgtgatgctagtgggattggattgggtgaaacatggcagcattatttgtggcccaaggaatttgtcatacattctgatcatgagtctttgaagcatattcgtattcaagggaagctgaaccgtagacatgctaaatgggttgaatttattgaatcttttccttatgttatcaaacacaagaaagggaaggagaacatcattgctgatgctttgtctaggagatacactttgttgacacaacttgactacaagatttttggcctagaaacaatcaaagaccaatatgcgcatgatgctgattttaatgatgaagcgcatggaggcagtttgatgggacattttggtgccaagaagacacatgacatccttgctagtcatttcttttggccacagatgcgaagagatgttggcagggctgttttgaagaaaaatatcaagatgtgggaagaatgcttgcctcatattgaatttgcttataatcgttccttgcattctactacaaaaatgtgcccatttcagattgtgtatggtttgttgcctcgtgctccaattgatttgatgcctttaccatcttctgaaaaactgaattttgatgctaagcaacgtgctgagttgatgttaaaactgcatgagacaactaaagaaaacatagagcgcatgaatgctaagtataagtttgctggtgacaaaggtagaagggagttgaattttgaacctggagatatggtttggttgcatttgcgaaaagaacgatttcctgatttgagaaagtctaaattgatgcctagagctgatggaccatttaaagtgttagcaaagattaatgagaatgcatataagattgatttgcctgcagatttcagggttagtcccacatttaacgttgcagatttgaagccgtatttgggagaagaagatgagcttgagtcgaggacgactcaaatgcaagaaggggaggatgatgaggacatcaacaccatcgatacatccacgtccccccatatacagcatgatggtcctattacccgcgctcgtacacgtcaactaaattatcaggacgagtgcccttgtggccgggttgacgcgcaccacaagttcgcggcgaccattggagacggtgtatcggttgctaaggtgcagcgtctttggacagttgtagtcgggccgtga

SEQ ID NO: 14354 - DNA, 4924 bp, Oryza sativa
  Clone ID: TFbOSC100644j.C1.o3.np
atggtaggtccagaggataaagatgaggagggtgcatctcattccccacgcaccaaaggcatcatccaatactttacaaggcaagtgaagcagcacacagaaggacttgatacagatttgcaggtgacaaatgagaagattggacaattggagtccatgcagatctccaccaacactaagcttacagggttggagacagcggtcgcctgcattgacactagccttgctgctcttgtgaggcattttgatgctctcaatgctggaggcaatggtgggggtaatgacgatgatattgacggagagtacgtcgaggataatttagaggatgaatatattgctgacactgaacaagatgatcgagatgctcaagatcgtcgacggctacacaacaatcgacgaggtatgggtggtcaccgccgacgcgaggtacgcaacaatgatgatgctttttctaaaattaaatttaagattcctccttttgatggaaaatatgatcctgatgcgtacctctcttgggagattgctgttgaccaaaaatttgcatgccatgagtttcctgagaacactagagttagagctgctacgagtgagttcaccgattttgcttcggtttggtggatagaacatggcaagaaaaatcctaataacatgccacaaacttgggatgctttgaaacgggtcatgcgggctagatttgttccttcttactatgcacgtgacttgctgaatagattgcaacaattgagacagggtgcgaaaagtgtagaggaatattatcaggagttacaaatgggcttgcttcgttgtaatttagaggaaactgaggacgctgccatggctagatttttgggtgggttaaaccgcgagatttatgacatcgtagactataaagattacactaatatgacccgattgtttcatcttgcttgtaaggctgaaagggaagtgcaaggacgacgtgctagtgccaaggctaatttttctgcaggtaaaacttcatcatggcagacacgcaccactcctccggccggccgtactgcttctccatcttccacacccacaaccagtcgagcagcacctcctccatctagtgacaagtcagcgacaaaggccgctcagccagcaccgagtgcttcttcaatggcatccacaggccgaatgagagatgttcagtgccaccgttgcaagggctttgggcatgtgcagcgtgactgccctagcaagcgagttttggtagtcaaaaacgatggtgagtactcctctgctagtgatttcgatgatgatacacttgctttgcttgcggctgaccatgcagataatgagccaccggaagagcacattggggctgcatttgcggatcactatgagagcctcattgtgcagcgtgtccttagcgcacaaatggagaaggcggagcaaaatcagcgacacacgttgttccaaacaaagtgtgtcgtcaaagagcgttgttgccgcatgatcattgatggaggtagctgcaacaacttggctagcagcgagatggtggagaagcttgcacttagcaccaaaccgcacccacatccataatacatccaatggctgaacaacagtggtaaggcgaaggtaacaaaactggtgcacattaattttgcaattggaaattaccatgatgttgttgaatgtgatgttgtgcccatgcaagcatgtaatattctgctaggtagaccatggcaatttgatagggattctatgcatcatggtaggtccaaccagtactcttttctgtaccatgataagaaaattgtgttgcatcccatgtctcctgaagatattttgcgtgatgatgttgctaaggctgccaaatccaaatgtgagagtgataaaaaagcccaatctgatggcaagaaacctgagacaatcaatttgaaacccaaattcttacttgctactaaatctgatattaatgagttgattgcatcaccttcagttgcctatgctttggtatgcaaagatgctttgatttcacttcacgatatgcagcattctttgccccctgctgttgctaacattttgcagcagtactctgatgtgtttcccaaggaagtgccaccggggctgccaccggtgcgcggcattgagcatcaaatcgacttgatcccaggtgcttccctaccgaaccgtgcgccataccgaaccaaccctgaggaaaccaaggagattcagcgtcaagttcatgagttgcttgataaagggtatgtacgcgagtctcttagtccatgtgcggttccggtaattttggtaccaaagaaagatggttcatggcgtatgtgtgttgattgtagagctattaataacattaccattcgatatcgtcatcctattcctaggttaaatgatatgcttgatgaattgagtggctctattgtgttctccaaagttgatttgcgtagtggttaccaccagattcgtatgaagttgggtgatgaatggaaaacagcatttaaaacgaagtttgggttgtatgagtggttagtgatgccttttggtttaactaatgcacccagcactttcatgaggttgatgaatgaggttttgcgtcctttcattggaaaatttgtggtggtctactttgatgatatcttgatttacagcaagtctatgggtgaacattttaatcatttacgtgctgtttttaatgctcttcgtgatgcacgtttatttggtaaccttgagaagtgcaccttttgcatagatcgagttccttttcttggctatgttgtaactccgcaggggattgaggttgatcaagccaaggttgaggcaattcagagttggccgactcctaaaacggtctcacaagtgcggagctttctaggactcgcggggttctatcgccgctttgtgcaggatttcagcaccattgctgcaccattgaatgcgcttacaaagaagggagtgcctttcacttggggcacatcacaagagaacgccttccacatgttgaaagataagttgacccatgcacctctcctccaacttcccgattttaataagacttttgaacttgaatgtgatgctagtgggattggattgggtggtgttttgctacaagaaggaaaacctgttgcatattttagtgaaaagttgagtgggcctgttctgaattattctacttatgataaggaattgtatgctcttgtgcgaactttagaaacatggcagcattatttgtggcccaaggaatttgtcatacattctgatcatgagtctttgaagcatattcgtagtcaagggaagctgaaccgtagacatgctaaatgggttgaatttattgaatcttttccttatgttatcaaacacaagaaagggaaggagaacatcattgctgatgctttgtctaggagatacactttgttgacacaacttgactacaagatttttggcctagaaacaatcaaagaccaatatgcgcatgatgctgattttaatgatgtgttgctgcattataaggatggaagaacatggaacaaattcgtcatcaatgatgggtttgttttcagagctaacaagctatgcattccagctagctccgttcgcttgttgttgttgcaggaagcgcttggaggcggtttgatgggacattttggtgccaagaagacacatgacatccttgctagtcatttcttttggccacagatgcgaagagatgttggcaggttcgttgctcgctgcgctacatgtcaaaaggctaagtcacgcttacatccacatggtttgtatatgcctcttcctgttcctactgttccttgggaagatatttcaatggattttgtgttaggattgcctaggaccaagagggggcgtgatagcatttttgtggttgtggatcgattttctaaaatggcacatttcataccatgtcataaaactgatgatgcttctcatattgctgatttgttctttcgagaaattgttcgcttgcatggtgtgccaaacacaattgtttctgatcgtgacacaaaatttcttagccatttttggagaactttgtgggctaaattggggactaaacttttgttttctactacttgttatccccaaactgatggacaaactgaagtggtgaatagaaccttgtctactatgcttagggctgttttgaagaaaaatatcaagatgtgggaagaatgcttgcctcatattgaatttgcttataatcgttccttgcattctactacaaaaatgtgcccatttcagattgtgtatggtttgttgcctcgtgctccaattgatttgatgcctttaccatcttctgaaaaactgaattttgatgctaagcaacgtgctgagttgatgttaaaactgcatgagacaactaaagaaaacatagagcgcatgaatgctaagtataagtttgctggtgacaaaggtagaagggaattgaattttgaacctggagatttggtttggttgcatttgcgaaaagaacgatttcctgatttgagaaagtataaattgatgcctagagctgatggaccatttaaagtgttagcaaagattaatgagaatgcatataagattgatttgcctgcagatttcggggttagtcccacatttaacgttgcagatttgaagccgtatttgggagaagaagatgagcttgagtcgaggacgactcaaatgcaagaaggggaggatgatgaggacatcaacaccatcgatacatccacgtccccccatatacagcatgatggtcctattacccgcgctcgtgcacgtcaactaaattatcaggacgagtgccctcgtggccgggttgacgcgcaccacaagttcgcggcgaccattggagacgatcgggccacaaaccctagcgggttcgcatcaggttgggtcggtggttttacaactctagactttgggaatattcatatcacctgga

SEQ ID NO: 14355 - DNA, 3657 bp, Oryza sativa
  Clone ID: TFbOSC10830j.C1.o4.fg
atgcgggctagatttgttccttcttactatgcacgtgacttgctgaatagattgcaacaattgagacagggtgcgaaaagtgtagaggaatattatcaggagttacaaatgggcttgcttcgttgtaatttagaggaaactgaggacgctgccatggctagatttttgggtgggttaaaccgcgagatttatgacatcgtagactataaagattacactaatatgacccgattgtttcatcttgcttgtaaggctgaaagggaagtgcaaggacgacgtgctagtgccaaggctaatttttctgcaggtaaaacttcatcatggcagacacgcaccactcctccggccggccgtactgcttctccatcttccacacccacaaccagtcgagcagcacctcctccatctagtgacaagtcagcggcaaaggccgctcagccagcaccgagtgcttcttcaatggcatccacaggccgaatgagagatgttcagtgccaccgttgcaagggctttgggcatgtgcagcgtgactgccctagcaagcgagttttggtagtcaaaaacgatggtgagtactcctctgctagtgatttcgatgatgatacacttgctttgcttgcggctgaccatgcagataatgagccaccggaagagcacattggggctgctgcatttgcagatcactatgagagcctcattgtgcagcgtgtccttagcgcacaaatggagaaggcggagcaaaatcagcgacacacgttgttccaaacaaagtgtgtcgtcaaagagcgttgttgccgcatgatcattgatggaggtagctgcaacaacttggctagcagcgagatggtggagaagcttgcacttagcaccaaaccgcacccacatccatactacatccaatggctgaacaacagtggtaaggcgaaggtaacaaaactggtgcacattaattttgcaattggaaattaccatgatgttgttgaatgtgatgttgtgcccatgcaagcatgtaatattctgctaggtagaccatggcaatttgatagggattctatgcatcatggtaggtccaaccagtactcttttctgtaccatgataagaaaattgtgttgcatcccatgtctcctgaagatattttgcgtgatgatgttgctaaggctgccaaatccaaatgtgagagtgataaaaaagagcaatctgatggcaagaaacctgagacaatcaatttgaaacccaaatgcttacttgctactaaatctgatattactgagttgattgcatcaccttcagttgcctatgctttggtatgcaaagatgctttgatttcacttcacgatatgcagcattctttgccccctgctgttgctaacattttgcaggagtactctgatgtgtttcccaaggaagtgccaccggggctgccaccggtgcgcggcattgagcatcaaatcgacttgatcccaggtgcttccctaccgaaccgtgcgccataccgaaccaaccctgaggaaaccaaggagattcagcgtcaagttcatgagttgcttgataaagggtatgtacgcgagtctcttagtccatgtgcggttacggtaattttggtaccaaagaaagatggttcatggcgtatgtgtgttgattgtagagctattaataacattaccattcgatatcgtcatcctattcctaggttagatgatatgcttgatgaattgagtggctctattgtgttctccaaagttgatttgcgtagtggttaccaccagattcgtatgaagttgggtgatgaatggaaaacagcatttaaaacgaagtttgggttgtatgagtggttagtgatgccttttggtttaactaatgcacccagcactttcatgaggttgatgaatgaggttttgcgtcctttcattggaaaatttgtggtggtctactttgatgatatcttgatttacagcaagtctatgggtgaacattttaatcatttacgtgctgtttttaatgctcttcgtgatgcacgtttatttggtaaccttgagaagtgcaccttttgcacagatcgagtttcttttcttggctatgttgtaactccgcatgggattgaggttgatcaagccaaggttgaggcaattcagagttggccgactcctaaaacggtctcacaagtgcggagctttctaggactcgcggggttctatcgccgctttgtgcaggatttcagcaccattgctgcaccattgaatgcgcttacaaagaagggagtgcctttcacttggggcacatcacaagagaacgccttccacatgttgaaagataagttgacccatgcacctctcctccaacttcccgattttaataagacttttgaacttgaatgtgatgctagtgggattggattgggtggtgttttgctacaagaaggaaatcctgttgcatattttagtgaaaagttgagtgggcctgttctgaattattctacttatgataaggaattgtatgctcttgtgcgaactttagaaacatggcagcattatttgtggcccaaggaatttgtcatacattctgatcatgagtctttgaagcatattcgtagtcaagggaagctgaaccgtagacatgctaaatgggttgaatttattgaatcttttccttatgttatcaaacacaagaaagggaaggagaacatcattgctgatgctttgtctaggagatacactttgttgacacaacttgactacaagatttttggcctggaaacaatcaaagaccaatatgcgcatgatgctgattttaatgatgaagcgcatggaggcggtttgatgggacattttggtgccaagaagacacatgacatccttgctagtcatttattttggccacagatgcgaagagatgttggcagggctgttttgaagaaaaatatcaagatgtgggaagaatgcttgcctcatattgaatttgcttataatcgttccttgcattctactacaaaaatgtgcccatttcagattgtgtatggtttgttgcctcgtgctccaattgatttgatgcctttaccatcttctgaaaaactgaattttgatgctaagcaacgtgctgagttgatgttaaaactgcatgagacaactaaagaaaacatagagcgcatgaatgctaagtataagtttgctggtgacaaaggtagaagggaattgaattttgaacctggagatttggtttggttgcatttgcgaaaagaacgatttcctgatttgagaaagtctaaattgatgcctagagctgatggaccatttaaagtgttagcaaagattaatgagaatgcatataagattgatttgcctgcagacttcggggttagtcccacatttaacgttgcagatttgaagccgtatttgggagaagaagatgagcttgagtcgaggactactctaatgcaagaaggggacgatgatgaggacatcaacaccatcgatacatccacgtccccccatatacagcatgatggtcctattacccgcgctcgtgcacgtcaactaaattatcaggacgagtgccctcgtggccgggttgatgcgcaccacaagttcgcggcgaccattggagacggtgtatcggttgctaaggcgcagcgtctttggacagttgtagtcgggccgtga

SEQ ID NO: 14356 - DNA, 2950 bp, Oryza sativa
  Clone ID: TFbOSC21171j.C1.o1.fg
atggcaggtccagaggataaagatgaggagggtgcatctcattccccacgcaccaaaggcatcatccaatactttacaaggcaagtgaagcagcacacagaaggacttgatacagatttgcaggtgacaaatgagaagattggacaattggagtccacgcagatctccaccaacactaagcttacagggctggagacagcggtcgcccgcattgacactagccttgctgctcttgtgaggcattttgatgctctcaatgctggaggcaatggtgggggtaatgatgatgacattgacggagagtacgtcgaggataatttggaggatgaatatattgctgacactgaacaagatgatcgagatgctcgagatcgtcgacggctacacaacaatcgacgaggtatgggtggtcgccgccgacgcgaggtacgcaacaatgatgatgctttttctaaaattaaatttaagattcctccttttgatggaaaatatgatcctgatgcgtacctctcttgggagattgctgttgaccaaaaatttgcatgccatgagtttcctgagagcactagagttagagctgctacgagtgagttcaccgattttgcttcggtttggtggatagaacatggcaagaaaaatcctaataacatgccacaaacttgggatgctttgaaacgggtcatgcgggctagatttgttccttcttactatgcacgtgacttgctgaataggttgcaacaattgagacagggtgcgaaaagtgtagaggaatattatcaggagttacaaatgggcttgcttcgttgtaatttagaggaaactgaggacgctgccatggctagatttttgggtgggttaaaccgcgagatttatgacatcgtagactataaagattacactaatatgacccgattgtttcatcttgcttgtaaggctgaaagggaagtgcagggacgacgtgctagtgccaaggctaatttttctgcaggtaaaacttcatcatggcagacacgcaccactcctccggccggccgtactgcttctccatcttccacacccacaaccagtcgagcagcacctcctccatctagtgacaagtcagcgacaaaggctgctcagcccgcaccgagtgcttcttcaatggcatccacaggccgaatgagagatgttcagtgccaccgttgcaagggctttgggcatgtgcagcgtgactgccctagcaagcgagttttggtagtcaaaaacgatggtgagtactcctctgctagtgatttcgatgatgatacacttgctttgcttgcggctgaccatgcagataatgagccaccggaagagcacattggggctgcatttgcggatcactatgagagcctcattgtgcagcgtgtccttagcgcacaaatggagaaggcggagcaaaatcagcgacacacgttgttccaaacaaagtgtgtcgtcaaagagcgttgttgccgcatgatcatggatggaggtagctgcaacaacttggctagcagcgagatggtggagaagcttgcacttagcacaaaaccgcacccacatccatactacatccaatggctgaacaacagtggtaaggcgaaggtaacaaaactggtgcacattaattttgcaattggaaattaccatgatgttgttgaatgtgatgttgtgcccatgcaagcatgtaatattctgctaggtagaccatggcaatttgatagggattctatgcatcatggtaggtccaaccagtactcttttctgtaccatgataagaaaattgtgttgcattccatgtctcctgaagatattttgcgtgatgatgttgctaaggctgccaaatccaaatgtgagagtgataaaaaagcccaatctgatggcaagaaacctgagacaatcaatttgaaacccaaatgcttacttgctactaaatctgatattaatgagttgattgcatcaccttcagttgcctatgctttggagtactctgatgtgtttcccaaggaagtgccaccggggctgccaccggtgcgcggcattgagcatcaaatcgacttgatcccaggtgcttccctaccgaaccgtgcgccataccgaacaaaccctgaggaaaccaaggagattcagcgtcagttcatgagttgcttgataaagggtatgtacgcgagtctcttagtccatgtgcggttccgagctattaataacattaccattcgatatcgtcatcctattcctaggttagatgatatgcttgatgaattgagtggctctattgtgttctccaaagttgatttgcgtagtggttaccaccagattcgtatgaagttgggtgatgaatggaaaacagcatttaaaacgaagtttgggttgtatgagtggttagtgatgccttttggtttaactaatgcacccagcactttcatgaggttgatgaatgaggttttgcgtcctttcattggaaaatttgtggtggtctactttgatgatatcttgatttacagcaagtctatgggtgaacattttaatcatttacgtgctgtttttaatgctcttcgtgatgcacgtttatttggtaaccttgagaagtgcaccttttgcacagatcgagtttcttttcttggctatgttgtaactccgcaggggattgaggttgatcaagccaaggttgaagcaattcagagttggccgactcctaaaacggtctcacaagtgcggagctttctaggactcgcggggttctatcgccgctttgtgcaggatttcagcaccattgctgcaccattgaatgtgcttacaaagaagggagtgcctttcacttggggcacatcacaagagaacgccttccacatgttgaaagataagttgacccacgcacctctcctccaacttcccgattttaataagacttttgaacttgaatgtgatgctagtgggattggattgggtg

SEQ ID NO: 14357 - DNA, 4704 bp, Oryza sativa
  Clone ID: TFbOSC27261j.C1.o2.fg
atggcaggtctagaggataaagatgaggagggtgcatctcattccccacgcaccaaaggcatcatccaatactttacaaggcaagtgaagcagcacacagaaggacttgatacagatttgcaggtgacaaatgagaagattggacaattggagtccacgcagatctccaccaacactaagcttacagggctggagacagcggtcgcccgcattgacactagccttgctgctcttgtgaggcattttgatgctctcaatgctggaggcaatggtgggggtaatgacgatgacattgacggagagtacgtcgaggataatttggaggatgaatatattgctgacactgaacaagatgatcgagatgctcgagatcgtcgacggctacacaacaatcgacgaggtatgggtggtcgccgccgacgcgaggtacgcaacaatgatgatgctttttctaaaattaaatttaaaattcctccttttgatggaaaatatgatcctgatgcgtacctctcttgggagattgctgttgaccaaaaatttgcatgccatgagtttcctgagaacactagagttagagctgctacgagtgagttcaccgattttgcttcggtttggtggatagaacatggcaagaaaaatcctaataacatgccacaaacttgggatgctttgaaacgggtcatgcgggctagatttgttccttcttactatgcacgtgacttgctgaataggttgcaacaattgagacagggtgcgaaaagtgtagaggaatattatcaggagttacaaatgggcttgcttcgttgtaatttagaggaaactgaggacgctgccatggctagatttttgggtgggttaaaccgcgagatttatgacatcgtagactataaagattacactaatatgacccgattgtttcatcttgcttgtaaggctaaaagggaagtgcagggacgacgtgctagtgccaaggctaatttttctgctggtaaaacttcatcatggcagacacgcaccactcctccggccggccgtactacttctccatcttccacacccacaaccagtcgagcagcacctcctccatctggtgacaagtcagcgataaaggctgctcagccagcaccgagtgcttcttcaatggcatccacaggccgaatgagagatgttcagtgccaccgttgcaagggctttgggcatgtgcagcgtgactgccctagcaagcgagttttggtagtaaaaaacgatggtgagtactcctctgctagtgatttcgatgatgatacacttgctttgcttgcggctgaccatgcagataatgagccaccggaagagcacattggggctgcatttgcggatcactatgagagtctcattgtgcagcgtgtccttagcgcacaaatggagaaggcggagcaaaatcagcgacacacgttgttccaaacaaagtgtgtcgtcaaagagcgttgttgccgcatgatcattgatggaggtagctgcaacaacttggctaacagcgagatggtggagaagcttgcacttagcaccaaaccgcatccacatccatactacatccaatggctgaacaacagtggtaaggcgaaggtaacaaaactggtgcacattaattttgcaattggaaattaccatgatgttgttgaatgtgatgttgtgcccatgcaagcttgtaatattctgctaggtagaccatggcaatttgatagggattctatgcattatggtaggtcaaaccagtactcttttctgtaccatgataagaaaattgtgttgcatcccatgtctcctgaagatattttgcgtgatgatgttgctaaggctgccaaatccaaatgtgagagtgataaaaaagcccaatctgatggcaagaaacctgagacaatcaatttgaaacccagatgcttacttgctactaaatctgatattaatgagttgattgcatcaccttcagttgcctatgctttggtatgcaaagatgctttgatttcacttcacgatatgcagcattctttggcccctgctgttgctaacattttgcaggagtactctgatgtgtttcccaaggaagtgccaccggggctgccaccggtgcgcggcattcagcatcaaatcgacttgatcccaggtgcttccctaccgaatcgtgcgccataccgaaccaaccctgaggaaaccaaggagattcagcgtcaagttcatgagttgcttgataaagggtatgtacgcgagtctcttagtccatgtgcggttccggtaattttggtaccaaagaaagatggttcatggcgtatgtgtgttgattgtagagctattaataacattaccattcgatatcgtcatcctattcctaggttagatgatatgcttgatgaattgagtggctctattgtgttctccaaagttgatttgcgtagtggttaccaccagattcgtatgaagttgggtgatgaatggaaaacagcatttaaaacaaagtttgggttgtatgagtggttagtgatgccttttggtttaactaatgcacccagcactttcatgaggttgatgaatgaggttttgcgtcctttcattggaaaatttgtggtggtctactttgatgatatcttgatttacagcaagtctatgggtgaacattttaatcatttacgtgctgtttttaatgctcttcgtgatgcacgtttatttggatttcagcaccattgctgcaccattgaatgcgcttcaaagaagggagtgcctttcacttggggcacatcacaagagaacgccttccacatgttgaaagataagttgactcatgcacctctcctccaacttcccgattttaataagacttttgaacttgaatgtgatgctagtgggattggattgggtggtgttttgctacaagaaggaaaacctgttgcatattttagtgaaaagttgagtgggcctgttctgaattattctacttatgataaggaattgtatgctcttgtgcgaactttagaaacatggcagcattatttgtggcccaaggaatttgtcatacattctgatcatgagtctttgaagcatattcgtagtcaagggaagctgaaccgtagacatgctaaatgggttgaatttattgaatcttttccttatgttatcaaacacaagaaagggaaggagaacatcattgctgatgctttgtctaggagatacactttgttgacacaacttgactacaagatttttggcctggaaacaatcaaagaccaatatgcgcatgatgctgattttaatgatgtgttgctgcattgtaaggatggaagaacatggaacaaattcgtcatcaatgatgggtttgttttcagagctaacaagctatgcattccagctagctccgttcgcctgttgttgttgcaggaagcgcatggaggcggtttgatgggacattttggcgccaagaagacacatgacatccttgctagtcatttcttttggccacagatgcgaagagatgttggcaggttcgttgctcgctgcgctacatgtcaaaaggctaagtcacgcttacatccacatggtttgtatatgcctcttcctgttcctactgttccttgggaagatatttcaatggactttgtgttaggattgcctaggaccaagagggggcgtgatagcatttttgtggttgtggatagattttctaaaatggcacatttcataccatgtcataaaactgatgatgcttctcatatcgctgatttgttctttcgagaaattgttcgcttgcatggtgtgccaaacacaattgtttctgatcgtgacacaaaatttcttagccatttttggagaactttgtgggctaaattggggactaaacttttgttttctactacttgtcatccccaaactgatggacaaactgaagtggtgaatagaaccttgtctactatgcttagggctgttttgaagaaaaatatcaagatgtgggaagaatgcttgcctcatattgaatttgcttataatcgttccttgcattctactacaaaaatgtgcccttttcagattgtgtatggtttgttgcctcgtgctccaattgatttgatgcctttaccatcttctgaaaaactgaattttgatgctaagcaacgtgctgagttgatgttaaaactgcatgagacaactaaagaaaacatagagcgcatgaatgctaagtataagtttgctggtgacaaaggtagaagggaattgaattttgaacctggagatttggtttggttgcatttgcgaaaagaacgatttcctgatttgagaaagtctaaattgatgcctagagctgatggaccatttaaagtgttagcaaagattaatgagaatgcatataagattgatttgcctgcagatttcggggttagttccacatttaacgttgcagatttgaagccgtatttgggagaagaagatgagcttgagtcgaggacgactcaaatgcaagaaggggaggatgatgaggacatcaacaccatcgatacatccacgtccccccatgtacagcatgatggtcctattacccgcgctcgtgcacgtcaactaaattatcaggacgagtgccctcgtggccgggttgacgcgcaccacaagttcgcggcgaccattggagacggtgtatcggttgctaaggcgcagcgtctttggacagttgtagtcgggccgtga

SEQ ID NO: 14358 - DNA, 4293 bp, Oryza sativa
  Clone ID: TFbOSC28357j.C1.o1.fg
atggctactacagatacaaccatagctcacattatggatgaacaagatgatatcaagatcaagtcctccaagtgctggaatccgattcggccacctgctacactgctgacttcaaacggctaccgaatttgcatacgacctccgttttcggcccatgagtacttgatggaaagttctcggagtcctctttccaacagatctggcctcatcagcagactccatctcgtttggccgcaaatacaaaaacaaggtgctgcgtcacctgtcatgggccaatgggcttgtaacttcgtttgggaccccggcccaagtggggcccatgtggggaatagggttgatctgcaccggcaagatcaacaacccacggagagttatcacaactcaccgaaagatcgggccaacaacagccttgagtgtcgagaggaactcagggttcatcaggtggtctcagagctttcatttctcggattgcgcaagggaatacgagaacatcgacttctacaccttcgacgagatatgacgacttcttcatgtgatgcatatgaggaagttcagaaaagtctccaaaatgagaagaacgatatgtttgagatgtcacttccatcactcgcgaatgaggagatggctgatgcagctacattatctgaagagggcataaaaggtaaattaaatggtgcagaaattactcaaggaatagggttgatctgcaccggcaagatcaacaacccacggagaggtgtatcgattgctaaggcgcaacacaacgtctcactagcaccaatattacaagagatggtttccactaatcagagtgctttcataaggaagagagctatacatgacaacttcatgtatgtgcaaaacccggtcaagagactgcatagaaggaaaacacccaccttgttgctcaaacttgacatctcaaaggcattcgactctttgttgctggatttcctaggagctgttcaaggcttcccaaccagttacttagcctacctcttcaccttagaaaactatggaagaggcatggactccccagcgacccccatgaacttctcgccgcttctcagtctagcaccccgtaatgaaccatgctatacaaaagaagaaaatcaagatgtgacaatttcatccctctcattgaaaaaattggctccagaattccaggacgagtgccctcgtggccgggttgacgcgcaccacaagttcgcggcgaccattggagacggtccagagaataaagatgaggagggtgcatctcattccccacgcaccaaaggcaccatccaatactttacaaggaaagtgaagcagcacacagaaagacttgagacagatttgcaggtgacaaatgagaagattggacaattggagtccacgcagatcttcaccaacactaagcttacagggctggagacagcggtcgcccgcattgacactagccttgctgcacttgtgaggcattttgatgctctcaatgctggaggcaatggtgggggtaatgacgatgacattgacggagagtacgtcgaggataatttggaggatgaatatattgctgacactgagcaagatgatcgagatgctcgagatcatcgacggctacacaacaatcgacgagaggaaactgaggatgctgccatggctagatttttgggtgggttaaaccgcgagatttatgacatcgtagactataaagattacactaatatgacccgattgtttcatcttgcttgtaaaacttcatcatggcagacacgcaccactcctccggccggccgtactgcttctccatcttccacacccgcaaccagtcgggcagcacctcctccatctagtgacaagtcagcgacaaaggctgctcagccagcactgagtgcttcttcagtggcatccacaggccgaacgagagatgttcagtgccaccgttgcaagggctttgggcatgtgcagcgtgactgccctagcaagcgagttttggtagtcaaaaacgatggtagaccatggcaatttgatagggattctatgcatcatggtaggtcaaaccagtactcttttctgtaccatgataagaaaattgtgttgcatcccatgtctcctgaagatattttgcgtgatgatgttgctaaggctgccaaatccaaatgtgagagtgataaaaaagcccaatctaatggcaagaaacctgagacaatcaatttgaaacccaaatgcttacttgctactaaatctgatattaatgagttgattgcatcaccttcagttgtctatgctttggagtactctgatgtgtttcccaaggaagtgccaccggggctgccaccggtgcgcggcattgagcatcaaatcgacttaatcccaggtgcttccctacccaaccgtgcgccataccgaaccaaccctgaggaaaccaaggagattcagcgtcaagttcatgagttgcttgataaaaggttagatgatatgcttgatgaattgagtggctctattgtgttctccaaagttgatttgcgtagtggttaccaccagattcgtatgaagttgggtgatgaatggaaaacagcatttaaaacgaagtttgggttgtatgagtggttagtgatgccttttggtttaactaatgcacccagcactttcatgaggttgatgaatgaggttttgcgtcctttcattggaaaatttgtggtggtctactttgatgatatcttgatttacagtaagtctatgggtgaacattttaatcatttacgtgctgtttttaatgctcttcgtgatgcacgtttatttggtaaccttgagaagtgcaccttttgcacagatcgagtttcttttcttggctatgttgtaactctgcaggggattgaggttgatcaagccaaggttgaggcaattcagagttggccgactcctaaaacggtctcacaagtgcggagttttctaggactcgcggggttctatcgccgctttgtgcaggatttcagcaccattgctacaccattgaatgcgcttacaaagaagggagtgcctttcacttggggcacatcacaagagaacgccttccacatgttgaaagataagttgacccatgcacctctcctccaacttcccgattttaataagacttttgaacttgaatgtgatgctagtgggattggattgggtggtattttgctacaagaaggaaaacctgttgcatattttagtgaaaagttgagtgggcctgttctgaattattctacttatgataaggaattgtatgctcttgtgcgaactttagaaacatggcagcattatttgtggcccaaggaatttgtcatacattctgatcatgagtctttgaagcatattcgtagtcaagggaaactaaactgtagacatgctaaatgggttgaatttattgaatcttttccttatgttatcaaacacaagaaagggaaggagaacatcattgctgatgctttgtctaggagatacactttgttgacacaacttgactataagatttttggcctggaaacaatcaaagaccaatatgcgcatgatgctgattttaatgatgtgttgctgcattgtaaggatggaagaatatggaacaaattcgtcatcaatggtgggtttgttttcagagctaacaagctatgcattccagctagctccgttcgcttgttgttgttgcaggaagcgcatggaggcggtttgatggcacattttggtgccaagaagacacatgacatccttgctagtcatttcttttggccacagatgcgaagagatgttggcagggctgttttgaagaaaaatatcaagatgtgggaagaatgcttgcctcatattgaatttgcttataatcgttccttgcattctactacaaaaatgtgcccatttcagattgtgtatggtttgttgcctcgtcctccaattgatttgatgcctttaccatcttctgaaaaactgaattttgatgctaagcaacatgctgagttgatgttaaaactgcatgagacaactaaagaaaacatagagcgcatgaatgctaagtataagtttgctggtgacaaagatttcagggttagtcccacatttaacattgcagatttgaagctgtatttgggagaagaagatgagcttgagtcgaggacgactcaaatgcaagaaggggaggatgatgaggacatcaacaccatcgatacatccacgttccccccatgtacaccatcgatacatccacgccgcctccatgtacagcatgatggtcctattacccgcgctcgtgcacgtcaactaaattatcag

SEQ ID NO: 14359 - DNA, 1416 bp, Oryza sativa
  Clone ID: TFbOSC29471j.C1.o1.fg
atggcaggtccagaggataaagatgaggagggtgcatctcattccccacgcaccaaaggcatcatccaatactttacaaggcaagtgaagcagcacacagaaggacttgatacagatttgcaggtgacaaatgagaagattggacaattggagtccacgcagatctccacaaacactaagcttacagggttggagacagcggtcgcccgcattgacactagccttgctgctcttgtgaggcattttgatgctctcaatgctggaggcaatggtgggggtaatgacgatgacattgacggagagtacgtcgaggataatttagaggatgaatatattgctgacactgaacaagatgatcgagatgctcaagatcgtcgacggctacacaacaatcgacgagattcctcctttgatggaaaatatgatcctgatgcgtacctctcttgggagattgctgttgaccaaaaatttgcatgccatgaatttcttgagaacactagagttagagctgctacgagtgagttcaccgattttgcttcggtttggtggatagaacatggcaagaaaaatcctaataacatgccacaaacttgggatgctttgaaacgggtcatgcgggctagatttgttccttcttacgatgcatgtgacatgctgaataggttgcaacaattgagacagggtgcgaaaagtgtagaggaatattatcaggagttacaaatgggcttgcttcgttgtaatttagaggaaactgaggacgctgccatggctagatttttgggtgggttaaaccgcgagatttatgacatcgtagactataaagattacactaatatgacccgattgtttcatcttgcttgtaaggctgaaagggaagtgcagggacgacgtgctagtgccaaggctaatttttctacaggtaaaacttcatcatggcaacgcaccactcctccggccggccgtattgcttctctatcttccacacccacaaccagtcgagcagcacctcctccatctagtgacaagtcagcgacaaaggctgctcagccagcaccgagtgcttcttcaatggcatccataggccaaatgagagatgttcagtgccaccgttgcaagggctttgggcatgtgcagcgtgactgccctagcaagcgagttttggtagtcaaaaacgatggtgagtactcctctgctagtgatttcgatgatgatacacttgctttgcttgcggctgaccatgcagataatgagccaccggaagagcacattggggctgcatttgcggatcactatgagagcctcattgtgcagcgtgtccttagcgcacaaatggagaaggcgggagcaaaatcagcgacacacgttgttccaaacaaagtgtgtcgtcaaagagcgttgttgccgcatgatcattga

SEQ ID NO: 14360 - DNA, 1018 bp, Oryza sativa
  Clone ID: TFbOSC400436j.C1.o27.gm
atggagaggatccaaagggaagaggattcgcgcggggtggattcggattgcagggcagcgccaacttctgacggccgccacgacttcatgcgaactccgatttgggacgagtgccctcgtggccgggttgacgcgccccacaagttcgcggcgaccattggagacgcccaccaacagctccaccacaaacccgactacagcttgacaggtcttgttgctacagcaccgatacacctcgttccacggttgctaacttgtgggttgctgtccccctcctgtgggcaaggtccagaggataaagatgaggagggtgcatctcattccccacgcaccaaaggcatcatccaatactttacaaggcaagtgaagcagcacacagaaggacttgatacagatttgcaggtgacaaatgagaagattggacaattggagtccacgcagatctccaccaacactaagcttacagggctggagacagcggtcgcccgcattgacactagccttgctgctcttgtgaggcattttgatgctctcaatgctggaggcaatggtgggggtaatgacgatgacattgacggagagtacgtcgaggataatttggaggatgaatatattgctgacactgaacaagatgatcgagatgctcgagatcgtcgacggctacacaacaatcgacgaggccgaatgagagatgttcagtgccaccgttgcaagggctttgggcatgtgcagcgtgactgccctagcaagcgagttttggtagtcaaaaacgatggtgagtactcctctgctattgatttcgatgatgatacacttgctttgcttgcggctgaccatgcagataatgagccaccggaagagcacattggggctgcatttgcggatcactatgagagcctcattatgcagcatgtccttagcgcacaaatggagaaggcggagcaaaatcagcgacacacgttgttccaaacaaagtgtgtcgtcaaagagcgttgttgccgcatgatcattgatggag

SEQ ID NO: 14361 - DNA, 4185 bp, Oryza sativa
  Clone ID: TFbOSC400452j.C1.o7.fg
atgggcaacttaagaggtcatgagttcaaggattggaatggtgtcgtacaatataggggcattcatgcaagtaaatttgttagttttgaagggggcattcatgcaagttcaggttttaaagtgtgggcactccaacagctactagcctggaagactcaaagtcttaaaggtgccatttctattttgggccccacaaccaataactctaatgggacgcacatttctccgatagtctcaaaggtgctcatgtggttgaaaaacactgtaggcgccggttttagctatttcaacacctatagtgctgtcctctgcgcgtctttctgcagaagtgaagcaagcagcacagtggctgccccgctgcagtgcagatcgactaggctacaaatattcccaggcagctatagtttgcaagcctttgggcgcatgatgaggagcttgatcgagctacttcgactcttcatcctgtatacatgtgacttaatgcctcaggatagtattgccggtgatggatcgggagtcgacttggtggacgagtgcccttgtggccaggttgacgcgcaccacaagttcgcggtgaccattggagacggtgtatcggttgctaaggcgcagcgtctttggacggtgacaaatgagaagattggacaattgaagtccacgcagatctccaccaacactaagcttacagtgctggagacagcggtcgcccgcattgacacttgccttgctgctcttgtgaggcattttgatgctctcaatgctggaggcaatggtgggggtaatgacgatgacattgacggaaagtacgtcgaggataatttggaggatgaatatattgctgacactgaacaagatgatcgagatgctcgagatcgtcgacggctacacaacaatcgacgagaacatggcaagaaaaatcctaataacatgccacaaacttgggatgctttgaaacgggtcatgcgggctagatttgttccttcttactatacacgtgacttgctgaataggttacaacaattgagacaaggtgcaaaaagtgtagaggaatattatcaggagttacaaatgggcttgcttcgttgtaatttagaggaaactgaggacgctgccatggctagatttttgggtgggttaaaccgcgagatttttgacatcgtagactataaagattacactaatatgacccgattgtttcatcttacttgtaaggctgaaagggaagtgcagggacgacgtgctagtgccaaggctaatttttctgcaggtaaaacttcatcatggcagacacgcaccactcctccggccggccgtactgcttctccatcttccacacccacaatcagtcgagcagcacctcctccatctagtgacaagtcagcgacaaaggctgctcagccagcactgagtgcttcttcaatggcatccacaggccgaacgagagatgttcagtgccaccgttgcaagggctttgggcatgtgcagcgtgactgccctagcaagcgagttttggtagtcaaaaaagatggtgagtactcctctgctagtgatttcgatgatgatacacttgctttgcttgcggctgaccatgcagataatgagccaccggaagagcacattggggctgcatttgcggatcactatgagagcctcattgtgcagcgtgtccttggcgcacaaatggagaaggcggagcaaaatcagcaacacacgttgttccaaacaaagtgtgtcgtcaaagagcgttgttgccgcatgatcattgatggaggtagctgcaacaacttggctagcagcgagatggtggagaagcttgcacttagcaccaaaccgtacccacatccatactacattcaatggctgaacaatagtggtagaccatggcaatttgatagggattctatgcatcatggtaggtcaaaccagtacttttttctgtaccatgataagaaaattgtgttgcatcccatgtctcctgaagatattttgcgtgatgatgttgctaaggctaccaaatccaaatgtgagagtgataaaaaagcccaatctgatggcaagaaacctgagacaatcaatttgaaacccaaatgcttaattgctactaaatctgatattaatgagttgattgcatcaccttcagttgcctatgctttggagtactctgatgtgtttcccaaggaagtgccaccggggctgccaccggtgcttccctacccaaccgtgcgccataccggaccaaccctgaggaaaccaaggagattcagcgttaagttcatgagttgcttgataaagggtatgtacgcgagtctcttagtccatgtgcggttccggtttgatgatatgcttgatgaattgagtggctctattgtgttctccaaagttgatttgcgtagtggttaccaccagattcgtatgaagttgggtgatgaatggaaaattgcatttaaaacgaagtttaggttgtatgagtggttagtgatgccttttggtttaactaatgcacccagcactttcatgaggttgatgaatgaggttttgcgtcctttcattggaaaatttgtggtggtctactttgatgatatcttgatttacagcaagtctatgggtgaacattttaatcatttacgtgctgtttttaatgctcttcgtgatgcacgtttatttggtaaccttgagaagtgcagcttttgcacagatcgagtttcttttcttggctatgttgtaactccgcaggggattgaggatttcagcaccattgctgcactattgaatgcgcttacaaagaagggagtgcctttcacttggggcacatcacaagagaacgccttccacatgttgaaagataagttgacccatacacctctcctccaacttcccgattttaataagacttttgaacttgaatgtgatgctagtgggattggattgggtggtgttttgctacaagaaggaaaacctgttgcatattttagtgaaaagttgagtgggcctgttctgaattattctacttatgataaggaattgtatgctcttgtgcgaactttagaaacatggcagcattatttgtggcccaaggaatttgtcatacattctgatcatgagtctttgaagcatattcgtagtcaagggaaactgaacagtagacatgctaaatgggttgaatttattgaatcttttccttatgttatcaaacacaagaaagggaaggagaacatcattgctgatgctttgtctaggagatacactttgttgacacaacttgactacaagatttttggcctggaaacaatcaaagaccaatatgcgcatgatgctgattttaatgaagcgcatggaggtggtttgatgggacattttggtgccaagaagacacatgacatccttgctagtcatttcttttggccacagatgcgaagagatgttggcagggctgttttgaagaaaaatatcaagatgtgggaagaatgcttgcctcatattgaatttgcttataatcgttccttgcattctactacaaaaatgtgcccatttcagattgtgtatggtttgttgcctcgtgctccaattgatttgatgcctttaccatcttctgaaaaactgaattttgatgctaagcaatgtgctgagttgatgttaaaactgcatgagacaactaaagaaaacatagagcgcatgaatgctaagtataagtttgctggtgacaaaggtagaagggaattgaattttgaacctagagatttggtttggttgcatttgcgaaaagaacgatttcctgatttaagaaagtctaaattgatgcctagagctgatggaccatttaaagtgttagcaaagattaatgagaatgcgtataagcttgatttgcctgcagatttcggggttagtcccacatttaacgttgcagatttgaagccgtatttgggagaagaagatgagcatgagtcgaggacgactcaaatgcaagaaggggaggatgatgaggacatcaacaccatcgatacatccacgtccccccatgtacaacatgatggttctattacccgcgctcgtgcacgtcaactaaattatcaggacgagtgccctcgtggccgggttgacgcgcaccacaagttcgcgtcgaccattggagacggtgtatcggttgctaaggcgcagcgtctttggacggttgtagtcgggccgtga

SEQ ID NO: 14362 - DNA, 3492 bp, Oryza sativa
  Clone ID: TFbOSC400454j.C1.o10.fg
gacgagtgcccttgtggccaggttgacgcgcaccacaagttcgcggtgaccattggagacggtgtatcggttgctaaggcgcagcgtctttggacggtgacaaatgagaagattggacaattgaagtccacgcagatctccaccaacactaagcttacagtgctggagacagcggtcgcccgcattgacacttgccttgctgctcttgtgaggcattttgatgctctcaatgctggaggcaatggtgggggtaatgacgatgacattgacggaaagtacgtcgaggataatttggaggatgaatatattgctgacactgaacaagatgatcgagatgctcgagatcgtcgacggctacacaacaatcgacgagaacatggcaagaaaaatcctaataacatgccacaaacttgggatgctttgaaacgggtcatgcgggctagatttgttccttcttactatacacgtgacttgctgaataggttacaacaattgagacaaggtgcaaaaagtgtagaggaatattatcaggagttacaaatgggcttgcttcgttgtaatttagaggaaactgaggacgctgccatggctagatttttgggtgggttaaaccgcgagatttttgacatcgtagactataaagattacactaatatgacccgattgtttcatcttacttgtaaggctgaaagggaagtgcagggaccacgtgctaatgccaaggctaatttttctgcaggccgaacgagagatgttcagtgccaccgttgcaagggctttgggcatgtgcagcgtgactgccctagcaagcgagttttggtagtcaaaaaagatggtgagtactcctctgctagtgatttcgatgatgatacacttgctttgcttgcggctgaccatgcagataatgagccaccggaagagcacattggggctgcatttgcggatcactatgagagcctcattgtgcagcgtgtccttggcgcacaaatggagaaggcggagcaaaatcagcaacacacgttgttccaaacaaagtgtgtcgtcaaagagcgttgttgccgcatgatcattgatggaggtagctgcaacaacttggctagcagcgagatggtggagaagcttgcacttagcaccaaaccgtacccacatccatactacattcaatggctgaacaatagtggtagaccatggcaatttgatagggattctatgcatcatggtaggtcaaaccagtacttttttctgtaccatgataagaaaattgtgttgcatcccatgtctcctgaagatattttgcgtgatgatgttgctaaggctaccaaatccaaatgtgagagtgataaaaaagcccaatctgatggcaagaaacctgagacaatcaatttgaaacccaaatgcttaattgctactaaatctgatattaatgagttgattgcatcaccttcagttgcctatgctttggagtactctgatgtgtttcccaaggaagtgccaccggggctgccaccggtgcttccctacccaaccgtgcgccataccggaccaaccctgaggaaaccaaggagattcagcgttaagttcatgagttgcttgataaagggtatgtacgcgagtctcttagtccatgtgcggttccggtttgatgatatgcttgatgaattgagtggctctattgtgttctccaaagttgatttgcgtagtggttaccaccagattcgtatgaagttgggtgatgaatggaaaattgcatttaaaacgaagtttaggttgtatgagtggttagtgatgccttttggtttaactaatgcacccagcactttcatgaggttgatgaatgaggttttgcgtcctttcattggaaaatttgtggtggtctactttgatgatatcttgatttacagcaagtctatgggtgaacattttaatcatttacgtgctgtttttaatgctcttcgtgatgcacgtttatttggtaaccttgagaagtgcagcttttgcacagatcgagtttcttttcttggctatgttgtaactccgcaggggattgaggatttcagcaccattgctgcactattgaatgcgcttacaaagaagggagtgcctttcacttggggcacatcacaagagaacgccttccacatgttgaaagataagttgacccatacacctctcctccaacttcccgattttaataagacttttgaacttgaatgtgatgctagtgggattggattgggtggtgttttgctacaagaaggaaaacctgttgcatattttagtgaaaagttgagtgggcctgttctgaattattctacttatgataaggaattgtatgctcttgtgcgaactttagaaacatggcagcattatttgtggcccaaggaatttgtcatacattctgatcatgagtctttgaagcatattcgtagtcaagggaaactgaacagtagacatgctaaatgggttgaatttattgaatcttttccttatgttatcaaacacaagaaagggaaggagaacatcattgctgatgctttgtctaggagatacactttgttgacacaacttgactacaagatttttggcctggaaacaatcaaagaccaatatgcgcatgatgctgattttaatgaagcgcatggaggtggtttgatgggacattttggtgccaagaagacacatgacatccttgctagtcatttcttttggccacagatgcgaagagatgttggcagggctgttttgaagaaaaatatcaagatgtgggaagaatgcttgcctcatattgaatttgcttataatcgttccttgcattctactacaaaaatgtgcccatttcagattgtgtatggtttgttgcctcgtgctccaattgatttgatgcctttaccatcttctgaaaaactgaattttgatgctaagcaatgtgctgagttgatgttaaaactgcatgagacaactaaagaaaacatagagcgcatgaatgctaagtataagtttgctggtgacaaaggtagaagggaattgaattttgaacctagagatttggtttggttgcatttgcgaaaagaacgatttcctgatttaagaaagtctaaattgatgcctagagctgatggaccatttaaagtgttagcaaagattaatgagaatgcgtataagcttgatttgcctgcagatttcggggttagtcccacatttaacgttgcagatttgaagccgtatttgggagaagaagatgagcatgagtcgaggacgactcaaatgcaagaaggggaggatgatgaggacatcaacaccatcgatacatccacgtccccccatgtacaacatgatggttctattacccgcgctcgtgcacgtcaactaaattatcaggacgagtgccctcgtggccgggttgacgcgcaccacaagttcgcgtcgaccattggagacggtgtatcggttgctaaggcgcagcgtctttggacggttgtagtcgggccgtga

SEQ ID NO: 14363 - DNA, 3705 bp, Oryza sativa
  Clone ID: TFbOSC400675j.C1.o16.fg
atggcaggtccagaggataaagatgaggaggctgcatctcattccccacgcaccaaaggcatcatccaatactttacaaggcaagtgaagcagcacacagaaggacttgatacagatttgcaggtgacaaatgagaagattggacaattggagtccacgcagatctccaccaacactaagcttacagggctggagacagcggtcgcccgcattgacactagccttgctgctcttgtgaggcattttgatgctctcaatgctggaggcaatggtgggggtaatgacgatgacattgacggagagtacgtcgaggataatttggaggatgaatatattgctgacactgaacaagatgatcgagatgctcgagatcgtcgacggctacacaacaatcgacgaggtatgggtggtcgccgccgacgcgaggtacgcaacaatgatgatgctttttctaaaattaaatttaagattcctccttttgatggaaaatatgatcctgatgcgtacctctcttgggagattgctgttgaccaaaaatttgcatgccatgagtttcctgagagcactagagttagagctgctacgagtgagttcaccgattttgcttcggtttggtggatagaacatggcaagaaaaatcctaataacatgccacaaacttgggatgctttgaaacgggtcatgcgggctagatttgttccttcttactatgcacgtgacttgctgaataggttgcaacaattgagacagggtgcgaaaagtgtagaggaatattatcaggagttacaaatgggcttgcttcgttgtaatttagaggaaactgaggacgctgccatggctagatttttgggtgggttaaaccgcgagatttatgatatcgtagactataaagattacactaatatgacccgattgtttcatcttgcttgtaaggctgaaagggaagtgcagggacgacgtgctagtgccaaggctaatttttctgcaggccgaatgagagatgttcagtgccaccgttgcaagggctttgggcatgtgcagcgtgactgccctagcaagcgagttttggtagtcaaaaacgatggtgagtactcctctgctagtgatttcgatgatgatacacttgctttgcttgcggctgaccatgcagataatgagccaccggaagagcacattggggctgcatttgcggatcactatgagagcctcattgtgcagcgtgtccttagcgcacaaatggagaaggcggagcaaaatcagcgacacacgttgttccaaacaaagtgtgtcgtcaaagagcgttgttgccgcatgatcattgatggaggtagctgcaaaaacttggctagcagcgagatggtggagaagcttgcacttagcaccaaaccgcacccacatccatactacatccaatggctgaacaacagtggtaaggcgaaggtaacaaaactggtgcacattaattttgcaattggaaattaccatgatgttgttgaatgtgatgttgtgcccatgcaagcatgtaatattctgctaggtagaccatggcaatttgatagggattctatgcatcatggtaggtccaaccagtactcttttctgtaccatgataagaaaattgtgttgcatcccatgtctcctgaagatattttgcgtgatgatgttgctaaggctgccaaatccaaatgtgagagtgataaaaaagcccaatctgatggcaagaaacctgagacaatcaatttgaaacccaaatgcttacttgctactaaatctgatattaatgagttgattgcatcaccttcagttgcctatgctttggagtactctgatgtgtttcccaaggaagtgccaccggggctgccaccggtgcgcggcattgagcatcaaatcgacttgatcccaggtgcttccctaccgaaccgtgcgccataccgaaccaaccctgaggaaaccaaggagattcagcgtcaagttcatgagttgcttgataaaggcactttcatgaggttgatgaatgaggttttgcgtcctttcattggaaaatttgtggtggtctactttgatgatatcttgatttacagcaagtctatgggtgaacattttaatcatttacgtgctgtttttaatgctcttcgtgatgcacgtttatttggtaaccttgagaagtgcaccttttgcacagatcgagtttcttttcttggctatgttgtaactccgcaggggattgaggttgatcaagccaaggttgaggcaattcagagttggccgactcctaaaacggtctcacaagtgcggagctttctaggactcgcggggttctatcgccgctttgtgcaggatttcagcaccattgctgcaccattgaatgcgcttacaaagaagggagtgcctttcacttggggcacatcacaagagaacgccttccacatgttgaaagataagttgacccatgcacctctcctccaacttcccgattttaataagacttttgaacttgaatgtgatgctagtgggattggattgggtggtgttttgctacaagaaggaaaacctgttgcatattttagtgaaaagttgagtgggcctgttctgaattattctacttatgataaggaattgtatgctcttgtgcgaactttagaaacatggcagcattatttgtggcccaaggaatttgtcatacattctgatcatgagtctttgaagcatattcgtagtcaagggaagctgaaccgtagacatgctaaatgggttgaatttattgaatcttttccttatgttatcaaacacaagaaagggaaggagaacatcattgctgatgctttgtctaggagatacactttgttgacacaacttgactacaagatttttggcctggaaacaatcaaagaccaatatgcgcatgatgctgattttaatgatgtgttgctgcattgtaaggatggaagaacatggaacaaattcgtcatcaatgatggatgcgaagagatgttggcaggttcgttgctcgctgcgctacatgtcaaaaggctaagtcacgcttacatccacatgattgtgtatggtttgttgcctcgtgctccaattgatttgatgcctttaccatcttctgaaaaactgaattttgatgctaagcaacgtgctgagttgatgttaaaactgcatgagacaactaaagaaaacatagagcgcatgaatgctaagtataagtttgctggtgacaaaggtagaagggaattgaattttgaacctagagatttggtttggttgcatttgcgaaaagaacgatttcctgatttgagaaagtctaaattgatgcctagagctgatggaccatttaaagtgttagcaaagattaatgagaatgcatataagattgatttgcctgcagatttcggggttagtcccacatttaacgttgcagatttgaagccgtatttgggagaagaagatgagcttgagtcgaggacgactcaaatgcaagaaggggaggatgatgaggacatcaacaccatcgatacatccatgtccccccatgtacagcatgatggtcctattacccgcgctcgtgcacgtcaactaaattatcaggacgagtgccctcgtggccgggttgacgcgcaccacaagttcgcggcgaccattggagacggtgtatcggttgctaaggcgcagcgtctttggacagttgtagtcgggccgtga

SEQ ID NO: 14364 - DNA, 4860 bp, Oryza sativa
  Clone ID: TFbOSC400675j.C1.o24.fg
atggcaggtccagaggataaagatgaggagggtgcatctcattccccacgcaccaaaggcatcatccaatactttacaaggcaagtgaagcagcacacagaaggacttgatacagatttgcaggtgacaaatgagaagattggacaattggagtccacgcagatctccaccaacactaagcttacagggctggagacagcggtcgcccgcattgacactagccttgctgctcttgtgaggcattttgatgctctcaatgctggaggcaatggtggggttaatgatgatgacattgacggagagtacgtcgaggataatttggaggatgaatatattgctgacactgaacaagatgatcgagatgctcgagatcgtcgacggctacacaacaatcgacgaggtatgggtggtcgccgccgacgcgaggtatgcaacaatgatgatgctttttctaaaattaaatttaagattcctccttttgatggaaaatatgatcctgatgcgtacctctcttgggagattgctgttgaccaaaaatttgcatgccatgagtttcctgagagcactagagttagagctgctacgagtgagttcaccgattttgcttcggtttggtggatagaacatggcaagaaaaatcctaataacatgccacaaacttgggatgctttgaaacgggtcatgcgggctagatttgttccttcttactatgcacgtgacttgctgaataggttgcaacaattgagacaggaggaaactgaggatgctgccatggctagatttttgggtgggttaaaccgcgagatttatgatatcgtagactataaagattacactaatatgacccgattgtttcatcttgcttgtaaggctgaaagggaagtgcagggacgacgtgctagtgccaaggctaatttttctgcaggtaaaacttcatcatggcagacacgcaccactcctctagccggccgtactgcttctccatcttccacacccacaactagtcgagcagcacctcctccatctagtgacaagtcagcgacaaaggctgctcagccagcaccgagtgcttcttcaatggcatccacaggccgaatgagagatgttcagtgccaccgttgcaagggctttgggcatgtgcagcgtgactgccctagcaagcgagttttggtagtcaaaaacgatggtgagtactcctctgctagtgatttcgatgatgatacacttgctttgcttgcggctgaccatgcagataatgagccaccggaagagcacattggggctgcatttgcggatcactatgagagcctcattgtgcagcgtgtccttagcgcacaaatggagaaggcggagcaaaatcagcgacacacgttgttccaaacaaagtgtgtcgtcaaagagcgttgttgccgcatgatcattgatggaggtagctgcaacaacttggctagcagcgagatggtggagaagcttgcacttagcaccaaaccgcacccacattcatactacatccaatggctgaacaacagtggtaaggcgaaggtaacaaaactggtgcacattaattttgcaattggaaattaccatgatgttgttgaatgtgatgttgtgcccatgcaagcatgtaatattctgctaggtagaccatggcaatttgatagggattctatgcatcatggtaggtccaaccagtactcttttctgtaccatgataagaaaattgtgttgcatcccatgtctcctgaagatattttgcgtgatgatgttgctaaggctgccaaatccaaatgtgagagtgataaaaaagcccaatctgatggcaagaaacctgagacaatcaatttgaaacccaaatgcttacttgctactaaatctgatattaatgagttgattgcatcaccttcagttgcctatgctttggtatgcaaagatgctttgatttcacttcacgatatgcagcattctttgccccctgctgttgctaacattttgcaggagtactctgatgtgtttcccaaggaagtgccaccggggctgccaccggtgcgcggcattgagcatcaaatcgacttgatcccaggtgcttccctaccgaaccgtgcgccataccgaaccaaccctgaggaaaccaaggagattcagcgtcaagttcatgagttgcttgataaagggtatgtacgcgagtctcttagtccatgtgcggttccggtaattttggtaccaaagaaagatggttcatggcgtatgtgtgttgattgtagagctattaataacattaccattcgatatcgtcatcctattcctaggttagatgatatgcttgatgaattgagtggctctattgtgttctccaaagttgaattgcgtagtggttaccaccagattcatatgaagttgggtgatgaatggaaaacagcatttaaaacgaagtttgggttgtatgagtggttagtgatgccttttggtttaactaatgcacccagcactttcatgaggttgatgaatgaggttttgcgtcctttcattggaaaatttgtggtggtctactttgatgatatcttgatttacagcaagtctatgggtgaacattttaatcatttacgtgctgtttttaatgctcttcgtgatgcacgtttatttggtaaccttgagaagtgcaccttttgcacagatcgagtttcttttcttggctatgttgtaactccgcaagggattgaggttgatcaagccaaggttgaggcaattcagagttggccgactcctaaaacggtctcacaagtgcggagctttctaggactcgcggggttctattgccgctttgtgcaggatttcagcaccattgctgcaccattgaatgcgcttacaaagaagggagtgcctttcacttggggcacatcacaagagaacgccttccacatgttgaaacataagttgacccatgcacctctcctccaacttcccgattttaataagacttttgaacttgaatgtgatgctagtgggattggattgggtggtgttttgctacaagaaggaaaacttgttgcatattttagtgaaaagttgagtgggcctgttctgaattattctacttatgataaggaattgtatgctcttgtgcgaactttagaaacatggcagcattatttgtggcccaaggaatttgtcatacattctgatcatgagtctttgaagcatattcgtagtcaagggaagctgaaccgtagacatgctaaatgggttgaatttattgaatcttttccttatgttatcaaacacaagaaagggaaggagaacatcattgctaatgctttgtctaggagatacactttgttgacacaacttgactacaagatttttggcctggaaacaatcaaagaccaatatgcgcatgatgctgattttaatgatgtgttgctgcattgtaaggatggaagaacatggaacaaattcgtcatcaatgatgggtttgttttcagagctaacaagctatgcattccagctagctccgttcgcttgttgttgttgcaggaagcgcatggaggcggtttgatgggacattttggtgccaagaagacacatgacatccttgctagccatttcttttggccacagatgcgaagagatgttggcaggttcgttgctcgctgcgctacatgtcaaaaggctaagtcacgcttacatccacatggtttgtatatgcctcttcctgttcctactgttccttgggaagatatttcaatggattttgtgttaggattgcctaggaccaagagggggcgtgatagcatttttgtggttgtggatagattttctaaaatggtacatttcataccatgtcataaaactgatgatgcttctcatatcgctgatttgttctttcgagaaattgttcgcttgcatggtgtgccaaacacaattgtttctgatcgtgacacaaaatttcttagccatttttggagaactttgtgggctaaattggggactaaacttttgttttctactacttgtcatccccaaactgatggacaaattgaagtggtgaatagaaccttgtctactatgcttagggctgttttgaagaaaaatatcaagatgtgggaagaatgcttgcctcatattgaatttgcttgtaatcgttccttgcattctactacaaaaatgtgcccatttcagattgtgtatagtttgttgcctcgtgctccaattgatttgatgcctttaccatcttctgaaaaactgaattttgatgctaagcaacgtgctgagttgatgttaaaactgcatgagacaactaaagaaaacatagagcgcatgaatgctaagtataagtttgctggtgacaaaggtagaagggaattgaattttgaacctggagatttggtttggttgcatttgcgaaaagaacgatttcctgatttgagaaagtctaaattgatgcctagagctgatggaccatttaaagtgttagcaaagattaatgagaatgcatataagattgatttgcctgcagatttcggggttagtcccacatttaacgttgcagatttgaagccgtatttgggagaagaagatgagcttgagtcgaggacgactcaaatgcaagaaggggaggatgatgagaacatcaacaccatcgatacatccacgtccccccatgtacagcatgatggtcctattacccgcgctcgtgcacgtcaactaaattatcaggtgagttctttcttgagttcatattcctcgtctttataccccggagacgcgtgcactcgtgttttactcaggaacgatggagaggatccaaagggaagaggattcgcgtggggtggattcggactgcagggcagcgccaacttctga

SEQ ID NO: 14365 - DNA, 7344 bp, Oryza sativa
  Clone ID: TFbOSC401054j.C1.o75.fg
atggcaggtccagaggataaagatgaggagggtgcatctcattccccacgcaccaaaggcatcatccaatactttacaaggcaagtgaagcagcacacagaaggacttgatacagatttgcaggtgacaaatgagaagattggacaattggagtccacgcagatctccaccaacactaagcttacagggctggagacagcggtcgcccgcattgacactagccttgctgctcttgtgaggcattttgatgctctcaatgctggaggcaatggtgggggtaatgatgatgacattgacggagagtacgtcgaggataatttggaggatgaatatattgctgacactgaacaagatgatcgagatgctcgagatcgtcgacggctacacaacaatcgacgaggtatgggtggtcgccgccgacgcgaggtacgcaacaatgatgatgctttttctaaaattaaatttaagattcctccttttgatggaaaatatgatcctgatgcgtacctctcttgggagattgctgttgaccaaaaatttgcatgccatgagtttcctgagagcactagagttagagctgctacgagtgagttcaccgattttgcttcggtttggtggatagaacatggcaagaaaaatcctaataacatgccacaaacttgggatgctttgaaacgggtcatgcgggctagatttgttccttcttactatgcacgtgacttgctgaataggttgcaacaattgagacagggtgcgaaaagtgtagaggaatattatcaggagttacaaatgggcttgcttcgttgtaatttagaggaaactgaggacgctgccatggctagatttttgggtgggttaaaccgcgagatttatgacatcgtagactataaagattacactaatatgacccgattgtttcatcttgcttgtaaggctgaaagggaagtgcagggacgacgtgctagtgccaaggctaatttttctgcaggtaaaacttcatcatggcagacacgcaccactcctccggccggccgtactgcttctccatcttccacacccacaaccagtcgagcagcacctcctccatctagtgacaagtcagcgacaaaggctgctcagcccgcaccgagtgcttcttcaatggcatccacaggccgaatgagagatgttcagtgccaccgttgcaagggctttgggcatgtgcagcgtgactgccctagcaagcgagttttggtagtcaaaaacgatggtgagtactcctctgctagtgatttcgatgatgatacacttgctttgcttgcggctgaccatgcagataatgagccaccggaagagcacattggggctgcatttgcggatcactatgagagcctcattgtgcagcgtgtccttagcgcacaaatggagaaggcggagcaaaatcagcgacacacgttgttccaaacaaagtgtgtcgtcaaagagcgttgttgccgcatgatcattgatggaggtagctgcaacaacttggctagcagcgagatggtggagaagcttgcacttagcacaaaaccgcacccacatccatactacatccaatggctgaacaacagtggtaaggcgaaggtaacaaaactggtgcacattaattttgcaattggaaattaccatgatgttgttgaatgtgatgttgtgcccatgcaagcatgtaatattctgctaggtagaccatggcaatttgatagggattctatgcatcatggtaggtccaaccagtactcttttctgtaccatgataagaaaattgtgttgcattccatgtctcctgaagatattttgcgtgatgatgttgctaaggctgccaaatccaaatgtgagagtgataaaaaagcccaatctgatggcaagaaacctgagacaatcaatttgaaacccaaatgcttacttgctactaaatctgatattaatgagttgattgcatcaccttcagttgcctatgctttggtatgcaaagatgctttgatttcacttcacgatatgcagcattctttgccccctgctgttgctaacattttgcaggagtactctgatgtgtttcccaaggaagtgccaccggggctgccaccggtgcgcggcattgagcatcaaatcgacttgatcccaggtgcttccctaccgaaccgtgcgccataccgaacaaaccctgaggaaaccaaggagattcagcgtcaagttcatgagttgcttgataaagggtatgtacgcgagtctcttagtccatgtgcggttccggtaattttggtaccaaagaaagatggttcatggcgtatgtgtgttgattgtagagctattaataacattaccattcgatatcgtcatcctattcctaggttagatgatatgcttgatgaattgagtggctctattgtgttctccaaagttgatttgcgtagtggttaccaccagattcgtatgaagttgggtgatgaatggaaaacagcatttaaaacgaagtttgggttgtatgagtggttagtgatgccttttggtttaactaatgcacccagcactttcatgaggttgatgaatgaggttttgcgtcctttcattggaaaatttgtggtggtctactttgatgatatcttgatttacagcaagtctatgggtgaacattttaatcatttacgtgctgtttttaatgctcttcgtgatgcacgtttatttggtaaccttgagaagtgcaccttttgcacagatcgagtttcttttcttggctatgttgtaactccgcaggggattgaggttgatcaagccaaggttgaagcaattcagagttggccgactcctaaaacggtctcacaagtgcggagctttctaggactcgcggggttctatcgccgctttgtgcaggatttcagcaccattgctgcaccattgaatgtgcttacaaagaagggagtgcctttcacttggggcacatcacaagagaacgccttccacatgttgaaagataagttgacccacgcacctctcctccaacttcccgattttaataagacttttgaacttgaatgtgatgctagtgggattggattgggtggtgttttgctacaagaaggaaaacctgttgcatattttagtgaaaagttgagtgggcctgttctgaattattctacttatgataaggaattgtatgctcttgtgcgaactttagaaacatggcagcattatttgtggcccaaggaatttgtcatacattctgatcatgagtctttgaagcatattcgtagtcaagggaagctgaaccgtagacatgctaaatgggttgaatttattgaatcttttccttatgttatcaaacacaagaaagggaaggagaacatcattgctgatgctttgtctaggagatacactttgttgacacaacttgactacaagatttttggcctggaaacaatcaaagaccaatatgcgcatgatgctgattttaatgatgtgttgctgcattgtaaggatggaagaacatggaacaaattcgtcatcaatgatgggtttgttttcagagctaacaagctatgcattccagctagctccgttcgcttgttgttgttgcaggaagcgcatggaggcggtttgatgggacattttggtgccaagaagacacatgacatccttgctagtcatttcttttggccacagatgcgaagagatgttggcaggttcgttgctcgctgcgctacatgtcaaaaggctaagtcacgcttacatccacatggtttgtatatgcctcttcctgttcctactgttccttgggaagatatttcaatggattttgtgttaggattgcctaggaccaagagggggcgtgatagcatttttgtggttgtggatcgattttctaaaatggcacatttcataccatgtcataaaactgatgatgcttctcatatcgctgatttgttctttcgagaaattgttcgcttgcatggtgtgccaaacacaattgtttctgatcgtgacacaaaatttcttagccatttttggagaactttgtgggctaaattggggactaaacttttgttttctactacttgtcatccccaaactgatggacaaactgaagtggtgaatagaaccttgtctactatgcttagggctgttttgaagaaaaatatcaagatgtgggaagaatgcttgcctcatattgaatttgcttataatcgttccttgcattctactacaaaaatgtgcccatttcagattgtgtatggtttgttgcctcgtgctccaattgatttgatgcctttaccatcttctgagaaactgaattttgatgctaagcaacgtgctgagttgatgttaaaactgcatgagacaactaaagaaaacatagagcgcatgaatgctaagtataagtttgctggtgacaaaggtagaagggaattgacttttgaacctggagatttggtttggttgcatttgcgaaaagaacgatttcctgatttgagaaagtctaaattgatgcctagagctgatggaccatttaaagtgttagcaaagattaatgagaatgcatataagattgatttgcctgcagattttggggttagtcccacatttaacgttgcagatttgaagccgtatttgggagaagaagatgagcttgagtcgaggacgactcaaatgcaagaaggggaggatgatgaggacatcaacaccatcgatacatccacgtccccccatatacagcatgatggtcctattacccgcgctcgtgcacgtcaactaaattatcaggacgagtgccctcgtggccgggttgacgcgcaccacaagttcgcggcgaccattggagacgatcgggccacaaaccctagcgggttcgcatcatacggactgtatgaattcacggtgatgtcattcggtttaaccaatgctcctgccttcttcatgaacttaatgaacaaagtgttcatggaatacttggataagtttgttgtggttttcattgatgacattctggtatactcacaatcagaggaagaccatcagcaccatctccgtctggtgttgggaaagttgcgggaacatcaattgtatgccaaacttagcaagtgtgagttctggttgtccgaagtcaaattcttagggcacgtgatatctgctaaaggagttgctgtggaccccgaaacagtgaccgccgtcaccgattggaagcaacccaagacagtcactcaaattcgcagtttcttaggtttggcaggatactaccggaggttcatcgagaacttctccaaaatcgctcgacccatgacacagttgttgaagaaagaagagaaatttgtgtggagcccgcaatgcgagaaggcgttccaaactctcaaggaaaagctggtttcctcgccggttttaatcttaccggatactcgcaaggacttcatggtgtattgtgacgcttcgccccaaggattggggtgcgtgctcatgcaggaaggtcatgtggtggcctatgcctcacgccagctatggcctcatgaaggcaactaccctacccatgatttggagttagccgcggtggttcatgctctaaaaatctggcggcactatctcattgggaatcgctgtgaaatatatactgatcataagagtttgaaatacatcttcactcagtcggacctgaatcttcggcagagaagatggttagaactcatcaaggattatgatgtgggaattcactatcatcctggtaaggccaatgtggtcgccgacgctctaagtcgaaaaagccattgcaacactcttggagtccgtggcattccacccgaacttaatcaacagatggaagccctgaacctaagcatagttagtcgtggattcttggctacgctggaagccaagcctaccttgctcgatcaaatccgcgaggctcagaagaacgatccggacatgcgtggactcctcaagaatatgaaacagggtaaagccgctggtttcatagaggatgaacacggaaccctatggaacagaaaccgggtatgcgttccagatgtcagggaacttaaacagctgatacttcaggaagctcacgagagtccttattccatccacccgggcagtacgaagatgtacttagacttgaaagagaaatactggtgggttagtatgaagcgggaaattgcggagttcgtggccctttgtgacgtgtgccagcgtgtcaaggcagagcaccaacgaccggccggacttctccaacctctccaagtaccagaatggaaatgggatgaaattgggatggatttcatcaccggacttccaaaaacccaaggtggatatgattctatatgggtagttgtggaccgattaaccaaggtagctcggtttattcctgtgaagaccacctatggagggaacaaactagccgagctctacttcgctaggatcgtgagtctccatggcgttcctaagaaaattgtatctgatagggaaagccaattcacctctcacttttggaagaagctccaagaagagctgggtacccgattaaatttcagcaccgcgtatcacccgcagacagatggacagaccgagcgtctaaatcagatcctagaagatatgcttcatgcatgtgtcctagatttcgggaagacctgggataagagtctcccctatgccgagttctcctacaataacagctaccaagccagcatacaaatggcaccttatgaagcgttgtatgggcgcaaatgccggacaccgctcttgtgggaccaagttggggaaagccaagtgttcgggactgatatactgagagaagctgaagcgaaggtcagaaccatttgggataatctaaaggtggcccagtcccggcagaaaagttatgcagataaccgtcgccgtaacttggaattcgcagtggacgattttgtgtaccttcgggtcacgccattgcgaggtgtacacaggtttcagacgaaagggaagctcgcacctcggttcgtgggtcctttccgtatcattgctcggcgcggagaagtcgcttaccagttggagctgcccgcctccttgggcaacgtgcatgatgtgttccatgtgtcgcaactcaagaaatgccttcgagtgccgtccgagcaggccgactcagagcagattgaagttcgcgaagacttgacctacgtggagaggccagtgaaaatcctggacaccatggagcgcaggaccaggaaccgggtaatccgtttttgcaaggtccaatggagcaaccacgccgaggaagaagctacttgggagcgtgaaaacgagctgaaggcagcccatcctgatctcttcgctagttcctccgaatctcggggtcgagattccgtttaa

SEQ ID NO: 14366 - DNA, 4428 bp, Oryza sativa
  Clone ID: TFbOSC401286j.C1.o4.fg
atgtcgaacgaggtgaaccatgtagggaaggctcccatgtttaatggcacaaactactctacttggaaaattaaaatgtctactcacctcaaagctatgagcttccatatttggagtattgtggatgtagactttgctatcaccggcacgcccttgacggagattgatcaccgcaacctccaactcaatgcccaagccatgaatgctttgttcaactctttgagtcaagaggagttcgatagagtgagcaaccttgagaccgcatatgagatttggaacaagttggcggagatccatgagggcacaagcgagtacaaggatgccaagcttcatttcctcaagatccaatatgagacattctccatgttgcctcatgagagtgtgaatgacatgtatgggaggctcaatgtcattgtgaatgatctcaaggggcttggggcaaactacactgatcttgaggttgcccaaaagatgcttagggctctaccggagaagtatgagacccttgtcaccatgctcatcaactccgacatgtcaaggatgacacccgcaagcctcttggggaagatcaacaccaatgacatgtacaagttgaagaagaaggagatggaggaagcctcaccttccaagaagtgcattgctctccaagccgaagttgaagataagggcaagggcaaggtgaatgaagtcaatgaggacttggaggaagagatagcccttcttgatagaaggttcaatgatctcttgggaaggagaaaggagagaggaaggggctccaactcaaataggagaagaaataaaagacccaacaagactctctccaacttgaagtgctttgagtgtggtgagaagggacactttgcttccaagtgctcttccaaggatgatgatggagacaagtcatccaagaaaaagagtggaggctacaagctcatgaagaagctcaagaaggaaggcaagaagattgaggcattcatcggggaatgggactcaaatgaggagagctccgcttcatccgggtccgaggaagaaggtggtgatgatgcaagctccaagaagaagaagatggccgttgttgccatcaaggaggctccatcattgttcgctccaatttgtctcatggcaaagggctcctctaaggtaacatctcttagtgatagtgagagtgatgatgattgtgatgatgtttcctatgatgagcttgtgagtatgtttgaggagttccatgcttatagtgaaaaggagattgtcaacttcaaggccctaaagaaggatcatgcttctttagagatcttgtatgaggagctaaagacctctcatgagagactcaccatttctcatgagaagcttaagaaagctcatgaaaacctccttttcactactcaacatggagctctcattgatgttggcatatcttgtgatttgcttgatgatagtgctacttgccatattgctcatgttgcatcatctagcatttctacctcttgtgatgatcctgtggatatgcctagctctagctctagctcttgtatttctatttatgatgcctcacttgttgttgagaacaatgagcttaaggagcaagtggccaagctcaacaagagtttggagaggtgcttcaagggacggctcataatggtagcattgttgctagatatgtgggttcccctatactcagtggtgaactaccgcactggtggaagccattgggtgcttgatagtggatgcactcaacacatgaccggtgatagagctatgttcaccacatttgaagaaggagggaaagaacaagaaaaagtgacatttggagacaatagtaaaggaaagggtgttagattaaccaaatttgaaagtcggtgtgatgaagggtttcttataggttatgcttcaaatagcaaggcataccgggtctacaacaagaacaaaggtgatgaaggcttgatgagagctatgaagaacatgtcaattggagatgtcaagcctattgaagtggaagacaagccatccacctccactcaagatgagccatctacttccgctacgccaagtcaagctcaagttgaagtggaggaggagaaggcacaagatccacctatgccaccgaggatacacaccgctctttccaaggatcacccaattgaccaagtgttgggcgacattagtaagggtgttcaaactcgatctcgtgtcgcttcgatttgtgaacattactcgtttgtttcttgtcttgagccaaaacatatagatgaagctctttgtgatccggattggatgaatgctatgcatgaagagctcaacaattttgcaagaaacaaggtgtggactttggttgaaagacctagaaaccacaatgtcatagggacaaagtgggtctttaggaacaaacaagatgagaacgggttggtggtgagaaacaaggcaagattggtggcacaaggttttacacaagttgaaggtttggactttggtgaaacttttgcccccgtggcaagacttgaggttattcgcatccttcttgcatttgcatcatgctttgatataaaactatttcaaatggatgtgaaaagtgcttttctaaatggtaaaattgccgaacttgtctttgttgaacaacctcccggttttgaagatcctaaaaatcctaaccatgtttataaactctcaaaagctctttatggtttaaaacaagctccttgggcttggtatgaaagattgagagattttcttttgtcaaaggatttcaaaattggaaaagttgacaccacccttttcacaaaaatcattggtgatgatttctttgtgtgtcaaatttatgttgatgacatcatattcggttctactaatgaggtattttgcaaggaatttggtgatatgatatctagggaatttgagatgtccacgattggagagttgagcttcttccttggacttcaaatcaagcaactcaaggatgggacgttcgtgagccaaaccaagtacatcaaggatctactcaagaggtctggcttggaggatgcgaagcccatcaagacacctatggcaaccaacgggcatctcgaccttaatgagggagtgatgcctccccgcacttgccatggtcgtcgtgcacccactccggatgccgtgagtgagcctgaggaatcgagcggagatgattatgctcaaagtgatgaagaggttgaggcaaatgttgagggggctagtgaggaggctagtggagatgataacagtggaagtggagaggatgaggatgaaggaagtgataatatgcacattgatccctccatccagtttgttgtgaacatgaggaatccatcgcagtataccatcttgaggcaccatgatcagtttttgaggcctcgggacaccccggatccccgttttcacaccgctttccagaagtctgtgtatgagcaggatctcttcaagactgttggcattgactggattgtgaccctcaagcaagactacaatgaagatttgatccggcagttttatgttacagtgtgggtggctggggactatagtgagatgaagtggatgtccgacaccctccactgttctatctctaggaggcaattccggcggctcctcaatattcgcttggactttggagatgacttgcatgagaagcacacccataatctgctctccatagactatctctctcagttttatgaagatggagtgcggtacacacatgggaaggttgccggcttgaggactatccccagtgtggttaacaggattgtgagagctaccatcctccctcgccttggcaacaatgatgacattaggggggtggcttggcacgtcatcgatgcaatcattcagggccgtcagttcgacattgtgtctctcatgatgcaagagattgccatctccaaggggaccttcactcagggaatctattatgccccttacatcatgaggttgattcaagacaagcttggggctgctgggcaaaatttgaagaagcacaagcagtacaagccccgccttcagcttggagctccctgtgctcctagggcggcgccctcctctcatcctggagctagctcaagctcagcacctcttcctcctcctcctcctgggtatgatccaaatactttcttccatccacagtatgcttattttggaatgcaacccaacgagtacttcaacccggtacttggagctattaataccctaagtgaaagcattcaacgcttgtctaccgggcatgaagctttgcatgaggatgttcgtggcttgcgcaccgatgttggagacttgaatgcttccgtggggagattgcacactagagtgggtacattagattctcgagtccaaatgttggagagctcccaagcatttgtgtatcatcgtagtcatgatgctccttatccttccactttggtgcgtcctccttctcctccacaagagtga

SEQ ID NO: 14367 - DNA, 5004 bp, Oryza sativa
  Clone ID: TFbOSC401345j.C1.o7.fg
atggcaggtccagaggataaagatgaggagggtgcatctcattccccacgcaccaaaggcatcatccaatactttacaaggcaagtgaagcagcacacagaaggacttgatacagatttgcaggtgacaaatgagaagattggacaattggagtccacgcagatctccaccaacactaagcttacagggctggagacagcggtcgcccgcattgacactagccttgctgctcttgtgaggcattttgatgctctcaatgctggaggcaatggtgggggtaatgacgatgacattgacggagagtacgtcgaggataatttggaggatgaatatattgctgacactgaacaagatgatcgagatgctcgagatcgtcgacggctacacaacaatcgacgaggtatgggtggtcgccgccgacgcgaggtacgcaataatgatgatgctttttctaaaattaaatttaagattcctccttttgatggaaaatatgatcctgatgcgtacctctcttgggagattgctgttgaccaaaaatttgcatgccatgagtttcctgagagcactagagttagagctgctacgagtgagttcaccgattttgcttcggtatggtggatagaacatggcaagaaaaatcctaataacatgccacaaacttgggatgctttgaaacgggtcatgcgggctagatttgttccttcttactatgcacgtgacttgctgaataggttgcaacaattgagacaggaggaaactgaggacactgccatggctagatttttgggtgggttaaaccgcgagatttatgacatcgtagactataaagattacactaatatgacccgattgtttcatcttgcttgtaaaacttcatcatggcagacacgcaccactcctccggccggccgtactgtttctccatcttccacacccacaaccagtcgagcagcacctcctccatctagtgacaagtcagcgacaaaggctgctcagccagcaccgagtgcttcttcaatggcatccacaggccgaatgagagatgttcagtgccaccgttgcaagggctttgggcatgtgcagcgtgactgccctagcaagcgagttttggtagtcaaaaacgatggtgagtactcctctgctattgatttcgatgatgatacacttgctttgcttgcggctgaccatgcagataatgagccaccggaagagcacattggggctgcatttgcggatcactatgagagcctcattatgcagcatgtccttagcgcacaaatggagaaggcggagcaaaatcagcgacacacgttgttccaaacaaagtgtgtcgtcaaagagcgttgttgccgcatgatcattgatggaggtagctgcaacaacttggctagcagcgagatggtggagaagcttgcacttagcaccaaaccgcacccacatccatactacatccaatggctgaacaacagtggtaaggcgaaggtaacaaaactggtgcacattaattttgcaattggaaattaccatgatgttgttgaatgtgatgttgtgcccatgcaagcatgtaatattctgctaggtagaccatggcaatttgatagggattctatgcatcatggtaagaaaattgtgttgcatcccatgtctcctgaagatattttgcgtgatgatgttgctaaggctgccaaatccaaatgtgagagtgataaaaaagcccaatctgatggcaagaaacctgagacaatcaatttgaaacccaaatgcttacttgctactaaatctgatattaatgagttgattgcatcaccttcagttgcctatgctttggagtactctgatgtgtttcccaaggaagtgccaccggggctgccaccggtgcgcggcattgagcatcaaatcgacttgatcccaggtgcttccctaccgaaccgtgcgccataccgaaccaaccctgaggaaaccaaggagattcagcgtcaagttcatgagttgcttgataaagggtatgtacgcgagtctcttagtccatgtgcggttctggtaattttggtaccaaagaaagatggttcatggcgtatgtgtgttgattgtagagctattaataacattaccattcgatatcgtcatcctattcctaggttagatgatatgcttgatgaattgagtggctctattgtgttctccaaagttgatttgcgtagtggttaccaccagattcgtatgaacttaggtgatgaatggaaaacagcatttaaaacgaagtttgggttgtatgagtggttagtgatgccttttggtttaactaatgcacccaccactttcatgaggttgatgaatgaggttttgcgtcctttcattggaaaatttgtggtggtctactttgatgatatcttgatttacagcaagtctatgggtgaacattttaatcatttacgtgctgtttttaatgctcttcgtgatgcacgtttatttggtaaccttgagaagtgcaccttttgcacagatagagtttcttttcttggctatgttgtaactccgcaggggattgaggttgatcaagccaaggttgaggcaattcagagttggccgactcctaaaacggtctcacaagtgcggagctttctaggactcgcggggttctatcgccgctttgtgcaggatttcagcaccattgctgcaccattgaatgcgcttacaaagaagggagtgcctttcacttggggcacatcacaagagaacgccttccacatgttgaaagataagttgacccatgcacctctccttcaacttcccgattttaataagacttttgaacttgaatgtgatgctagtgggattggattgggtggtgttttgctacaagaaggaaaacctgttgcatattttagtgaaaagttgagtgggcctgttctgaattattctacttatgataaggaattgtatgctcttgtgcgaactttagaaacatggcagcattatttgtggcccaaggaatttgtcatacattctgatcatgagtctttgaagcatattcatagtcaagggaagctgaaccgtagacatgctaaatgggttgaatttattgaatcttttccttatgttatcaaacacaagaaagggaaggagaacatcattgctgatgctttgtctagaagatacactttgttgacacaacttgactataagatttttggcctggaaacaatcaaagaccaatatgtgcatgatgctgattttaatgatgaagcgcatggaggcggtttgatgggacattttggtgccaagaagacacatgacatccttgctagtcatttcttttggccacagatgcgaagagatgttggcagggctgttttgaagaaaaatatcaagatgtgggaagaatgcttgcctcatattgaatttgcttataatcgttccttgcattctactacaaaaatgtgcccatttcagattgtgtatggtttgttgcctcgtgctccaattgatttgatgcctttaccatcttctgaaaaactgaattttgatgctaagcaacgtgctgagttgatgttaaaactgcatgagacaactaaagaaaacatagagcgcatgaatgctaagtataagtttgctggtgacaaaggtagaagggaattgaattttgaacctggagatttggtttggttgcatttgcgaaaagaacgatttcctgatttgagaaagtctaaattgatgcctagagctgatggaccatttaaagtgttagcaaagattaatgagaatgcatataagattgatttgcctgcagatttcggggttagtctcacatttaacgttgcagatttgaagccgtatttgggagaagaagatgagtttgagtcgaggacgactcaaatgcaagaaggggaggatgatgaggacatcaacaccatcgatacatccatgtcctcccatgtacagcatgatggtcctattacccgcgctcgtgaacgtcaactaaattatcagtgggacaagcccgaccactcgtcggacccccatcccctaactggtgatggtgacttcggagacagagaggacaaagggcaaatttgcaattacatttctcaaaatcaaagcgcttttgtccgcaaaagggcaattcacgacaacttcctttatgtgcaaaacatggtaaagctgctccacaggacaaaaaaacaaagcctgttcatcaagatagacattgcgaaggcttttgacaccgtgaattggtcctacctcctagagattcttcgacaatttggttttggaaaccgatggttaaattggatcactaatcttttctccacctcctcatcccaggtgctcttaaatgggtccccggggcaaaaaatcaaccatgctaggggcctacgacaaggtgatccactatccccaatgcttttcatcctggctatgaagccttttcatcgaatcctaaaagaagcagaaaatgtcaatgtccttgctccccttggggtaagaaatgggagattcaggtgctcgctatatgctgacgatgttgcggtttttgcaaacccgaaacaagaagagttgacagctctttctcatatactggcatgctttgcacaagcttctgggctacacacaaatatcaacaaaactgaaatctaccccatcagatgcgaaggcatcgatctgcaaaatcttcttgctggatggccgggccaaacaaaatatttcccctgcaaatatcttggactacctcttcatttcagaaaactaaggaaaattgacttccttcctttaatagacaagattgggtctaggctaccaggttggaaagggcgttttttcacttctgcgggacgtcaagccctagtatcatctgttctaagtgctatgccaactcatcatcttactgtcctacaagctccaaagtgggttttcaaaagaatcgatcgtttcagaagatctttcctatggaagggtgaagatcccgaccattcaaacccgggagatagtctgatcaactggtaa

SEQ ID NO: 14368 - DNA, 4347 bp, Oryza sativa
  Clone ID: TFbOSC411423j.C1.o3.fg
atggattgtgttgtgcaaggggtattgtcacaactcctttccgagatgccgcgctacaagcctgagtacttgtttggtgttgagggttttgtccaggagttgcgtacgatgtcctttgtcataggatttgggactgcccctttttatgcccagattcctcatgatcgtcatgaagagaagtgccgagtcaaagtcaccttgaacagtaatagtgaagatatcccctcagtgatgttcgaagctggaggaagaaactacatccattcatgtcaggaggtggcaaggatcgccataggagagctccgtgatcgctacagtgatcagttggccgacactgagtatcgctaccatcctcgtcaaccacagggaagtgaccgtggcagctaccttgagaccgaaggagttgagaatgatgttaccacaagacatttggttgagatgctgtgggctatggatgaaacccgtgcagagactgtgttagcagctcaagatcgtgaagaccggaatcgtggtaagatttgcaagctagaagacaaggtggatcgtttggagaaggaactagccgcgttgaagggagaagcaccaccgcagaaggccaggattcgtcttaccgcaagaaagagagctctatttgtccctcgctatcaattggcgccaaaggtccgtgtggtggagaaagaagttaccccagcccttgcggatcctccggtcatcatcataagtgatgatgaagaagaagaatccaagcgcaaccattccaagattgagtgggtagctactcaagatgatgaagacgagccgaacgagccttcaatcgacctccgatgctcggaagaactagaatgccattttcccccggtttctcttcttgtgccctgtccatgccagatggtgaacactcgcagcaacgggaatggccccaacaacaacaataataacaataacaacaacaatgaaggaaacccaactcttgcccaagttcttgctcaacagactcagttaatgaacatgatgatgcagcaactccagaaccagcagaaccaaggaaataaccatgcacctccccagaacaagttagcagaatttcttcatgtgaggccacctattttctctagtaccactaatcctgttgaagctggtgattggttgcacgccatagaaaagaagttggatttgcttcagtgcactgatcaggagaagacgcatataccatcgggagttgtgtctctcaagaagaaggaattcaggtcgctcactcagggatctcactctgttacggagtatctgtacgagttcaatcgtctggctcgttatgctccggaagatgtgcgcaatgacgaagagcgccaggagaagttcttggaaggacttaatgatgagctttcttgcccactcatgactggggattatcctgatttccagaagttagtggataaggctattcgccaggaggacaagtacaatcgcatggagcagaagaaacgccggattgctcaattcaagacgcaacaggggaataatcagaagccgcgtcttactttaggaccccagtccatgccacagggaggttcttcgtctgttgttcgtccgcagcgtcagttcttcaacaacaatgctggcaacaacatccgcaatcaagctccatgccctgttgcagcttcgacacagcaacagcctgccaagagggagcaaggcagcaagcccgtggtgtgtttcagctgtggagacccaggacattacgctgacaagtgttcgaagccccgacgcgtgaaggttgtccctgcccagagcaacactaccgcaccagcgccaaaggctcgtgtcaatcatgtcgctgctgcagaagctcaagatgctccagatgtgattttgagtacgtttcttgttaactcagttcctgcaacagtgctttttgattctggtgctacacattcattcttatctatgagttttgcgggaaatcatgggatggaagtagaagatcttagacgtcctttgatggttagtaccccaagtaatcaagcactctctttgcaacgtagcccctctgtcagaatagaaattcaaggagtaccatttctggccaatctcatcctgttagaatccaaagaccttaatgtcatcctagggatggactggttagccagacataaaggtgtgatagactgtgctaacagaaaagtaactctcaccagcaatgatggtcgagttgtaactgttcatgcattgtcttctgagtttttaaggtcaagactgaaccaaataactttggaagagattcctatagttcgggagtatcccgatgtgttcccagatgatttacctggtatgccgcccaaaagggatatagagttcagaatagatttggtaccaggaacaactccgatccataagagaccttatagaatggcagccaatgagttggcagaagtcaagaggcaagtagacgatttgcttcagaaaggatacatcagaccgagttcatcaccatggggagctccgctaaaaggtgccaccgttttctccaagatagatcttcgatcagggtatcaccagttgaggatcaaagaggaagatatacttaagacagcttttaccactaggtatggattgttcgaatgtactgttatgtcttttggacttaccaatgcccccgctttcttcatgaacttgatgaataaggtgtttatggaatacctagacaagttcgtggtagtctttattgatgacattcttatctactctcgaaccaaagaagagcatgtagaacatcttcgtcttgcattagagaagctacgagaacatcaactgtatgctaagtttagcaagtgtgaattttggttgtctgaagtgaagttccttggtcacgtcatctcagcaggaggagttgccatcgatcctagtaatgtggaatccgtaaccaattggaaacaaccaaagacagtttcagagattcgcagtttcctaggcctcgcaggatattatcggaggtttatagagaatttctccaagatcgctaagcccatgacacggctgcttcagaaagatgtaaagtacaagtggtcagaagaatgtgagcagagttttcaagagttgaagaatcgcttgatatcagctcctattttgattttacctgatccaaagaagggtttccaagtgtattgcgatgcatccaaacttgggttaggttgtgttctgatgcaagatgggaaggtggttgcctatgcatctcgtcagttacgtccgcatgagaagaactaccctactcatgatcttgagttagctgcagtagttcatgcgttgaagatttggcgtcattatcttttcggtactcgtacagaggtgtacaccgatcacaagagtttaaagtatatctttactcagccggatctgaacatgagacaacggagatggttggaattaattaaggattatgacatgggaattcattatcacccgggaaaggctaatgttgtagcagacgctcttagcagaaaaggctattgcaatgctacggaaggacgaccattgccatttgaattatgcaaggagtttgaaagattaaatttgggaattgtcagaagaggtttcctcgcagccttagaagcgaagcccactctaattgatcaagttagagaagcccaaattaatgatcctgatattcaagaaattaagaagaatatgagaagaggaaaagctatcggtttcttggaagatgagcaaggaactgtatggttgggtgagagaatcttcgtccccgacaataaagatttaaaagatgcaattctgaaagaagctcatgatactttatactccattcaccctggtagtacaaaaatgtaccagtatctcaaggaaagattttggtgggcaagtatgaagcgtgaaatcgcagagtacgtagcagtatgtgatgtttgtcagcgagtcaaggcagaacatcggaaacccgccggtttgttgcagcctttgaagattcctgaatggaaatgggaagaaatcggtatggattttatcactggtctacctagaacatcatcaggccacgactctatttgggtgatagtcgacagacttaccaaagtggctcatttcatcccagtaaagacaacctattctggaagtcggttggcggaattgtatatggccaggattgtgtgtttgcatggcgttcgtaagaaaatagtgtctgatcgaggcagccagtttacttcaaatttttggaagaagcttcaggaagagatgggttctaagttgaactttagtactgcttatcatccgcagacagacggacaaactgaaagggtaaatcagattttggaagacatgttgagagtatgtgtttag

SEQ ID NO: 14369 - DNA, 2799 bp, Oryza sativa
  Clone ID: TFbOSC423400j.C1.o4.gm
atggctgccggctggatgggcaaggttgtgactcgtgtgaagtgtgactcacaagtcctgcgaccgtcggtctacgatcactgccggacggggcacccgacggcgacgaacaaacccgaggatcccacaaacgaagatgacgagaatgagcacaagaacgttcaagcagctaatgcaatacttagcgccttgagtggaagtgagttcaaccgtgtggacgacatcgagagtgccaaagtgatttgggacacgcttcggaatttgcatgaaggcacggatagtgttcgcgagtccaaggtggagatcctcaaggggcaatttgagcggtttgtgatattggatggtgagagcccaagcgacatgtatgatcgattgaacaagattgtcaatgagatcaagggatttggctccaaggacatgatcgatgaggttgtggtcaaaaagatgattcgagcaatcactccaaggaactctatcttggtaaccataattcgtgagcgtccggactacaagactctcacaccttatgacttgctcgggcatacccttgcccatgacatgctcaaacaagagtccaaggaggtcatccaattcatcaaccaaagctcaaccacaagcatcaagaaggaagacttggcgttgaagggaagttcttccaagcactactccaacaagtcaagtggaagacactccgcaagagtgtgctatatgtgcaaagagcccgagcacttcatcgcagattgcccccacatcaatgaagaaaagaagaagattgagaagaaggttgagaagaaggagaaacacaagcatagcaagcatgatcactatggccaatctcaccttgggatgatctttggctctgactccgagtcaagctcaagtaatgaagaaggagttgccacgttcgccgtcaagccttcatcagcaccgagactcttcaactactcaagtgatgaggatgctcccatttgcctcatggcaaagaagcctaaggtaccttcctccctcaagtcattcaatgttgatcttgttagtgatgaggaggatgatgttcaggatgaggttatggatgaggaattgttcaagtccataaccaaggaatctctaccacacttgagtgagtttcttgggagaattgaggatcagtatgcaacccttgagaggcaagaggcattactcattcgtgaaaaagagcggtctcatgaactcaaggggcctcaaattggtacaacagcgaccttcacagaacttgggaaacgtgaaaaggtagcctctgttaacgcgttatgtaaactttttgaccaaccaaccgcgatccagcagtggagcacagtcacggcactcatcagcagctatgcgactgccaggcgacggggccatggcagcttcccatcagcagcttctcacggctgccgcagtggtggttctcgcctctctgcgtgcggtggcgcagcccgccggcgacggctatggcaacgccaccttctccctctgctccggcgtcgacaacacccaggcggcgggccgttctacttggtccggcagactactgcctccgaagccgtcaaggcggccaccgctgcgacggcggacaggtcctcgagcgtggttagcgacggggagtactacgcgctcgcgcagtgccgcgccgacgtgcccgcgggggactgctcgcggtgcctcgccgcctgcctcggagtcatcggcgggagcggagacgacttgtgcgagaaagccgcggtgcgctacgacgaccgctgcctcctccgcttcgccaagggcgacgacttcaccggcttcgacgtcgacgagcacacggcgaccgtgttcgacggcgggcgcagcggcctcaccgtcgccgaggaggtgcccacccgcctgctcgccacggtggcggccgccgccccggcgagcaggtcgaggaccgccgccgggatagcgtcctacggcggcggcggcagcctgtacgggctggcgcagtgcaccacccagatcccggcgccggactgcgccaggtgcctccgcggcgcgctgtcccgcctctcggaggacttcaactccaccgccgccgggatgcaactgcttcgctccagctgcatgctgcgctacgggagctccctcttcttcaaccagtcgtcgccgctcctccccgtcgcccacctcgccatcgccccggccggtggaggcgccggcccgcccgcagccgctccaccatcaccaggccaccgtcctgctcgagctcgaacgatcgccatttccgctgggcagcctggttaccagactctggtgaactcgacaggtaaattcgcagagcgaaataagcttggatctggtggctgtggcacagtctacaaggggatattgcataacaatgaagaaatagccgtgaagaaactcaccagaaaagatttgagagaagtggaaagggaggtttccctggtggcgcagcttcagcacgagaacattgtcaagttcttgggccactgcttccggcacgacaaaatgttcctcgtctacgaatacctgagcaacgggactctgagccgctatttcaaatccgactgtcagaagctggactggccaaaatggcttaacatcatcagagggatcgctcgtggcctttcttatctccacagagattctgggaaggacatcgtccatcgtgatctcaaaccttccaatgtcctccttattccaacttcaatgcaaagattgctgactttgatcttgcaagaccatacgaccggaacaaaagccatgagagcactcaaaagagagcaggcacccagtatgttctag

SEQ ID NO: 14370 - DNA, 4890 bp, Oryza sativa
  Clone ID: TFbOSC900333j.C1.o19.fg
atggcaggtctagaggataaagatgaggagggtgcatctcattccccacgcaccaaaggcatcatccaatactttacaaggcaagtgaagcagcacacagaaggacttgatacagatttgcaggtgacaaatgagaagattggacaattggagtccacgcagatctccaccaacactaagcttacagggctggagacagcggtcgcccgcattgacactagccttgctgctcttgtgaggcattttgatgctctcaatgctggaggcaatggtgggggtaatgacgatgacattgacggagagtacgtcgaggataatttggaggatgaatatattgctgacactgaacaagatgatcgagatgctcgagatcgtcgacggctacacaacaatcgacgaggtatgggtggtcgccgccgacgcgaggtacgcaacaatgatgatgctttttctaaaattaaatttaagattcctccttttgatggaaaatatgatcctgatgcgtacctctcttgggagattgctgttgaccaaaaatttgcatgccatgagtttcctgagaacactagagttagagctgctacaagtgagttcaccgattttgcttcggtttggtggatagaacatggcaagaaaaatcctaataacatgccacaaacttgggatgctttgaaacgggtcatgcgggctagatttgttccttcttactatgcacgtgacttgctgaataggttgcaacaattgagacaggatgcgaaaagtgtagaggaatattatcaggagttacaaatgggcttgcttcgttgtaatttagaggaaactgaggacgctgccatggctagatttttgggtgggttaaaccgcgagatttatgacatcgtagactataaagattacactaatatgacccgattgtttcatcttgcttgtaaggctgaaagggaagtgcagggacgacgtgctagtgccaaggctaatttttctgcaagtaaaacttcatcatggcagacacgcaccactcctccggccggccgtactacttctccatcttccacacccacaaccagtcgagcagcacctcctccatctggtgacaagtcagcgataaaggctgctcagccagcaccgagtgcttcttcaatggcatccacaggccgaatgagagatgttcagtgccaccgttgcaagggctttgggcatgtgcagcgtgactgccctagcaagcgagttttggtagtaaaaaacgatggtgagtactcctctgctagtgatttcgatgatgatacacttgctttgcttgcggctgaccatgcagataatgagccaccggaagagcacattggggctgcatttgcggatcactatgagagcctcattgtgcagcgtgtccttagcgcacaaatggagaaggcggagcaaaatcagcgacacacgttgttccaaacaaagtgtgtcgtcaaagagcgttgttgccgcatgatcattgatggaggtagctgcaacaacttggctagcagcgagatggtggagaagcttgcacttagcaccaaaccgcacccacatccatactacatccaatggctgaacaacagtggtaaggcgaaggtaacaaaactggtgcacattaattttgcaattggaaattaccatgatgttgttgaatgtgatgttgtgcccatgcaagcttgtaatattctgctaggtagaccatggcaatttgatagggattctatgcatcatggtaggtcaaaccagtactcttttctgtaccatgataagaaaattgtgttgcatcccatgtctcctgaagatattttgcgtgatgatgttgctaaggctgccaaatccaaatgtgagagtgataaaaaagcccaatctgatggcaagaaacctgagacaatcaatttgaaacccagatgcttacttgctactaaatctgatattaatgagttgattgcatcaccttcagttgcctatgctttggtatgcaaagatgctttgatttcacttcacgatatgcagcattctttgccccctgctgttgctaacattttgcaggagtactctgatgtgtttcccaaggaagtgccaccggggctgccaccggtgcgcggcattgagcatcaaatcgacttgatcccaggtgcttccctaccgaatcgtgcgccataccgaaccaaccctgaggaaaccaaggagattcagcgtcaagttcatgaattgcttgataaagggtatgtacgcgagtctcttagtccatgtgcggttccggtaattttggtaccaaagaaagatggttcatggcgtatgtgtgttgattgtagagctattaataacattaccattcgatatcgtcatcctattcctaggttagatgatatgcttgatgaattgagtggctctattgtgttctccaaagttgatttgcgtagtggttaccaccagattcgtatgaagttgggtgatgaatggaaaacagcatttaaaacaaagtttgggttgtatgagtggttagtgatgccttttggtttaactaatgcacccagcactttcatgaggttgatgaatgaggttttgcgtcctttcattggaaaatttgtggtggtctactttgatgatatcttgatttacagcaagtctatgggtgaacattttaatcatttacgtgctgtttttaatgctcttcgtgatgcacgtttatttggtaaccttgagaagtgcaccttttgcacagatcgagtttcttttcttggctatgttgtaactccgcaggggattgaggttgatcaagccaaggttgaggcaattcagagttggccgactcctaaaacggtctcacaagtgcggagctttctaggactcgcggggttctatcgccgctttgtgcaggatttcagcaccattgctgcaccattgaatgcgcttacaaagaagggagtgcctttcacttggggcacatcacaagagaacgccttccacatgttgaaagataagttgactcatgcacctctcctccaacttcccgattttaataagacttttgaacttgaatgtgatgctagtgggattggattgggtggtgttttgctacaagaaggaaaacctgttgcatattttagtgaaaagttgagtgggcctgttcagaattattctacttatgataaggaattgtatgctcttgtgcgaactttagaaacatggcagcattatttgtggcccaaggaatttgtcatacattctgatcatgagtctttgaagcatattcgtagtcaagggaagctgaaccgtagacatgctaaatgggttgaatttattgaatcttttccttatgttatcaaacacaagaaagggaaggagaacatcattgctgatgctttatctaggagatacactttgttgacacaacttgactacaagatttttggcctggaaacaatcaaagaccaatatgcgcatgatgctgattttaatgatgtgttgctgcattgtaaggatggaagaacatggaacaaattcgtcatcaatgatgggtttgttttcagagctaacaagctatgcattccagctagctccgttcgcctgttgttgttgcaggaagcgcatggaggcggtttgatgggacattttggcgccaagaagacacatgacatccttgctagtcatttcttttggccacagatgcgaagagatgttggcaggttcgttgctcgctgcgctacatgtcaaaaggctaagtcacgcttacatccacatggtttgtatatgcctcttcctgttcctactgttccttgggaagatatttcaatggactttgtgttaggattgcctaggaccaagagggggcgtgatagcatttttgtggttgtggatagattttctaaaatggcacatttcataccatgtcataaaactgatgatgcttctcatatcgctgatttgttctttcgagaaattgttcgcttgcatggtgtgccaaacacaattgtttctgatcgtgacacaaaatttcttagccatttttggagaactttgtgggctaaattggggactaaacttttattttctactacttgtcatccccaaactgatggacaaactgaagtggtgaatagaaccttgtctactatgcttagggctgttttgaagaaaaatatcaagatgtgggaagaatgcttgcctcatattgaatttgcttataatcgttccttgcattctactacaaaaatgtgcccttttcagattgtgtatggtttgttgcctcgtgctccaattgatttgatgcctttaccatcttctgaaaaactgaattttgatgctaagcaacgtgctgagttgatgttaaaactgcatgagacaactaaagaaaacatagagcgcgtgaatgctaagtataagtttgctggtgacaaaggtagaagggaattgaattttgaacctggagatttggtttggttgcatttgcgaaaagaacgatttcctgatttgagaaagtctaaattgatgcctagagctgatggaccatttaaagtgttagcaaagattaatgagaatgcatataagattgatttgcctgcagatttcggggttagttccacatttaacgttgcagatttgaagccgtatttgggagaagaagatgagcttgagtcgaggacgactcaaatgcaagaaggggaggatgatgaggacatcaacaccatcgatacatccacgtccccccatgtacagcatgatggtcctattacccgcgctcgtgcacgtcaactaaattatcaggacgagtgccctcgtggccgggttgacgcgcaccacaagttcgcggcgaccattggagacggtgtatcggttgctaaggcgcagcgtctttggacagttgtagtcgagccgtga

SEQ ID NO: 14371 - DNA, 186 bp, Oryza sativa
  Clone ID: TFbOSC30329j.C1.o1.np
ttgtcaggcctaaagcgcctttgtaataatagcaaagaaccaggtcatttctccagagattgtccacagccgaagcgtaacctgcgtcatcactccggccattatgcaagaagaagacaagtcactcgccttgtggtcactggagcaaacgccgtacctgtgaggcctcatgttaattctaaccca

SEQ ID NO: 14372 - DNA, 4161 bp, Oryza sativa
  Clone ID: TFbOSC401329j.C1.o3.fg
atggccggcacttcttcatcctccaacacctcaaccggtggctactccttgatgggttgcattaaagatattccgaccctaaaaggagataactacgcagaatggaaaagaaaactcgaccttgcttttatcttgggagaggtggactgggtgttgactaccccatgtcctatagaacctactgaacttgtcagaggtgaaaatgagtcagatgctgactggcaaaagagacagagggacaatgctcctctcgtcatgtcgtatgacattgaacaaaagaaatggtccttagccaacaagaaatgtttggctgtggtaaagaatacgattgagcctaccatattgggctcgatcccagagtgtgacgctgtctcagagtaccttgaaagaataaagagtcagtttactggctcttcaaagacttatgctacacagctgatcaagcagcttgtgacagaaaggtaccatggaggtggtgttagagaccacatacttagaatgagcaacatggcttccaaattgaagccaatggatttgggcataacagatgactttctggtccatctggttatggcctcattgccaaagcagtttgacaattttattgtcaactacaacataagtccagagaaatggaactttgagaagctcattgctaattgtgtgcaagaggaggagagaatcaaagaatcaaatggtggttcaataaactatgttaaagataagaaaaagaaccacaagtctcccacctcaaaaggtaaacagtctcagcatctgcctcaacaacaacagttcgctgttgagaaagatcaatgtctccactgcaagaagacaggacactacaagagagattgtcctgactttttgaaaatgatcatggcaaagaaaggtgagaacattattacatttgtaaatgaatctcattatgttggttactctagatccacatggtggattgattctggagcaactattcatgcttgtaattgtttaaaggcattccgttcgacgaggactacgcaaagaagagaaagcaccattagagttgccaatggagttgaagaaaaagttgaagctgttggagattttcctctagagctcgcgaatggcttcatacttttacttcgagatgtcttttatgttccttctttgcaaagaaacttaataagtgtatcaaagttggattttgatggatatgattgccgctttggaagtggcaaatgtgaactatggcataataatgcatgtattggtcttgctgtgttgcgagacgagctttatttgttatctctttctgagaatgtgaatgttgtgtcctcgttgacaaaagaaaacaagaaaagaaaggggagaattgagagactagttaagaatgaaattcttcctccattggagttctcagacttagaacaatgcatagaatgcattaaaggaaaatttgtaaagagcatcaaaaagggtgcaaaacgaagcgcaggaattttagagatcattcatacagatatttgtggtccatttcctgtgaaaagtgtggatggctatgactcgttcataacattcacagatgattactcccgctatggttatatttatccaattaaagagcgatcagaagcattggataaatttaagatattcaaagctgaagttgaaaatcagcatgatataaagattaaagtagtaagatctgaccgtgggggggagtactatggtcgacatacgccttatgggcaagtccctggaccttttgcaaggttcttgctagagaatggaatagtagcccagtattcaacaccgggcgaacctcaacagaatggggtagctgaaaggcgcaaccgtaccctcatggatatggtgcgcagcatgatgagctactccacactaccactcggtttatggatggaggcgttaaaaaccgccattcatattctcaacagagttccaagcaaatcggtgcccaaaacaccgtatgagctatggacaggaagagtaccctcgctaactcacctccgtgtgtgggggagtcctgcagaggccaaagtatttaacccaaatattgggaagttggaccccaaaacagtcagctgccattttattggctatcctgaaagatcaaaaggctatcgtttctactgtccaaacagttatacaaagtttgtagaaacgagacacgccgtcttcttggaagacgaaatgattagggggagctcggtagttcgagaaattgatcttgaggagaggcgggtgtctgtacccgctccgtcgactcaggaacctttcttctctctacctgctgatgttgtgcctgcaatgcctgtcattgaggtaccagcacctgttgttacccttcctgtggcaacaatgaatgagagtgaggaacctgttatacaggattcaacagaaatggttgccacaccagaggaggagctacaacagtctcaaatagataatgtgccagtacaggagactcatcaagagcctcaggtacaggatgtgccaaatgtgcaggcccctagaaggtctgaaagagtcagaagatcggctatccgtgatgactataaagtttataatatagaagagtcgcatatggaggatgatcccacctcatatgaagaggccatgagaagcgctcgctcatctgaatggttggaatccatgaaagatgaaatggaatcaatgaaactaaacgatgtttgggatttagaagaaattcctaaaggagccaaaacagtaggctgtaaatgggtctacaaaaccaaatatgactccagagggaatatagaaaagtttaaagcgcgacttgtggcaaaaggcttcacacaacgagaagggattgattacaatgagacattttctccagtctcttgtaaagattccttcaggattataatggcactagtggcacattatgatttggaattacatcagatggatgtaaaaacggcatttctaaatggagatttggaggaaaaagtatacatggcgcaaccgaaaggttttgtcatgaaaggaaacgaaaatatgggatgtcgtctaaagagatccatttatggattaaagcaagcttcgagacagtggtacttgaagtttgatgggacaataaagaaatttgggtttcaagagaatgtcgaggacaactgtatttattcaaagtttaaaaatgggagatttattttcctaattctgtatgtggatgacattctactggctagtagtgatgtcagtctactgcaggaaacaaagaaattcttgtcctcaaactttgacatgaaagacctcggtgaggcttcatatgttttgggcatagagattcaccgagatagaacaaagtatgcattgggactttctcaaaagacatatatagaaaaggtgttgaagaaattcaacatgtacagatgcagtgctacacctgctcctataatgaaaggcgaaaagtatggggcatcgcaatgtcccagaaatcagtatgagctcaatgaaatgaaaacaaagccatatgcgtcagctgtaggaagcctacagtacgcgcaagtgtgcacacgacctgacttggcatttgttaccgggttacttggcagatttcagagtaatccaggcctagagcactggaaattggtaaagaaagtcttgcgttatttgcaaggaacaaaaggcctcatgctgtcttacagaagatcagaatcactccagatagtggggtactcagattctgactttgcaaaagataatacaaagtcaacatcgggatatgtgtttaccctggcaggaggagctatttcatggaaaagctcaaaacagactatcactgcagggtctactatgtatgccgagtttatagcatgctatgaggcaacggggcaggtgaactggctaaagaagttcatacccggtttaaaggtggttgacagtattgagaaaccactaaagttatactgcgacaacgaacccgcagtaatgtacgctcacaacaatcagtcaagtggtgctgccaaacacattgacataaagtactatgttgtgaaggacaaagtccgggatcaaacaatcagtctcgagcacattaaaacagaaaggatgctcgcggatccgctcacgaaaggcctaccacccaacgtgttcaaggaacatgtagccggcatgggtttaagggaagccttatga

SEQ ID NO: 14373 - DNA, 3891 bp, Oryza sativa
  Clone ID: TFbOSC411956j.C1.o3.fg
atggcgacgccgtccacgcggtcgcgtggctactccttgatgggttgcattaaagatattccgaccctaaaaggagataactacgcagaatggaaaagaaaactcgaccttgcttttatcttgggagaggtggactgggtgttgactaccccatgtcctatagaacttgctgaacttatcagaggtgaaaatgagtcagatgctgactggcaaaagagacagagggacaatgctcctctcgtcatgtcgtatgacattgaacaaaagaaatggtccttagccaacaagaaatgtttggctgtggtaaagaatacgattgagcctaccatattgggctcgatcccagagtgtgacgctgtctcagagtaccttgaaagaataaagagtcagtttactggctcttcaaagacttatgctacacagctgatcaagcagcttgtgacagaaaggtaccatggaggtggtgttagagaccacatacttagaataagcaacatggcttccaagttgaagccaatggatttgggcataacagatgactttctggtccatctggttatggcctcattgccaaagcagtttgacaattttattgtcaactacaacataagtccagagaaatggaactttgagaagctcattgctaattgtgtgcaagaggaggagagaatcaacgaatcaaatggtggttcaataaactatgttaaagataagaaaaaaaaccacaagtctcccacctcaaaaggtaaacagtctcagcatctgcctcagcaacaacagttcgctgttgagaaagatcaatgtctccactgcaagaagacaggacactacaagagagattgtcctgactttttgaaaatgatcatggcaaagaaaggtgagaacattattacatttgtaaatgaatctcattatgttggttactctagatccacatggtggattgattctggagcaactattcatgcttgtaattgtttaaaggcattccgttcgacgaggactacgcaaagaagagaaagcaccattagagttgccaatggagttgaagaaaaagttgaagctgttggagatcttcctctagagctcgcgaatggcttcatacttttacttcgagatgtcttttatgttccttctttgcaaagaaacttaataagtgtatcaaagttggattttgatggatatgattgccgctttggaagtggcaaatgtgaactatggcataataatgcatgtattggtcttgctgtgttgcgagacgagctttatttgttatctctttctgagaatgtgaatgttgtgtcctcgttgacaaaagaaaacaagaaaagaaaggggagaattgagagactagttaagaatgaaattcttcctccattggggttctcagaacaatgcatagaatgcattaaaggaaaatttgtaaagagcatcaaaaagggtgcaaaacgaagcgcaggaattttagagatcattcatacagatatttgtggtccatttcctgtgaaaagtgtggatggctatgactcgttcataacattcacagatgattactcccgctatggttatatttatccaattaaagagcgatcagaagcactggataaatttaagatattcaaagctgaagttgaaaatcagcatgatataaagattaaagtagtaagatctaaccgtgggggggagtactatggtcgacatacgccttatgggcaagtccctggaccttttgcaaggttcttgctagagaatggaatagtagcccagtattcaacaccgggcgaacctcaacagaatggggtagctgaaaggcgcaaccgtacccttatggatatggtgcgcagcataatgagctactccacactaccactcggtttatggatggaggcgttaaaaaccgccattcatattctcaacagagttccaagcaaatcggtgcccaaaacaccgtatgagctatggataggaagagtaccctcgctaactcacctccgtgtgtgggggagtcctacagaggccaaagtatttaacccaaatattgggaagttggaccccaaaacagtcagctgccattttattggctatcctgaaagatcaaaaggctatcgtttctactgtccaaacagttatacaaagtttgtagaaacgagacacgccgtcttcttggaagacgaaatgattagggggagctcggtagttcgagaaattgatcttgaggagaggcgggtgtctgtacccgctccgtcgactcaggaacctttcttctctctacctgctgatgttgtgcctgcaatgcctgtcattgaggtaccaacacctgttgttacccctcctgtggcaacaatgaatgagagtgaggaacctgttatacaggattcaacagaaatggttgccacaccagaggaggagctacaacagcctcaaatagataatgtgccagtacaggagactcatcaagagcctcaggtacaggatgtgccaaatgtgcaggcccctagaagagggaatatagaaaagtttaaagcgcgacttgtggcaaaaggcttcacacaacgagaagggattgattacaatgagacattttctccagtctcttgtaaagattccttcaggattataatggcactagtggcacattatgatttggaattacatcagttggatgtaaaaacggcatttctaaatggagatttggaggaaaaagtatacatggcgcaaccgaaaggttttgtcatgaaaggaaacgaaaatatgggatgtcgtctaaagagatccatttatggattaaagcaagcttcgagacagtggtacttgaagtttgatgggacaataaaaaaatttgggtttcaagagaatgtcgaggacaactgtatttattcaaagtttaagaatgggagatttattttcctaattctgtatgtggatgacattctactggctagtagtgatgtcagtctactgcaggaaacaaaaaaattcttgtcctcaaactttgacatgaaagacctcggtgaggcttcatatgttttgggcatagagattcaccgagatagaacaaagtatgcattgggactttctcaaaagacatatatagaaaaggtgttgaagaaattcaacatgtacagatgcagtgctacacctgctcctataatgaaaggcgaaaagtatggggcatcgcaatgtcccagaaatcagtatgagctcaatgaaatgaaaacaaagccatatgcgtcagctgtaggaagcctacagtatgcgcaagtgtgcacacgacctgacttggcatttgttaccgggttacttggcagatttcagagtaatccaggcctagagcactggaaattggtaaagaaagtcttgcgttatttgcaaggaacaaaaggcctcatgctgtcttacaaaagatcagaatcactccagatagtggggtactcagattctgactttgcaaaagataatacaaagtcaacatcgggatacgtgtttaccctggcaggaggagctatttcatggaaaagctcaaaacagactatcactgcagggtctactatgtatgccgagtttatagcatgctatgaggcaacggggcaggtgaactggctaaagaagttcatacccggtttaaaggtggttgacagtattgagaaaccactaaagttatactgcgacaacgaacccgcagtaatgtacgctcacaacaatcagtcaagtggtgctgccaaacacattgacataaagtactatgttgtgaaggacaaagtccgggatcaaacaatcagtctcgagcacattaaaacagaaaggatgctcgcggatccgctcacgaaaggcctaccacccaacgtgttcaaggaacatgtagccggcatgggtttaagggaagccttatga

SEQ ID NO: 14374 - DNA, 5082 bp, Oryza sativa
  Clone ID: TFbOSC414037j.C1.o3.fg
atggccggcacttcttcatcctccaacacctcaaccggtggctactccttgatgggttgcattaaagatattccgaccctaaaaggagataactacgcagaatggaaaagaaaactcgaccttgcttttatcttgggagaggtggactgggtgttgactaccccatgtcctatagaacctactgaacttgtcagaggtgaaaatgagtcagatgctgactggcaaaagagacagagggacaatgctcctctcgtcatgtcgtatgacattgaacaaaagaaatggtccttagccaacaagaaatgtttggctgtggtaaagaatacgattgagcctaccatattgggctcgatcccagagtgtgacgctgtctcagagtaccttgaaagaataaagagtcagtttactggctcttcaaagacttatgctacacagctgatcaagcagcttgtgacagaaaggtaccatggaggtggtgttagagaccacatacttagaatgagcaacatggcttccaaattgaagccaatggatttgggcataacagatgactttctggtccatctggttatggcctcattgccaaagcagtttgacaattttattgtcaactacaacataagtccagagaaatggaactttgagaagctcattgctaattgtgtgcaagaggaggagagaatcaaagaatcaaatggtggttcaataaactatgttaaagataagaaaaagaaccacaagtctcccacctcaaaaggtaaacagtctcagcatctgcctcaacaacaacagttcgctgttgagaaagatcaatgtctccactgcaagaagacaggacactacaagagagattgtcctgactttttgaaaatgatcatggcaaagaaaggtgagaacattattacatttgtaaatgaatctcattatgttggttactctagatccacatggtggattgattctggagcaactattcatgcttgtaattgtttaaaggcattccgttcgacgaggactacgcaaagaagagaaagcaccattagagttgccaatggagttgaagaaaaagttgaagctgttggagattttcctctagagctcgcgaatggcttcatacttttacttcgagatgtcttttatgttccttctttgcaaagaaacttaataagtgtatcaaagttggattttgatggatatgattgccgctttggaagtggcaaatgtgaactatggcataataatgcatgtattggtcttgctgtgttgcgagacgagctttatttgttatctctttctgagaatgtgaatgttgtgtcctcgttgacaaaagaaaacaagaaaagaaaggggagaattgagagactagttaagaatgaaattcttcctccattggagttctcagacttagaacaatgcatagaatgcattaaaggaaaatttgtaaagagcatcaaaaagggtgcaaaacgaagcgcaggaattttagagatcattcatacagatatttgtggtccatttcctgtgaaaagtgtggatggctatgactcgttcataacattcacagatgattactcccgctatggttatatttatccaattaaagagcgatcagaagcattggataaatttaagatattcaaagctgaagttgaaaatcagcatgatataaagattaaagtagtaagatctgaccgtgggggggagtactatggtcgacatacgccttatgggcaagtccctggaccttttgcaaggttcttgctagagaatggaatagtagcccagtattcaacaccgggcgaacctcaacagaatggggtagctgaaaggcgcaaccgtaccctcatggatatggcgttaaaaaccgccattcatattctcaacagagttccaagcaaatcggtgcccaaaacaccgtatgagctatggacaggaagagtaccctcgctaactcacctccgtgtgtgggggagtcctgcagaggccaaagtatttaacccaaatattgggaagttggaccccaaaacagtcagctgccattttattggctatcctgaaagatcaaaaggctatcgtttctactgtccaaacagttatacaaagtttgtagaaacgagacacgccgtcttcttggaagacgaaatgattagggggagctcggtagttcgagaaattgatcttgaggagaggcgggtgtctgtacccgctccgtcgactcaggaacctttcttctctctacctgctgatgttgtgcctgcaatgcctgtcattgaggtaccagcacctgttgttacccttcctgtggcaacaatgaatgagagtgaggaacctgttatacaggattcaacagaaatggttgccacaccagaggaggagctacaacagtctcaaatagataatgtgccagtacaggagactcatcaagagcctcaggtacaggatgtgccaaatgtgcaggcccctagaaggtctgaaagagtcagaagatcggctatccgtgatgactataaagtttataatatagaagagtcgcatatggaggatgatcccacctcatatgaagaggccatgagaagcgctcgctcatctgaatggttggaatccatgaaagatgaaatggaatcaatgaaactaaacgatgtttgggatttagaagaaattcctaaaggagccaaaacagtaggctgtaaatgggtctacaaaaccaaatatgactccagagggaatatagaaaagtttaaagcgcgacttgtggcaaaaggcttcacacaacgagaagggattgattacaatgagacattttctccagtctcttgtaaagattccttcaggattataatggcactagtggcacattatgatttggaattacatcagatggatgtaaaaacggcatttctaaatggagatttggaggaaaaagtatacatggcgcaaccgaaaggttttgtcatgaaaggaaacgaaaatatgggatgtcgtctaaagagatccatttatggattaaagcaagcttcgagacagtggtacttgaagtttgatgggacaataaagaaatttgggtttcaagagaatgtcgaggacaactgtatttattcaaagtttaaaaatgggagatttattttcctaattctgtatgtggatgacattctactggctagtagtgatgtcagtctactgcaggaaacaaagaaattcttgtcctcaaactttgacatgaaagacctcggtgaggcttcatatgttttgggcatagagattcaccgagatagaacaaagtatgcattgggactttctcaaaagacatatatagaaaaggtgttgaagaaattcaacatgtacagatgcagtgctacacctgctcctataatgaaaggcgaaaagtatggggcatcgcaatgtcccagaaatcagtatgagctcaatgaaatgaaaacaaagccatatgcgtcagctgtaggaagcctacagtacgcgcaagtgtgcacacgacctgacttggcatttgttaccgggttacttggcagatttcagagtaatccaggcctagagcactggaaattggtaaagaaagtcttgcgttatttgcaaggaacaaaaggcctcatgctgtcttacagaagatcagaatcactccagatagtggggtactcagattctgactttgcaaaagataatacaaagtcaacatcgggatatgtgtttaccctggcaggaggagctatttcatggaaaagctcaaaacagactatcactgcagggtctactatgtatgccgagtttatagcatgctatgaggcaacggggcaggtgaactggctaaagaagttcatacccggtttaaaggtggttgacagtattgagaaaccactaaagttatactgcgacaacgaacccgcagtaatcatcgtgctggagaagaagacgttcttggtggagcggttcgacaagtacgtcaagacgctcggatccgggatccacgtgctcgcccccctcgtcgaccacatcgcgtacgtccactcactcaaggaggaggccatccccatccccgaccagtccgccatcaccaaggacaacatctccatccagatcgacggtgtcctctacgtcaagaatttttggggaaacttcaaattgcatgttctagatgaagcacttcttgctttcaagaaggcagttacaacttctgatgggatattcctcaactggcgtgaacaagatgtggatccttgcaattggaaggatgttagatgtgacagtcacaccaagagactcaaggcaaggagaggcagtgtctcatgggaatcaggggtaaggtgcttctcgattggcccatcagaactggtagcacgtggttcgaaggtatggctatccacgcgcgcaggggggcacctggaagcaggcggcgtcgacgatgccgaaggcggcgacggcgacccaggcggcccagccggaaggctgcctcttgccgcgcgaggcggcgaaggcgacgagcagtgtgccggcggggaggaggcgaagctcggcgacgaagaaggggcccgtcttggctatgacccccttcatggccaccatggccgtgccccagaagaagaagggcgacaccagcgacgcccactcccaccactccctccccacgaatgccgccgaggccgagacgccatcctcctcctcggagacccgcgcgaggccttcgacgaagcactcgacgtccgtgcccgtgccgacgcagtcaaccgcgtccggcggggagggcggcatcgcctcgcggcggaagggttccgcacctgggcggtcgtcgacgtagcactcaacgtcggcggcccgtgccgacgcagtcaaccgcgtcaccgggttaggcggcgtgtggcggggcgcggccgccgccgcgagccgccgcgagatgtcgcacgccacggccaccgcgcgggacggagtagacagtggagggcgggaggatggagtacggcggggcggggcaagacggagtacggcggcgcgggagtacggcggggcggggcggcgctgactgagggcggcggcggacgcgaatggaggcagcggcgcgagtggactgggtga

SEQ ID NO: 14375 - DNA, 2174 bp, Oryza sativa
  Clone ID: TFbOSC100686j.C1.o4.np
gtgaagacagggaatgatccccgtgcctccaatgacgctaggggcagcgaagagcagaccgatggagctcatatcagtggtgcatctgacagcagttcatctccaccgcccgagaacccaacggtcactcagatgatgacaatgatgatacaacagatgcagcaacattaccatcagatgttgcagcaggcgcagcagaaccagcagcaggcgcagcagaaccagcagtctggtcctccatcatcacacctgtccaaactgttagactttcatcatatccagccacccactttctcaagcaccaccaacccaatgtaggccaacgactggctccgtgcgattgagaagaagctgaaccttctgcaatgcaatgaccaagagaaggttgcttttgctacacatcagttgcaaggtcccgcttctgcttggtgggataactacgtggtgacccgtccagattcaacggaggttacttgggcagagttttgtcaaagcttcaggaaggcacaaattcctgaggggattatggcacaaaagaaaagagagttccgcgcactgcatcaagaaaccaggatagttacagagtacttgcatgagttcaaccgccttgcgcgctacgctcctaaggatgtgcgcaccgatgccgagaagcaggagaagtttttgtttggtctcgatgataaattgaccaaccagctgatctccggagtctatgatgactttgagaagctcgtggacaaggctatccgtcaggaagagcaacgcaacaaaatggaccgaaatagaaaggtagctcagatcagctttcctcaggggaacaattagaagcctcgcttcatgacgggacagctaggtgagccttccaccctgatcatccgtcagcaccatccttaccacccgagtaacttcaacaacgactacaacggtggcagtcacaacaacagtaagcagcataaccacaactcgacttcacccccattaatggcaccagctcagtcagatccgccagctatgtcagctcagtcagaacagctcaagaaggagtctgcaggaaagccaagaccctgcttcaactgtggcaagcacggccactttgctggcaagtgtccgaagctaaagcgcgttggacctaggttcgtccaggcccgcgtcaatcatgcgtctgcagagaaagcacaggcatcaccagaggtcgtgctgggcacgtttccggtgaactcatatccagcaacagttctctttgattctggtgcctcgcattcttttatatccaagagatttgctggggcacatggattatcggtagtggaacttaaaatactgatgcaggttcatacccctggaaatgacatgaggacagcacactactgcccctcagtgactatagagatcaagaggtcacggtttctatccaacctcatccttctcgaatccaaagacctagatgtcattctcggaatggattggttgaccagacacaagggagtgatcgactgcgcaagtcgcactatcaccctaagcaacgacaaaggggagaagatcaccttccgttctccagtgtcacagaagtccgtagcgagtctgaatcaggctgttattgaggatcagacagaaatagcggaaaaaaatcccaagaagttggaggatatacctatagtacaagagtatcctgaggtgttcccagaaggcctcactacaatgccaccgaagagagaaatcgagttccagattgatctggcacccggaactgctccaatctacaagaggccgtacagaatggcagctaatgagctagcagaagtcaaaaagcaggttgacgaacagctgcagaaagggtacatccgaccgagtacttcaccttggggtgctccggttatctttgtggaaaagaaagacaagaccaagaggatgtgcgttgattatcgcgcccttaatgaggtcacaatcaagaacaaatatccgttgccaagaattgatgatctgtttgatcagctaaaaggagctaaggtgttttccaatatagacctgcgatcaggctatcatcagttgagaattcgggaagaggatattcccaagacagccttcgccactcggtcttgctctcttttcccccacaccagaggagttttcggacacgaatgaaaaaactaatttcataactcgcctgaaaaccg

SEQ ID NO: 14376 - DNA, 3735 bp, Oryza sativa
  Clone ID: TFbOSC21389j.C1.o4.fg
atggaggccaacgactggctccgtgctattgagaagaagctgaacctactgcaatgcaacgaccaagagaaagttgcttttgctacacaccagttgcaaggtcccgcttctgcctggtgggataactacgtggtgacccgtccagatgcaacgaaggttacttgggtagagttttgtcaaaactttaggaaggcacagattcctgaagggattgtggcacaacagaagagagagttccgtgcattgcaacaaggaaccagaacggttacagagtacctgcacgagttcaaccgcctcgcgcgctacgctcctgaggacgtgcgcaccgatgctgagaagcaggagaagtttttgtttgggctcgacgatgaattgaccaaccagctaatctccggagtctatgaggactttgagaagcttgtggacaaggctatccgccaggaagagcaacgcaacaaaatggaccgaaaaagaaaggcagctcagatcagctttcctcaggggaacaatcagaagcctcgcttcatgacgggacagctaggtgggccttccaccctgatcgtctgtcagcaccgtccctatcacccgagtaacttcaacaacgattacaacggtggcagtcacaacaatagtaagcagcacaaccacaactcgactccacccctactaatggcaccagctcagtcagatctgccagctgtgtcagctcagtcagaacaacccaagaagggggctgtaggaaagccaagaccctgcttcaactgtggcaagcacggccactttgctggcaagtgtccgaagctgaatcgcactggacccaggttcatccaggcccacgccaatcatgtgtctgcagaggaagcacaggcagcaccagaggtcgtgttgggcacgtttccagtgaactcatatccagcaacagttctctttgattcaggtgcctcgcattctttcatttccaaaagatttgctgggacacatggattatcggtagtggaacttaaaataccgatgcaggttcatacccctggaaatgatatgaggacagcacactactacccctcggtgactatagagatcaaaagatcaccgtttctatccaacctcatccttctcgaatctaaagacctagatgtcattctcggaatggattggttgaccagaaacaagggagtgattgactgcgcaagccgcaccatcaccctaaccaacgacaaaggggagaagatcaccttccgttccccagcgtcgcagaagtccgtagcgagtctgaatcaggctgctattgagggtcagacagaaacagtggagaaaagtcccaggaagttggaggatattcctatagtacaagagtatcctgaggtgttcccagaagacctcactacaatgccaccgaagagagaaatcgagttccggatcgatttggcacccgggactgctccaatttacaagaggccgtacagaatgacagctaatgagctagcagaggtcaagaagcaggttgacgaacagctgcagaaagggtacatccgaccgagtacttcaccttggggtgctccggttatctttgtggagaagaaagacaagactaagaggatgtgcgttgattatcgcgcccttaatgaggtcacaatcaagaacaaatatccgttgcccagaattgatgacctgtttgatcagctaaaaggagctaaggtgttttccaagatagacctgcgatcaggctatcatcagttgagaattcgggaagaggatattcccaagacagccttcaccactcggtatgggttgtttgagtgcacggttatgtcctttggactcaccaatgaaccggctttcttcatgaacttgatgaacaaagtgtttatggagtttcttgacaagtttgtcgtggtattcattgacgacatacttatttattcaaaatcagaagaggaacatgagcagcatctccgtctggtactcgagaaattgaaggagcaccagctatatgccaagtttagcaagtgtgacttctggttatcagaggtcaaatttctgggtcacatcatttctgctcaaggcgtggcagtggatccatcaaatgtggagtcagttacaaagtggaccccactaaagacagtttctcagatccggagttttcttggacttgcgggctattaccgtcggttcatcgaaaatttctccaagattgccaggcccatgacacagttgctaaagaaagatgaaaaattcaagtggtcagctgagtgcaaccaaagttttgaagaactcaagaagaggttagtctctgcaccagttctaattctgccagatcagacaaaagacttccaagtctactatgatgcatctcgccaagggttgggatgtgtgttgatgcaagaaggcagagtggtcgcatacgcttcgcgacagttgcgtccacacgagaccaattatcccactcatgaccttgagttggcagcagtggttcatgctctgaaaatctggcggcactatcttattggcaaccgctgtgaagtatacactgatcacaagagtctgaagtacatcttcactcagcctgacttgaatctccgacagcgaagatggctggagttaattaaagattatgacatggggatacattatcatccagacaaagcaaatgtggtagcagatgctttgagcagaaaaagctattgcaatgccttatgcactgaagacatgtgtggcaaattgcagcaagatcttgagcacctaaatttgggcatcgtcgaacacggtactaaaatgtaccaggacctcaaagagaaattctggtgggccagcatgagaagagagatagccggattcgtcgcactctgcgatgtttgtcggcgagtcaaagcagaacatcagaggcccgcaggactgctacaaccccttcagatcccggaatggaaatgggaagaaatcggaatggatttcatcactggtttgcccaggacatcgtcagggcatgattcaatttgggtagtcgtggatcgcctcacgaaagttgctcatttcattccggtgcacactacctatacggggaaaagttatcaagccagtttgcaaatggcaccgtttaaagcgttgtacggacggaaatgccgcactccgatcttctgggatcaaattggagaacgtcagttgtttgggacggaagtattaactgaagcagaggagaaagtcagaaccgtcagagaaaggctaagaattgcgcaatctcgacagaagagttatgctgacaaccgccgaagagagcttactttcgaagcaggggattatgtgtaccttcgtgtcactccgcttcggggagtacaccgcttccaaaccaaaggcaagttggcaccacgctttgtgggaccatacaggatcttggaacgcagaggtgaagtcgcttaccagcttgagctcccatctaatatggttggtatccacgatgtgtttcatgtatctcaattgaagaagtgtttgagggtacctgaggaacaagctagctcagagcacattgacatccaggaagatctgacttatgtggagaagccgatttgtatccttgagaccagtgagagatggaccagaaacaaggtgatcaggttttgcaaagttcagtggagccaccactcagaagaagaggccacctgggaaagagaagatgaattgaaggccgctcatccgcacctcttcgccagctcttccgaatctcggggtcgagattccgtttaa

SEQ ID NO: 14377 - DNA, 3723 bp, Oryza sativa
  Clone ID: TFbOSC400910j.C1.o23.fg
atggcaagcggaagcggcgagggcaagggccgccgccaccaggacaatatcccaagcgtcgtcctgctcgagctctggggccacgtcgccgacgatgaccaccggcctgacgccaccaccgccacttccacgacgagcaccggcctgccaatctcggtgaccttgtgcgccgccaccccgccaagcctctcgcacctctccgtcgactgccctggtctggtggatctggatcccaatcccttagataagtttgtggcgcccacggtgatcagcacggatgccgacctcgtcctccttcgtgtccctgtcgatcgctttgccagatttgatcactgtttcagcgactacttcgtctacaaggtgcactctcactctgaaagcgcaaagctgcaccgtctcccgagcccacgtggccgtggctttgcagacgacaacattgccatactgagctgcggcaacgacgacgacgactcctacgctgtggccgctcttcaacccttgcatcatgtccacttcaggcttcacctgtgtcgctctacccccgatggaaagccagggagttggacctcccatcagttgacagtggaggagccgctgaggggaacggtgtgccccgtccctgactcagcactgaggaggatcttccatgccaccaccaaggtgattacgcttggaggtgctaaaggtacagttggctgggttgatctctggcgaggcatccttctctgtgatgtgctcgacgagattgagagccccaagctccgcgatttgccgctgcccttgccctctacgggcaactggcctttgttcctcaatcgctgcccctactattgtcgtgacatcgtcgtcaaccagagcagagacactatcaagtacgtcgagatggaattcaccatcttgaactcatctcaagatccacgctcctcgtatcacgaatgggtggccagccaagaatttcgaagttcgcatctagacatcttggtcgatgatggtagcttgaagatcaacacatggaacatgcctatcccgattttttcacaactatttgcatcgaatttggaagaaaaaggtataccactccccaccacaaggggagcagccaagatggtattcactcttaacatgagggcacgtgttctcgaagaactggagaaacttcatagcatgagtcaccttggttttatgcgttgcttcctttccactgggatctccaaacatcttaagcctacagttgggaagcaaaatggagttgggagctgtcacgcccagaaattcccgaatagaattccaagcagaatgtgcattaaaatccccgtccaggaccagccggggatgcaacggtacgagcctatagaacagctcccgcagcacctccagttccgcccgcagttcctgcagctccagttccagctcccgcgttcactctctccttcgctccagcatcagccgccaggggtccagccagtggcaccggagatggtctacaccaggactggtagccgcgcaacaggcgagggcagcaacggcgaagaacgcgctgatggtgtgcaccccaacagtgattctggcaatggtccgccaccacttcccgagaatccgacgcttgcccaagttatggcacatcagactcagatgatggcagccatgatgcagcagatgcagcagcagcaccagcagatgcaccagaggatgatgcagcacgccgaacagcagcatcaacagtttggtccccctccccctcagtccaagttgccagagtttctacgcgtcaggccacccaccttctccagcaccaccaaccctatggaggcgaacgactggctccatgcaatagagaagaagctgaatctcctgcagtgtaatgatcaggagaaggtcgcttttgccacacaccagcttcagggtcccgcgtcagcttggactgtgacagagtacctccatgagttcaatcgcctcgcgcgatatgcaccagaggatgtccgcaccgacgccgagaagcaggagaagttcatggcgggtctggatgacgagctgaccaaccaactgatatctggggactacgccgactttgagaggctggttgacaaggcaatccgtcaggaggaccaacgcaacaagatggacaggaagaggaaggccgctcagttcagggcacatcagggaagtcaccagaggccgcgcttcactcccggacagcagggtggacctaccaccatgatcgtccgccagcaccgcccgttcaaccctagcaacttccaccagggcaccagtggcagtcagaaccaccatggaggtcagcccaaccgcggtgcagctccacgcccatcagtggcaccggcacagtcaggccagcccgcgcaagccaagaaggagacgggagcaaaaccagggtcctgcttcaactgtgacgagcttggccacttcgctgacaaatgcccgaagcccaggcgtgccgggccaaggtttatccaggctcgtgtcaaccacgcatctgcagaggaggcacaagcagcaccggaggtcgtactgggtacgttccctgttaactcaatccctgcaacagtactttttgattctagtgcaacgcattctttcatctcaaagaaatttgtcgggatgcatgggttaataagagaggaacttagcacaccgatgcgggttcataccccagggaatagctccacttcggttcaattcagcccttctataacaatagaaattcaaaggtcaccatttctagccaacctcattcttctcgaatccaaagacctaaatgtcattcttgggatggattggctgaccaagtttaagggagtcatcgattgtgcgagtcgcacagtcaccttgaccaacgagaagggagaaaccgtgattgagacggaaatcccagtggacaccgtagagaagaacttgagaaaattggaagatatacccatagtctgcgagtatccagaagtgttccccgaagacctcactaccatgccacccaagagagagattgaattccggattgacttggcaccgggaactgctccaatctataagagaccgtacagaatggcggccaacgaattagcagaggtcaagaagcaagttgatgagcagctgcagaaagggtacatacgaccaagcacttcaccttggggcgctccggtcatttttgtggagaaaaaggataagacgaagaggatgtgcgtcgattatcgcgcacttaacgaggtcacaatcaagaataaatatcctttaccgcgaatcgacgatttatttgatcaactgaatggagctaaagtgttttctaagatagacctgcgatcaggctaccaccagttgagaatccgggaagaggatattccgaagacggccttcaccactcggtacgggctatatgagtgcacggttatgtccttcggacttaccaacgcacccgcattcttcatgaatctgatgaacaaagtgttcatggaatttctggacaagtttgttgtggtgttcatcgacgacatacttatctactcaaaatccgaggaagaacatgagcaacatctccgtctggtacttgaaaagttgaaggagcaccagctatacgccaagttcagcaagtgtgacttctggttgacggaagtcaaatttctgggcgtgacaggagccccagtggccagtttagttttctgtaaagtcaacgtacaaccatcttcacacatgtcacgcccggaaattcactag

SEQ ID NO: 14378 - DNA, 1938 bp, Oryza sativa
  Clone ID: TFbOSC5283j.C1.o1.fg
atgtcagctcagtcaaaacagctcaagaaggagtctgcaggaaagccaagaccctgcttcaactgtggcaagcacggccactttgctggcaagtgtccgaagctgaagcgcattggacctagacataagggagtgatcgactgcgcaagtcgcaccatcaccctaaccaacgacaaaggagagaagatcaccttccgttctccgacaaaaatagcggaaaaaaatcccaagaagttggaggatatacctatagtacaagagtatcctgaggtgttcccagaagacctcactacaatgccaccgaagagagaaatcaagttccggattgatttggcacccgggactgctccaatttacaagaggccgtatagaatggcagctaatgagctagcagaggtcaagaagcaggttgacgaacagctgcagaaagggtacatccgaccgagtacttcaccttggggtgctccggtaatctttgtggagaagaaagacaagaccaagaggatgtgtgttgattatcgcgcccttaatgaggtcacaatcaagaacaaatatccgttgccaagaattgatgacctgtttgatcagctaaaaggagctaagttgagaattcgggaagaggatattcccaagacagccttcaccactcggtatgggttgtttgagtgcacggttatgtcatttggactcaccaatgcaccggctttcttcatgaacttgatgaacaaagtgtttatggagtttcttgacaagtttgtcgtggtgttcattgacgacatacttatttattcaaaatcagaagaggaacatgagcaacatctctgtctggtgctcgagaaattaaaggagaaccagttatatgccaagttcagtaagtgtgacttctggttatcagaggtcaaatttctcggtcacgtcattactgctcaaggtgtggtagtggatccatcgaatatggagtcagttacaaagtggaccccaccaaagacagtttctcagattcggagtttccttggacttgtgggctattaccgtcggttcattgaaaatttctccaagattgccagacccatgacacagttgctaaagaaagatgaaaaattaaagtggtcagctaagtgcaaccaaagttttgaagaacttaagaagagcaattatcctactcatgatcttgagttggcagcagtggttcatgctctgaaaatctggcggcactatcttattggaaaccgctgcgaagtctacactgaccacaagagtctgaagtacatcttcactcagcccgatctgaacctacgtcagcgaagatggctggagttgataaaagattatgacatggggatacattatcatccaggcaaagcaaatgtggtggcagacgctctgagcagaaagagctattgcaatgcagtatgtaccgaaggcatgtgtgacaaattgcagcaagatcttgagcacctaaatttgggcatcgtggaacacgggtacgtagctgccctagaggcacggcctacgctcgtggatcaagtcagagcagctcaggtaaatgatcctgaaataactgagttgaagaagaatatgagggttggaaaagcccgggatttccacgaggatgagcatggcacaatctggttgggagaaagattgtgtgtacctgacgacaaagaatttaaggatctgatactcacagaagttcatcaaactcagtattcaattcatcccggcagcaccaaaatgtaccaagacttcaaagaaaagttctggtgggtcagcatgagaagggagatagccgaattcgtcgcactctgcgatgtttgtcagactaacgtgccatctctgggaggtaacacgctagctccagctggggacgagcgcctagaagccctcgtcctgacgggatggggcgaggcgtgcgtcagattgcctgtcgccacctaa

SEQ ID NO: 14379 - DNA, 2250 bp, Oryza sativa
  Clone ID: TFbOSC5418j.C1.o1.fg
atgtgggcacttcgtggttgtactggacgatggaatcccaagaagttggaggatatacctatagtacaagagtatcctgaggtgttcccagaagacctcactacaatgccaccgaagagagaaatcgagttccagattgatctggcacccggaactgctccaatctacaagaggccgtacagaatggcagctaatgagctagcaaaagtcaaaaagcaggttgacgaacagctgcagaaagggtacatccgaccgagtacttcaccttggggtgctccggttatctttgtggaaaagaaagacaagaccaagaggatgtgcgttgattatcgcgcccttaatgaggtcacaatcaagaacaaatatccgttgccaagaattgatgatctgtttgatcagcttaaaggagctaagatggtgaagacagggaatgatccccgtgcctccaatgacgctaggggcagcgaagagcagaccgatggagctcatatcagtggtgcatctgacagcagttcatctccaccgcccgagaacccaacggccaacgactggctccgtgcgattgagaagaagctgaaccttctgcaatgcaatgaccaagagaaggttgcttttgctacacatcagttgcaaggtcccgcttctgcttggtgggataactacgtggtgacccgtccagattcaacggaggttacttgggcagagttttgtcaaagcttcaggaaggcacaaattcctgaggggattatggcacaaaagaaaagagagttccgcgcactgcatcaagaaaccaggatagttacagagtacttgcatgagttcaaccgccttgcgcgctacgctcctaaggatgtgcgcaccgatgccgagaagcaggagaagtttttgtttggtctcgatgataaattgaccaaccagctgatctccggagtctatgatgactttgagaagctcgtggacaaggctatccgtcaggaagagcaacgcaacaaaatggaccgaaatagaaagctaggtgagccttccaccctgatcatccgtcagcaccatccttaccacccgagtaacttcaacaacgactacaacggtggcagtcacaacaacatcagatccgccagctatgtcagctcagtcagacagctcaagaaggagtctgcaggaaagccaagaccctgcttcaactgtggcaagcacggccactttgctggcaagtgtccgaagctaaagcgcgttggacctaggttcgtccaggcccgcgtcaatcatgcgtctgcagagaaagcacaggcatcaccagaggtcgtgctgggcacgtttccggtgaactcatatccagcaacagttctctttgattctggtgcctcgcattcttttatatccaagagatttgctggggcacatggattatcggtagtggaacttaaaatactgatgcaggttcatacccctggaaatgacatgaggacagcacactactgcccctcagtgactatagagatcaagaggtcacggtttctatccaacctcatccttctcgaatccaaagacctagatgtcattctcggaatggattggttgaccagacacaagggagtgatcgactgcgcaagtcgcactatcaccctaagcaacgacaaaggggagaagatcaccttccgttctccagtgtcacagaagtccgtagcgagtctgaatcaggctgttattgaggatcagacagaaatagcggaaaaaaatcccaagaagttggaggatatacctatagtacaagagtatcctgaggtgttcccagaaggcctcactacaatgccaccgaagagagaaatcgagttccagattgatctggcacccggaactgctccaatctacaagaggccgtacagaatggcagctaatgagctagcagaagtcaaaaagcaggttgacgaacagctgcagaaagggtacatccgaccgagtacttcaccttggggtgctccggttatctttgtggaaaagaaagacaagaccaagaggatgtgcgttgattatcgcgcccttaatgaggtcacaatcaagaacaaatatccgttgccaagaattgatgatctgtttgatcagctaaaaggagctaaggtgttttccaatatagacctgcgatcaggctatcatcagttgagaattcgggaagaggatattcccaagacagccttcgccactcggtcttgctctcttttcccccacaccagagttgaagtccttctcagttga

SEQ ID NO: 14380 - DNA, 2304 bp, Oryza sativa
  Clone ID: TFbOSC5447j.C1.o2.fg
atgtgggcacttcgtggttgtactggacgatggaatcccaagaagttggaggatatacctatagtacaagagtatcctgaggtgttcccagaagacctcactacaatgccaccgaagagagaaatcgagttccagattgatctggcacccggaactgctccaatctacaagaggccgtacagaatggcagctaatgagctagcaaaagtcaaaaagcaggttgacgaacagctgcagaaagggtacatccgaccgagtacttcaccttggggtgctccggttatctttgtggaaaagaaagacaagaccaagaggatgtgcgttgattatcgcgcccttaatgaggtcacaatcaagaacaaatatccgttgccaagaattgatgatctgtttgatcagctaaaaggagctaagatggtgaagacagggaatgatccccgtgcctccaatgacgctaggggcagcgaagagcagaccgatggagctcatatcagtggtgcatctgacagcagttcatctccaccgcccgagaacccaacggccaacgactggctccgtgcgattgagaagaagctgaaccttctgcaatgcaatgaccaagagaaggttgcttttgctacacatcagttgcaaggtcccgcttctgcttggtgggataactacgtggtgacccgtccagattcaacggaggttacttgggcagagttttgtcaaagcttcaggaaggcacaaattcctgaggggattatggcacaaaagaaaagagagttccgcgcactgcatcaagaaaccaggatagttacagagtacttgcatgagttcaaccgccttgcgcgctacgctcctaaggatgtgcgcaccgatgccgagaagcaggagaagtttttgtttggtctcgatgataaattgaccaaccagctgatctccggagtctatgatgactttgagaagctcgtggacaaggctatccgtcaggaagagcaacgcaacaaaatggaccgaaatagaaagctaggtgagccttccaccctgatcatccgtcagcaccatccttaccacccgagtaacttcaacaacgactacaacggtggcagtcacaacaacagtaagcagcataaccacaactcgacttcacccccattaatggcaccagctcagtcagatccgccagctatgtcagctcagtcagaacagctcaagaaggagtctgcaggaaagccaagaccctgcttcaactgtggcaagcacggccactttgctggcaagtgtccgaagctaaagcgcgttggacctaggttcgtccaggcccgcgtcaatcatgcgtctgcagagaaagcacaggcatcaccagaggtcgtgctgggcacgtttccggtgaactcatatccagcaacagttctctttgattctggtgcctcgcattcttttatatccaagagatttgctggggcacatggattatcggtagtggaacttaaaatactgatgcaggttcatacccctggaaatgacatgaggacagcacactactgcccctcagtgactatagagatcaagaggtcacggtttctatccaacctcatccttctcgaatccaaagacctagatgtcattctcggaatggattggttgaccagacacaagggagtgatcgactgcgcaagtcgcactatcaccctaagcaacgacaaaggggagaagatcaccttccgttctccagtgtcacagaagtccgtagcgagtctgaatcaggctgttattgaggatcagacagaaatagcggaaaaaaatcccaagaagttggaggatatacctatagtacaagagtatcctgaggtgttcccagaaggcctcactacaatgccaccgaagagagaaatcgagttccagattgatctggcacccggaactgctccaatctacaagaggccgtacagaatggcagctaatgagctagcagaagtcaaaaagcaggttgacgaacagctgcagaaagggtacatccgaccgagtacttcaccttggggtgctccggttatctttgtggaaaagaaagacaagaccaagaggatgtgcgttgattatcgcgcccttaatgaggtcacaatcaagaacaaatatccgttgccaagaattgatgatctgtttgatcagctaaaaggagctaaggtgttttccaatatagacctgcgatcaggctatcatcagttgagaattcgggaagaggatattcccaagacagccttcgccactcggtcttgctctcttttcccccacaccagagttgaagtccttctcagttga

SEQ ID NO: 14381 - DNA, 1008 bp, Oryza sativa
  Clone ID: TFbOSC900148j.C1.o3.fg
atggcagcttctcaaccgagtgttcatggtgaaaatcatgatgagcccgacagccctatcacacgggctgaggtgcagcaaatagggaataatcttcttcaagcgatggaacatttgctaaatgcacgccttccggctgctggaggtggagcggttcagccaccgtttggtgatcccaaggatgatattgtggatgcacaatcggcggatgttgctgattcagaactccatggcccgcctaatggtggaggtcgtggttttgtagctgctggagcacgaggaggagagaatgatttggagcagcagcatgcccgtccttgccgaggtgctgtccttggtaatggagaacatcatcgtggtcaccatgatcgtgatgactcggataatgttgctcggatgtttccatacaacactttgcaagatcttcttgaccaagctcagtgcacggaaagatccattcagcaagaatggcgtaattggttctctagtggccgctccaatgcagctccatggcgtcgcacacagcaagccaccacttttgttggcaatcattctcagggagcctctacacgagcctctccacctgctgctacagccaagccgcaaccatcttcggcatcatctccagctgcatgcacagagtctcgtcggcctactgctcccacaccaacatcttcatcgcgtagccgcgatattgtgtgtcacaaatgtcaaggtcatggccacattgctgctgagtgtcctagtaggaggaccatgcttgtaactgagacgggtgaatgggaatctgcaagtgagaccaaggatgatagtttacgtgaagacgagatggttaacaagcaagcggatagtgatgctattcaagtagataatggagacaataattgcttcatctctcgtcgagtgcttagtgtgcaagttgcaaaggaagacaatggtcagcgacacaatatttttcacactcgagctgcaacaacattgctagtttggagttggtggaaagattag

SEQ ID NO: 14382 - DNA, 4377 bp, Oryza sativa
  Clone ID: TFbOSC400150j.C1.o3.fg
atgccgaagatggtggtggaggtggccgaccggtacacggcgaggagggacgggcggccgaacaactccggcgaggcggacggagaggttcgcggcgacgttccggcgaaaccgagggcaggccggggtggagggcgatgcggcgtcgccgagggaggagacggcgacgtcggccgacgctctggcgcggcgaccggggcagccggaggagatgtcgacgaggaggaaggtgaggccggcgcgggcgacggcgttccggcgaaattcgggcgaggaggaggtgatgccggggaagaaggcgatgccgcggtgtcgaaggaggagacggcggcgtcgatcggcgcaccggcgatgaacagcagccggctggagggagtacagtggcaccaatgccactggttgccggcgggggcaccgttccggcgagtttccggcgaggagacgatgccgccccattcaccgagaaatttgatcaaggtgttaggattcgtcagggagctgaggttgatggcttttgaggtaggctatgaagttgctcctgagtatcgccggatttcccatgaccccaacgaggagaagtgtcgtgttcgtgtgacgttggctagtgatcgtgaagaccttccgtccattaagttcgaagctggaggaagatcgtacagccatgcttgtcaagaagcagctttggtggccattggagagttgcgtcaacgttttgaagaagagttggattcatcagctttctatgctatggatgcagtaagtgtggagcgagacaaagcagctcatgacagggaaaactggaatcgaggcaagatttgcaagttggagagcaagttagcttcgaagattcgcgtgatgggtgaagttgtgcccgatcgtgctgaacctgtcatcgacatcatggtgaacacgcgcaccggaagtggaagtggagctgctaacaatggaggagatcccacgctagctcagattctggcccaacaaacacaactgatcaatctgttagtgcagcaggcacagaatcagcaggcaaacaatcagaaccagaatccacccccacctccccaaaacaagctggcagatttcttacgtgtgagaccccctaccttttcaagcaccaccaatccagtagaagcaggagattggctgcatgcggtggagaagaagttggatttgatccagtgtactgagcaggagaaagtttcttttgcttcgcatcaattgcatggtcctgctgctgaatggtgggatcattttcgccaaggcagggctgaaggagagcctattacttggcaggaattcacggccgctttcaagaagacacacataccaacgggtgttgtagctctaaagaagagagaatttagagcactcaaccagggatctcgttcggtcaccgagtacctccacgatttcaaccgtttagctcgttatgctccggaagatattcgcaccgatgaagagcgtcaggagaagttcttagagggactaaatgatgagttgtcttatgccttgatgtctacggatttccgggatttccagcagctggtggacaaggcgattcgtcaggaagacaagtataaccggatggagcagaagaagcgcagggctgcccaattcaaggcacaacagggcagtaaccagaggccgcgtctcgttacgggacctcaagctccatcgtaccctcaaggaggatcttcatcagttgtccgcccccaacgccagttctacgacaacaatactggtaatcgtggcaatgacaaccgcaacatggttgctcgtcctgcagcaactccagctcagaaccagcccgtcaggaaggaacagggaagcaagccaggggtgtgcttcaattatggtgatccaggacattatgctgataagtgtcctaagcctcggcgcgtgaagaacgctccagccccgaacaactccaatgctccagcaccgaaggcacgtgttaatcatgttgcagcagcagaagctcagaatgcaccagatgtggttttggaaatagaagaagttcctttcccatcctcgcttatcttgctagaatccaaagatctagatgttatcttagggatggactggttatctcgtcacagaggagttatagattgtgctaaccgtaaggtgactttaaccagtagcaatggggaaaccgtttctttctttgtgtcctctcctaaatatcatggtgtgtttttaaaccaagttgctctacaagagatccccatagtacaagactacccagacgtgtttcccgaggatttgctaggtatgccacctaagagagacatagagtttcggatagacttggtacctggaaccaaccctatccataagagaccatacagaatggcagctaatgagttagctgaggtgaagagacaggtggatgatttgcttcagaaaggatacatcagacccagtacctcgccatggggagcaccagtcatctttgtggagaagaaagatcatactcagagaatgtgcgtggattatcgagcgttgaatgaggttactatcaagaataagtaccctctacccagaattgatgacctgtttgatcaactggaaggtgctacagttttctccaagatagatctccgttctggatatcatcaacttcgaatccgtgaggaagatataccaaagaccgccttcacaactcggtatggtttgttcgaatgtaccgttatgtcatttggactcactaatgccccagcctttttcatgaatctgatgaacaaggtgtttatggaatatctagataagtttgtcgtggtgtttattgatgacattcttatttactccaagacgaaagaagaacatgaagagcatcttcgtctagctttagagaaactacgtgagcatcagctttatgccaagttcagtaaatgtgaattttggttgtccgaagtgaagtttcttggtcatgtcatctcatctggaggagtggcagtagatccaagcaatgtggagtcagtgttaagttggaagcaacccaagacggttcaaaaatttcgtagtttcttggacttggcgggaagtgaagtccaagtggacagagattgtgaacaaagtttccaagaactgaagaaaaggctagtgactgcgccggtgttatttttgcctgattcgaggaaaagtttccaagtgtattgtgatgcatcccgactcggtttgggttgtgtgttgatgcaagaaggaaaggtggttgcctatgcatctaggcaattacgtcctcatgagaataactacccaacgcatgacctagagttggcagctgtggtgcatgcattgaagatttggcgtcattatcttttcggtaaccgtacagagatgtatacggatcataaaagtttgaagtacattttcactcaacctgatttgaacatgcgtcagcgaagatggttagagttgattaaagattatgatatggaaatccactatcacccagggaaagcaaatgttgtagccgatgctcttagcaggaaaagctactgtaatatgtcagaaggtcgacatttaccttgggagttatgccaagaatttgagaagttaaacttggatatagtcagcaaaggttttgtggctactttagaagctcaacctactctgtttgatcaagttagagaagctcaagtgaatgatcctgatatccaagaaataaaaaagaacatgagaagaggaaaagccatcggttatgtagtagatgagcaaggaactgtgtggttaggagaaagaatttgcgtcccagataataaggagttgaaggatactatcatgaaagaagctcatgaaactttgtattccattcaccctggaagcactaagatgtaccaagacctaaagcaacaattctggtgggccagtatgcgacgtgagatagcagaatatgtggctctatgtgatgtatgtcagcgggtcaaggcagaacatcagaagccagccggtctgttacaaccgttgaagattccagagtggaagtgggaagaaataggaatggattttataaccggtctacccagaacgtcggcaggacatgattctatttgggtagtagttgataggttgacaaaagtcgctcacttcataccggtcaaaacaacctacacggggaataagcttgcagagttatacatggccagagtggtatgtttgcatggcgttcctaagaagatagtgtcagatagaggtagccagtttacttcgaagttttggcagaaattacaagtagagatgggtacccgtttgaatttcagtaccgcttatcaccctcaaacagattgtcacgcccggaaattcactagtaatttccgaacttatttgtgcataaaatcctcgtctaggaatcagccgaggtacacaaactga

SEQ ID NO: 14383 - DNA, 462 bp, Oryza sativa
  Clone ID: TFbOSC405457j.C1.o1.gm
agcaagggaggggaacttcagggcgtgacaaatcgcatggagcggaagaaacgccggattgctcacttcaaggcacaacaggggaatagtcagaggccgcgtcttactttaggaccccagtccatgccacagggaggttcttcgtctgttgttcgtccgcagcgtcagttcttcaacaacaacgcgggcaacaacatccgcaatcaagctccacgccctgttgcagcttcgacacagcaacaacctgccaagaaggagcaaggcatcaagcccggggtgtgcttcaactatggagacccaggacattacgctgacaagtgtccgaagccccgacgcgtgaagattgtccctgcccagagcaactctaccgcaccagcatcaaaggcccgtgtcaatcatgttgctgctgcagaagctcaaggaatgattaatggcaacctctgggagacctggaacgcataa

SEQ ID NO: 14384 - DNA, 5604 bp, Oryza sativa
  Clone ID: TFbOSC102121j.C1.o13.fg
atggcgacgacgggaacggcgaccggagcggagagaggcggcggcacggctcgggtcgacggggacggcggcgttccggcggtcggcgaccgaaacggagaggtggacgaggtcggcgaggatgcggcgaagctgaaggaggcggtgccgaagcgggagatggtccggggcaacgacggcggcgaaccggagctcggcggcgacggcggagagagaggacgacgacgcgagctcgattccgacggggaaagagagcggcgagtggcggaaacggtggagagaggcacggggagtgtttatatagagccgggggcgagagagggtggccggggaagggaggaaaccggcgcgggagagaatgatttttatttcgggatgaatttatcaggacgtgacacacatggagtggactaccagggcaagccggtcccagagcaggagggtgacgatgcagagcccgtcgctgcttgggaggtcactgcagtgatcctctctggctcacctgagaggacttcgctggcagtcaccgcgggtggagattccttctccgccgcttgccagaacgccgctctcctcgccatcggcactctgcaccagcgctacccggacgagttgcagcactcgccctaccgctaccaccctcgccgcggaggagcccgcgactacgccaccttccgggatgctagctcggaggatgacgctaccatcatgcacctggcgcgcatggtggaggcgtacgacgcggcccgtatcgacttccaccagatggtgcgccgcgggatggtcgataacaacatgaagatcctggagctgcgtcaggagaatctgcagctgaagaaggatctggacgtgctggaggcgcagctctgtcagctcaaggtcgcccagggagaggtctgtcgtcccaagcgccgccgcgtctgccgcagccagaagatcaccgctcgcaagagtacctccaggcccgagcttgtttgtcagtccctggcgtggacctgcttcgtggagacccctcgtgccgagcccgcgcccgtggttcctcaggagggggaagcctccggcgtagggagcacggaggatgcgctgctgctcaccttccgtcctggcccgtcgcagcgagtcgtatggggcatggttatgccgatggtgacgaccaggagaagtgctaataccggtgatggccaccaacccgaaggcagcaacctcaacaaccatggcagcccacctccacctcctcctccgcctccaccaccaccaccagacaccaacgccatcctcacccaaatcctcgcccagcaagccaacatgatggctgctttcctccaccacatccaaaatccaccacagcataatgctccacctccaccaccacccccgcaacactctaagctcgccgagttccttcgcattcgcccgcctaccttctccagctccaataaccccgtggatgccttggattggttgcatgcagtggggaagaagttagacactgtgcagtgcaacgatgaggagaaagctacgcagcccgaggggcagcctatcacctgggcccgtttcaccgccgctttccggagaacccatgtgcctgccggagtcatggcccttaagaaaagggcattccgggagttgaagcaaggcaaccgctctgtgatggagtatttgcatgagtttaacaacctggcccggtacgccccggaggacgttcgggaagatgaggaaaagcaagagaagttcttggcgggaatggaccctgagctgtccgtacgtctgatctccggggattatccggatttccaacgtctggtggacaagagcatccgcttggaagccaagcacaaagaattggagtcgcacaagcgtcgcttggcgaatttccgcaaccaacagggggctaaccaaagggtccgctacaccaatccctatccagggggatcctcctcgcagcagcaacagcagcaacctccctccgcgccccgacctcaatttgtggtgcgcgtcccacagccgcagcaaccgcagggtcagcaagggacccgtgcaccccgtccccctgcgccagctgtgcagcctggtcaaggccacagagacgttcaaggtcagcagagtctgtgcttcaactgcttcgagcctgggcactttgcggataaatgcccaaagccgaggcgccagcaaggccaagcgccgccccgctccaacaacggtggtaaggacgtcattcggggtcgtgtgaaccacgtgactgccgaggatgtgctgacaactccagacgtcatcgttggtacgttcctcatccattccacccctgctaccattttgttcgactctggagcttcccactcgtttatatctgtgccattcgtggggagaaatcagttgggggtagaaaggcttaggaaccctatgctcatcaccacccctggaggggttatgacagcgaagtactatagccctgccgttcccatagaaattcagggaattccgtttccctcggatctgattcttctagacaccaagaacttggatgtgatccttgggatgaattggttggctcaattccaaggagtagtggattgtgcaagacgcactgtcactctgcaccgagggccggaacaaccggttgttttatttgcacccccaacctctgtcagtagttcagaacttcatcagataggactgttagaaatccccatcgtcagagagttcggagacgtgtttccggaagaactacccggtatgccgcccaagcgagagattgagttccggatagatcttgctccaggaacaactcctttgtacaaacggccctaccgtatggcagcaaatgaactggccgaaattaagaaacagttggaagagttgaaagaaaaggggtatatacgtccgagcacttccccctggggtgctcccgtaatttttgtggagaagaaagacaagacaaagaggatgtgtgtcgactacagagctctcaatgaagttactatcaaaaataagtaccctcttccccgaatcgatgatctgttcgatcagcttaaaggtgccacggtattctccaagattgatcttcgttccggatatcaccagttgcgcatccgtgaagaagatatcccgaagactgcattcaccacgcgatatggactgtatgaattcacggtgatgtcgttcggtctgactaatgctcctgctttcttcatgaacttgatgaacaaagtgttcatggaatacttggataagtttgttgtggtcttcatcgacgacattctggtgtactcgcaatcagaggaagaccatcagcaacatctccgtctggtgttgggaaagttgcgggaacatcaattgtatgccaagcttagcaagtgtgagttctggttgtccgaagtcaaattcttagggcacgtgatatctgctaaaggagttgctgtggaccccgaaacagtgaccgccgtcaccgattggaagcaacccaagacagtcactcaaattcgcagtttcttaggtttggcaggatactaccggaggttcatcgagaacttctccaaaatcgctcgacccatgacacagttgttgaagaaagaagagaaatttgtgtggagcccgcaatgcgagaaggcgttcaaaacactcaaagaaaagctggtttcctcgccagtgttaatcttgccggatactcgcaaagacttcctggtgtattgtgacgcttcgcgccaaggattggggtgcgtgctcatgcaggaaggtcatgtggtggcctatgcctcacgccagctacggcctcatgaaggcaactaccctacccatgatttggagttagccgcggtggttcatgctctaaaaatctggcggcactatctcattgggaatcgctgcgaaatatataccgatcataagagtttgaaatacatcttcacccagtcggatctgaatcttcggcagaggagatggttagaactcatcaaggattatgatgtgggaatccactatcaccctggtaaggccaacgtggtcgcagacgcgctgagtcgaaaaagccgttgcaacactcttggcgtccgtggcattccactggagcttaatcaacagttggaagccctgaacctaagcatcgttagccatggattcttagctacactggaagccaagcctaccttactcgatcaaatccgcgaggctcagaagaatgatctagatatgcatgggatcctcaagaatatgaaacagggtaaagccgctggtttcacagaggatgaacacggaactctatggaatggaaaccgggtatgcgttccagacgtcagggaacttaaacagttgatacttcaggaagctcacgaaagtccttattccatccaccctggcagtacgaagatgtacctggacttgaaagagaaatactggtgggttagtatgaagcgggagattgcggagttcgtagccctttgtgatgtgtgccagcgtgtcaaggcagagcaccaacgaccggccggacttctccaacctctccaagtaccagaatggaaatgggatgaaattgggatggattttatcactggacttccaaaaacccaaggtggatatgattctatatgggtagttgtggaccgactaaccaaagtagctcggtttattcctgtgaagaccacctatggagggaacaaactagctgaactctatttcgctaggatcgtaagtctgcatggcgtccccaagaaaatcgtatctgatcggggaagtcagttcatctctcacttttggaagaagctccaagaagagttgggtacccgattaaatttcagcaccgcgtatcacccgcagacagatggtcaaaccgagcgtctaaaccagatcctcgaggatatgcttcgcgcatgtgtcctagatttcgggaaaacatgggataatagtctcccctatgccgagttctcctacaataacagctaccaagccagcatacaaatggcaccctatgaagcgttgtatggacgcaaatgtcggacaccgctattgtgggaccaagttggggaaagccaagtgttcgggaccgatatcctgagagaagccgaagctaaggtcagaaccatttgggaaaacctaaaggtggcacagtctcggcagaagagttatgcagacaaccgacgccgtgacctggaattcgcagtggatgactttgtgtatctccgggtaacgccattgcgaggggtacacaggtttcagacgaaagggaagctcgcacctcggttcgtgggtcctttccgcatcactgctcgacgcggagaagtagcgtaccaattggagttgcctgcttccttgggcaacgtgcatgatgtgttccatgtgtcgcaactcaagaaatgtcttcgagtgccgtccgagcaggctgactcagagcagattgaagttcgcgaagacttgacctacgtggagagaccagtgaaaatcctagacaccatggagcgcaggaccaggaatcgggtaatccgtttttgcaaggtccaatggagcaaccatgccgaggaagaagctacttgggagcgtgaagacgagctgaaggcagcccatcccgatctcttcgccagttcttccgaatctcggggtcgagattccgtttaa

SEQ ID NO: 14385 - DNA, 5577 bp, Oryza sativa
  Clone ID: TFbOSC19731j.C1.o2.np
cggccgggccccacctggcagccgcggggcgcgcccgaaggcggcctcgccggcacggccgacgggaggcggcgcgcccgcgcccctatggtcgccggcggcggccataggcacggcggagcggcggccgagagaggggagggaagggggaaacgaaatgggcggtccatggctcaccccggatcgatggcgacgacgggaacggcgaccggagcggagagaggcggcggcgcggctcgggtcgacggggacggcggcgttccggcggtcggcgaccgaaacggagaggtggacgaggtcggcgaggatgcggcgaagccgaaggaggcggtgccgaagcgggagatggtccggggcaacgacggcggcgaaccggagctcggcggcgacggcggagagagaggacgacggcgcgagctcgattccgacggggaaagagagcggcgagtggcggaaacggtggagagaggcacggggagtgtttatatagagccgggggcgagagggatgaatttatcaggacgtgacacacatggagtggactaccagggcaagccggtcccagagcaggagggtgacgatgcagagcccgtcgctgcttgggaggtcactgcagtgatcctctctggctcacctgagaggacttcgctggcagtcaccgcgggtggagattccttctccgccgcttgccagaacgccgctctcctcgccatcggcactctgcaccagcgctacccggacgagttgcagcactcgccctaccgctaccaccctcgccgcggaggagcccgcgactacgccaccttccgggatgctagctcggaggatgacgctaccatcatgcacctggcgcgcatggtggaggcgtacgacgcggcccgtatcgacttccaccagatggtgcgccgcgggatggtcgataacaacatgaagatcctggagctgcgtcaggagaatctgcagctgaagaaggatctggacgtgctggaggcgcagctctgtcagctcaaggtcgcccagggagaggtctgtcgtcccaagcgccgccgcgtctgccgcagccagaagatcaccgctcgcaagagtacctccaggcccgagcttgtttgtcagtccctggcgtggacctgcttcgtggagacccctcgtgccgagcccgcgcccgtggttcctcaggagggggaagcctccggcgtagggagcacggaggatgcgctgctgctcaccttccgtcctggcccgtcgcagcggagaagtgctaataccggtgatggccaccaacccgaaggcagcaacctcaacaaccatggcagcccacctccacctcctcctccgcctccaccaccaccaccagacaccaacgccatcctcacccaaatcctcgcccagcaagccaacatgatggctgctttcctccaccacatccaaaatccaccacagcataatgctccacctccaccaccacccccgcaacactctaagctcgccgagttccttcgcattcgcccgcctaccttctccagctccaataaccccgtggatgccttggattggttgcatgcagtggggaagaagttagacactgtgcagtgcaacgatgaggagaaagtcatctttgccacccaccagctgcaggggcccgcatctctatggtgggaccacttctaggctacgcagcccgaggggcagcctatcacctgggcccgtttcaccgccgctttccggagaacccatgtgcctgccggagtcatggcccttaagaaaagggcattccgggagttgaagcaaggcaaccgctctgtgatggagtatttgcatgagtttaacaacctggcccggtacgccccggaggacgttcgggaagatgaggaaaagcaagagaagttcttggcgggaatggaccctgagctgtccgtacgtctgatctccggggattatccggatttccaacgtctggtggacaagagcatccgcttggaagccaagcacaaagaattggagtcgcacaagcgtcgcttggcgaatttccgcaaccaacagggggctaaccaaagggtccgctacaccaatccctatccagggggatcctcctcgcagcagcaacagcagcaacctccctccgcgccccgacctcaatttgtggtgcgcgtcccacagccgcagcaaccgcagggtcagcaagggacccgtgcaccccgtccccctgcgccagctgtgcagcctggtcaaggccacagagacgttcaaggtcagcagagtctgtgcttcaactgcttcgagcctgggcactttgcggataaatgcccaaagccgaggcgccagcaaggccaagcgccgccccgctccaacaacggtggtaaggacgtcattcggggtcgtgtgaaccacgtgactgccgaggatgtgctgacaactccagacgtcatcgttggtacgttcctcatccattccacccctgctaccattttgttcgactctggagcttcccactcgtttatatctgtgccattcgtggggagaaatcagttgggggtagaaaggcttaggaaccctatgctcatcaccacccctggaggggttatgacagcgaagtactatagccctgccgttcccatagaaattcagggaattccgtttccctcggatctgattcttctagacaccaagaacttggatgtgatccttgggatgaattggttggctcaattccaaggagtagtggattgtgcaagacgcactgtcactctgcaccgagggccggaacaaccggttgttttatttgcacccccaacctctgtcagtagttcagaacttcatcagataggactgttagaaatccccatcgtcagagagttcggagacgtgtttccggaagaactacccggtatgccgcccaagcgagagattgagttccggatagatcttgctccaggaacaactcctttgtacaaacggccctaccgtatggcagcaaatgaactggccgaaattaagaaacagttggaagagttgaaagaaaaggggtatatacgtccgagcacttccccctggggtgctcccgtaatttttgtggagaagaaagacaagacaaagaggatgtgtgtcgactacagagctctcaatgaagttactatcaaaaataagtaccctcttccccgaatcgatgatctgttcgatcagcttaaaggtgccacggtattctccaagattgatcttcgttccggatatcaccagttgcgcatccgtgaagaagatatcccgaagactgcattcaccacgcgatatggactgtatgaattcacggtgatgtcgttcggtctgactaatgctcctgctttcttcatgaacttgatgaacaaagtgttcatggaatacttggataagtttgttgtggtcttcatcgacgacattctggtgtactcgcaatcagaggaagaccatcagcaacatctccgtctggtgttgggaaagttgcgggaacatcaattgtatgccaagcttagcaagtgtgagttctggttgtccgaagtcaaattcttagggcacgtgatatctgctaaaggagttgctgtggaccccgaaacagtgaccgccgtcaccgattggaagcaacccaagacagtcactcaaattcgcagtttcttaggtttggcaggatactaccggaggttcatcgagaacttctccaaaatcgctcgacccatgacacagttgttgaagaaagaagagaaatttgtgtggagcccgcaatgcgagaaggcgttcaaaacactcaaagaaaagctggtttcctcgccagtgttaatcttgccggatactcgcaaagacttcctggtgtattgtgacgcttcgcgccaaggattggggtgcgtgctcatgcaggaaggtcatgtggtggcctatgcctcacgccagctacggcctcatgaaggcaactaccctacccatgatttggagttagccgcggtggttcatgctctaaaaatctggcggcactatctcattgggaatcgctgcgaaatatataccgatcataagagtttgaaatacatcttcacccagtcggatctgaatcttcggcagaggagatggttagaactcatcaaggattatgatgtgggaatccactatcaccctggtaaggccaacgtggtcgcagacgcgctgagtcgaaaaagccgttgcaacactcttggcgtccgtggcattccactggagcttaatcaacagttggaagccctgaacctaagcatcgttagccatggattcttagctacactggaagccaagcctaccttactcgatcaaatccgcgaggctcagaagaatgatctagatatgcatgggatcctcaagaatatgaaacagggtaaagccgctggtttcacagaggatgaacacggaactctatggaatggaaaccggcgtgtcaaggcagagcaccaacgaccggccggacttctccaacctctccaagtaccagaatggaaatgggatgaaattgggatggattttatcactggacttccaaaaacccaaggtggatatgattctatatgggtagttgtggaccgactaaccaaagtagctcggtttattcctgtgaagaccacctatggagggaacaaactagctgaactctatttcgctaggatcgtaagtctgcatggcgtccccaagaaaatcgtatctgatcggggaagtcagttcatctctcacttttggaagaagctccaagaagagttgggtacccgattaaatttcagcaccgcgtatcacccgcagacagatggtcaaaccgagcgtctaaaccagatcctcgaggatatgcttcgcgcatgtgtcctagatttcgggaaaacatgggataatagtctcccctatgccgagttctcctacaataacagctaccaagccagcatacaaatggcaccctatgaagcgttgtatggacgcaaatgtcggacaccgctattgtgggaccaagttggggaaagccaagtgttcgggaccgatatcctgagagaagccgaagctaaggtcagaaccatttgggaaaacctaaaggtggcacagtctcggcagaagagttatgcagacaaccgacgccgtgacctggaattcgcagtggatgactttgtgtatctccgggtaacgccattgcgaggggtacacaggtttcagacgaaagggaagctcgcacctcggttcgtgggtcctttccgcatcactgctcgacgcggagaagtagcgtaccaattggagttgcctgcttccttgggcaacgtgcatgatgtgttccatgtgtcgcaactcaagaaatgtcttcgagtgccgtccgagcaggctgactcagagcagattgaagttcgcgaagacttgacctacgtggagagaccagtgaaaatcctagacaccatggagcgcaggaccaggaatcgggtaatccgtttttgcaaggtccaatggagcaaccatgccgaggaagaagctacttgggagcgtgaagacgagctgaaggcagcccatcccgatctcttcgccagttcttccgaatctcggggtcgagattccgtt

SEQ ID NO: 14386 - DNA, 2715 bp, Oryza sativa
  Clone ID: TFbOSC29055j.C1.o1.gm
atggcccttaagaaaagggcattccgggagttgaagcaaggcaaccgctctgtgatggagtatttgcatgagtttaacaacctggcccggtacgccccggaggacgttcgggaagatgaggaaaagcaagagaagttcttggcgggaatggaccctgagctgtccgtacgtctgatctccggggattatccggatttccaacgtctggtggacaagagcatccgcttggaagccaagcacaaagaattggagtcgcacaagcgtcgcttggcgaatttccgcaaccaacagggggctaaccaaagggtccgctacaccaatccctatccagggggatcctcctcgcagcagcaacagcagcaacctccctccgcgccccgacctcaatttgtggtgcgcgtcccacagccgcagcaaccgcagggtcagcaagggacccgtgcaccccgtccccctgcgccagctgtgcatcctggtcaaggccacagagacgttcaaggtcagcagagtctgtgcttcaactgcttcgagcctgggcactttgcggataaatgcccaaagccgaggcgccagcaaggccaagcgccgccccgctccaacaacggtggtaaggacgtcattcggggtcgtgtgaaccacgtgactgccgaggatgtgctgacaactccagacgtcatcgttggtacgttcctcatccattccacccctgctaccattttgttcgactctggagcttcccactcgtttatatctgtgccattcgtggggagaaatcagttgggggtagaaaggcttaggaaccctatgctcatcaccacccctggaggggttatgacagcgaagtactatagccctgccgttcccatagaaattcagggaattccgtttccctcggatctgattcttctagacaccaagaacttggatgtgatccttgggatgaattggttggctcaattccaaggagtagtggattgtgcaagacgcactgtcactctgcaccgagggccggaacaaccggttgttttatttgcacccccaacctctgtcagtagttcagaacttcatcagataggactgttagaaatccccatcgtcagagagttcggagacgtgtttccggaagaactacccggtatgccgcccaagcgagagattgagttccggatagatcttgctccaggaacaactcctttgtacaaacggccctaccgtatggcagcaaatgaactggccgaaattaagaaacagttggaagagttgaaagaaaaggggtatatacgtccgagcacttccccctggggtgctcccgtaatttttgtggagaagaaagacaagacaaagaggatgtgtgtcgactacagagctctcaatgaagttactatcaaaaataagtaccctcttccccgaatcgatgatctgttcgatcagcttaaaggtgccacggtattctccaagattgatcttcgttccggatatcaccagttgcgcatccgtgaagaagatatcccgaagactgcattcaccacgcgatatggactgtatgaattcacggtgatgtcgttcggtctgactaatgctcctgctttcttcatgaacttgatgaacaaagtgttcatggaatacttggataagtttgttgtggtcttcatcgacgacattctggtgtactcgcaatcagaggaagaccatcagcaacatctccgtctggtgttgggaaagttgcgggaacatcaattgtatgccaagcttagcaagtgtgagttctggttgtccgaagtcaaattcttagggcacgtgatatctgctaaaggagttgctgtggaccccgaaacagtgaccgccgtccccgattggaagcaacccaagacagtcactcaaattcgcagtttcttaggtttggcaggatactaccggaggttcatcgagaacttctccaaaatcgctcgacccatgacacagttgttgaagaaagaagagaaatttgtgtggagcccgcaatgcgagaaggcgttcaaaacactcaaagaaaagctggaaggtcatgtggtggcctatgcctcacgccagctacggcctcatgaaggcaactaccctacccatgatttggagttagccgcggtggttcatgctctaaaaatctggcggcactatctcattgggaatcgctgcgaaatatataccgatcataagagtttgaaatacatcttcacccagtcggatctgaatcttcggcagaggagatggttagaactcatcaaggattatgatgtgggaatccactatcaccctggtaaggccaacgtggtcgcagacgcgctgagtcgaaaaagccgttgcaacactcttggcgtccgtggcattccactggagcttaatcaacagttggaagccctgaacctaagcatcgttagccatggattcttagctacactggaagccaagcctaccttactcgatcaaatccgcgaggctcagaagaatgatctagatatgcatgggatcctcaagaatatgaaacagggtaaagccgctggtttcacagaggatgaacacggaactctatggaatggaaaccggccctttgtgatgtgtgccagcgtgtcaaggcagagcaccaacgaccggccggacttctccaacctctccaagtaccagaatggaaatgggatgaaattgggatggattttatcactggacttccaaaaacccaag

SEQ ID NO: 14387 - DNA, 1386 bp, Oryza sativa
  Clone ID: TFbOSC400193j.C1.o3.fg
atggcacgtcgctccacccgtcagatccgtgcccctaaccgctttggttttgaggaagagccagtccagccagaaattcccgatcaaccagttaaccaggcagatgagcaagaagctgagagtgatcatatggctgtttccggatcagttaatgatgtctcaagaggtaaccgacccccgccagtggactttcaccaacacatggccatgcaaacacatataatacaaggaatggttcagaatataattgctatgcaacaacaacacacacaagagcgtcaaccccatatggttcaagatgatggccaatcgaaactgaatgatttcttgggatctcgtccaccggagttctcccaaacaaatgagcctattgaagctgatgattggattaaagatatggaaaggaaattaaatctggtacagtgtactccgcaagagaaaaccctttacgccgcacatcagttaagaggacctgccgcagattggtgggataactactgtgctacccatacagatgctagtaccatcgtctggacagagtttgcaggagcctttcgctcagcacacatccctgaaagcataattgatttgaagaaggaagaatttgcaaatatcaagcaaggatcctcttgcatcaacgagtatttgagtcgcttcaatagattggcccgatatgccccagaagatgtagacactgataaaaagaagatcagaaaatttttaaaaggaatggacgcgaaactgcaagtgaaacttttggctcacgactttccgacgtttcagcaaatggtcgataagtccttgttactagaagatgcagaagaagagatgcaggaatacaagagacgcaaagtaatgtccctagagattcaagcaaaagaaggtttgtgtcgaaaaacaaacttgccagcacaatactatcagagagcatctcagcattcaaatggttccggttctacgtctcgttcgactatgtcagaacctggtcagcaagccacaatgatcaacagtaatagccatgaaggaagcaactccgtaccatgccctacaccttcaaaaagacgtggttataaggcaggagtcgaatgtttcatctgccatgagatgggacactattcgtgggattgccctcagaaagccaagataaagtgccttcacaaagtcaagacaaagccagtccaaccaacgacaattcttcccaacatacctggatcaaaaggctcgaagtcaccaaacagtggttctgcctcattgacctcactgcccgttggacaaggtcgtctgaaccatgtgcaagtagaaacaaatgaaaaggttgtgaatctcgagcaagttgaaggagcaggagaagaacaggttccacaggcaagagcaaagccacagtaa

SEQ ID NO: 14388 - DNA, 1134 bp, Oryza sativa
  Clone ID: TFbOSC400601j.C1.o74.fg
atgccgcttagttcacagctaccattggttggaagtcaagaccaaaatcagtatgtgtttgatcgagcatttgccacccaggtcgataagcttccaatgccagaagaggatgtccccttttgtcacgattgtagagaacgaggacactgtgccctgaattgtccatgggtatatgccaaagaagccccttcctttggtttagcagggcagacatcgctaaaccagcctcctcacaccaagtcaagcttgcagcctagtgtgcaaagtagagagcccaatggagagaatccatggaatcccgggaaatgctttcctcctagcctttcgtaccacgtggggtcacgtactaagcaagccaaacgcaagaagagtaagaatcagaagagaaaagcgccgatgcgaactgaagaagaagtatgtaagatgactattaccagcaccgaatggcctccagcagggataactattcctagacgtcaaagaggaaataccttccgaggtgcacgacagttgacccagcacctcctaagccatggtggcagagtgtctgatagtgaagggtcagatcaagtctcctcggatgatgaagatgagtctccccgacatctcggcgaggaagagatggaatcaaaggcatgcacccgttgtggagaaattggacacattgctagcatgtgtctcacactctgctcttattgtgaagaagaccatccaccaggggagtgtcccacccgcaaggtgacatgttttctgtgcgaaggaacaaaccatgtgcccaaggattgccaactcagtgtgttgttgaccaagaccgcagaaatccaacgaacaaccctacgattgtctcatcagctagtcagctccaacagcaacatcgacgatatcatccacagcaccaatgctcctcccgctgcacctgactctgcaataaatcatagtaataataccttcagcaccaaccattctctgcaccgacagcctcagcaaagatttgtcatcgatagaagaagttgtgtctctccccgacctactccaggccgagcaaagggcaatcaacctcaggaggacgataccaagcagaagaccgttatccgcttcaaccagcaatcagaaggaagcttcccctgtgaatga

SEQ ID NO: 14389 - DNA, 1629 bp, Oryza sativa
  Clone ID: TFbOSC401916j.C1.o3.fg
atgaggtatccctgggtcggcttgggaaaggctttgtcgcgaacctctgacaccggccagtgtttggactggactctgggagtccgagaaaatgaaaaaggctctgggagccgattaatcaagtggaatggctctgggaagccgagaagtaatgatctgacccgggagaccgttggttccgctgctgctgttgttgttggtgttcgcctcgtccgtgtcgtcggttgtattctcgggctgtctgagttgcaacctaagttaagtcagatctcagccgctttgaagcagatggctcgtcgttctacccgtcagacccttgctcccaatcgctttggtgttgaagaagagctagttcagtcagaaattcccgatcaaccagttaaccagacagatgagcaagaagctgagagtgatcatatggctgcttccggatcagttaatgatgtctcaagaggtaaccgacccccaccagtggaccttcaccaactcatggccatgcagacccatatattacaaggagtgattcagaatataattgctatgcaacaacaacacactcaagagtgtcaaccccatatggttcaagataatggccgctcaaaattgaatgatttcttgagatctcgcccaccggagttctctcaaacaactgagcctattgaagctgacgattggatcaaagatgtggaaaggagattaaatctgttgagaggacctgccgcagattggtgggataactactgtgctacccatacagatgctagtaccatcgtctggacagagtttgcaggagcctttcgctcagcacacatccctgaaagcataattgatttgaagaaggaagaatttgcaaatatcaagcaaggatcctcttgcatcaacgagtatttgagtcgcttcaatagattggcccgatatgccccagaagatgtagacactgataaaaagaagatcagaagatttttaaaaggaatggatgcgaaactgcgagtgaaacttttggctcacgactttccgacgtttcagcaaatggtcgataagtccttgttactagaagatgcagaacaagagatgcaagaatacaagagacgcaaagtaatgtccctagagattcaagcaaaagaaggtttgtgtcgaaaaacaaactcgccagcacaatactatcagaaagcatctcagcattcaaatggttccggttctacgtctcgttcgactatgtcagaacctggtcagcaagccacaatgatcaatagtaatagccatgaaggaagcaactccgtaccatgccctacaccttcaaaaagacgtggtcataaggcaggagtcgaatgtttcatctgccatgagatgggacactattcgtgggattgccctcagaaagccaagataaagtgccttcacaaagtcaagacaaagccagttcaaccaacgacaatccttcccaacatacctggatcaaaaggttcgaagtcaccaaacagtggatctgtcctgctaacctcaccgcccgttggacaaggtcgtctgaaccatgtgcaagtagaaacaaatggaaaagttgtgaatctcgagcaagttgaaggagcaggagaagaacaggtttcacaggcaagagcagagccacagtaa

SEQ ID NO: 14390 - DNA, 4440 bp, Oryza sativa
  Clone ID: TFbOSC20908j.C1.o1.fg
atggcgacgcgattacgaccgaagatgacggcggcggcggcggctcggaagcggtccacggcggcggcggctgctcggatgcggtccgtggcggcggcggcggctcggatacggcccacggcggcggcggctgttcggatgcggtccatggcggcggtggcggcggctcggttgcggcccacggcggcggcggctgctcggatgcggtccgtggcggcggcggcggctcggatgcggcccacgacggcggcggctgctcggatgcggcccgtggcggcggcggctgctcggatgcggcccaaggtggcggcggcggctcgaatgcggcccgcggcggtggtggctgctctgatgctgcccacggctgcgctgttgctgtctctggcggcgatgactgcgctgttgtggcctacgtcagcatcggtggcccaaggtctgtggggcgcggtggagccggagggcgatgatctcgtcgactaccggcaggaccggcaggcgctcgccgcgatacttcgcgccgtgcccgccgagatgctcgccacgctcgctgtcaaggagacggcgcaggaggcgtgggaagcgatcaagactcgccgtatcggtgtgcagtgcgtgcgtgaggcgaatgcacagcagctgcgccgagaattcggtgatatcctcttcgaggacggtgaaaccgtcgacaacttctcgatgcggatcggcggcctcgccaacaaccttcgcaccttaggtgataatatcactgaagctgaggtcgttcagaaattgttgcaggttgtcccagaacatctccagcaaatagccatctcgattgagaccttgctcgacgtcaatgagctgtctctcgaggaggttactgggcgtctgcgctccgtcgagcaacgcaagcagcgcaagactgcggcggcatcgagtcgggtcgacgccaatggccgtctcctcttcaccgaggaagaatggctggcgaaattccgcaaggcggcctctctgcaagacgccgctcactcctccggcagcaacggcgaccgccggggtcgagggcatgggaagaaggacgatggagccccgaaggaggcccagcccaagccagccaacccgggaggccgtaacccgggaaattgcaagaattgcggcaagaggggacattgggccaaagactatcgcagcgagcccaaggcccagcaagcttacgtagcccaggaggaggacgaagagcctgctctgctcctggccaagctagacgacggtggcgaacatgatccggcgatgtggatcctggatactagcgcaaccaaccatatgaccgggtcccgctccgctttcgccgagctcgacacggcggtcaccggcactgttaggtttggcgacggctcggtggttcgcatcgagggccgcggcaccgtcctgttctcctgcaggttcggggaacaccgcggcatcgccggggtctactacatcccgcggctcacggcgaacatcgtcagccttggacagctggatcgttccggcagcaaggtactgattcatcacggtgtcctgcgcgtgtgggatcctcgagggcacctactcgtccgtctccgatgctccgacgactgcctctacaccatcaagctggacatcgaccgtccggtctgcctcgcggcaaggagcgccgagccggcgtggcggtggcacgccaggtacggccacctcaactttcctgctctccgcaagctcgtgcaacaggaaatggttcgtgggctgccgctgctgcaacaagtcactcaagtctgcgatggctgtttgctcgggaagcagcggcgagcggcgttcccgacgcaatccaagtaccgcgctgacgaacacctggagctcgtccacggcgatctctgtgggccgatcgaacctgcaacgccggctggtaatcggtattttttgttgcttgtcgatgacatgagccgctatatgtggctaaccttgatcaggagcaaggatgaggccgcgaacgccatgaagcattttcaggcccgtgcagaggtggagtccgggcgcaaactccgtgcactacgcacggatcgtggcggcgaattcacctcaatcgaatttggggaatactgcgccaatctcggagttggtcggcagttgacggcgccctactccccgcagcagaacggagtagtggagcgtcgaaaccaaaccatcgtcaccactgcccgcagcatgatgaaggcgaagggtgttcctgggcggttctggggagaggccatgtctacagcgacgccctatgaagcatggtatggccaacagcccgctgtgcatttcctgcgcactttcgggtgcgtggggcacgtcaagatcaccaagcccgggctgaagaaactcgatgaccggagtgcgccaatggtgctcctcggctacgagcaaggctcgaaggcctaccggctctatgatccagtcagcgagcgcgtccatgtgtccagggacgtggtgtttgatgaagacgccgcctgggactggggaccagtgacgcccgatggtgctccccagctcgagccgttcaccgtcgaacaggtggtgacgaccaccatcgggacggcacctgcttcttcgcttactccgccctcgccaccatcgccggctccgtcagcccccacgacgccggcacctccgtcgcctccgtcgccggaggcggttgagtttgtcacgccgcctacccaggattccatcctggacgccgacacagatgacgacgtcgtgcctcgctaccgcctggtggataacctgctggggaatgcctcaccgcccggacacgctccgcgggtgctggaacagctcgagctccatgttgtgagcgccgacgaacctgcttcactggctgaggctgaggcggatccaaactggcgtggcgccatgcaagacgagcttaacgcgatcgtcgacaacgacacttggtcgctcactgacctaccccatggccactgtgcaattgggctaaaatgggtctacaagctgaaacgtgatgaacagggggcgatcgtgcgctacaaggcgtgcctcgtcgctaagcgcagctccgagcatggtgtgtacacacgcaccaggggaggaagacgactgacggtgggcgtctacgtcgatgacctcatcatcaccggcgaacacgacgacgagatccgcagcttcaagggagagatgatgaagctcttcaagatgagtgatttgggggcactcagatactacctcggcatcgaggttacccaggatagtgatgggatcacgctggggcaagccgcatatgccggcaagattcttgagaaggcaggactcaacgactgcaatccctgtcagactcccatggaggtacgtttgaaattgagaaagggttcaaattttccacttgtggatgctacactgtatcgcagcttggttgggagtctgcgctatctcgtcaacacgcgacccgacctggcattctctgttgggtatgtcagtcgcttcatggagtcacccagggaagatcatctcgctgccgttcggcgcatactgcgctatgtggcaggcactcgctgctggggaattcgatttggcccaggtgcacggtgcgctttgccaatgctggttggttactctgacagtgatctggctggcgatccagatgagcgaaagagcacgtccggccagattttcttcatcaatggcgggcctgtcacttggcagtcctccaagcagaaggtggtggcattgtcctcctgtgaggccgagtacatcgccgcagccgccgcaacatgtcaaggagtatggctcgcgcggctgttagcggaggtgctgggcgacgagatcaccgcaccgctgctgaaggtggacaaccagtccacaatatcattgataaaaaatccagtgcatcatgaccggagtaagcatatcgatgtcaaatatcattatatccgggagtgtgcagaaaagaaactgatcgaaatgatgttcgtgggaactgcggagcagctcggtgatatattcaccaaatctctgggcagaaccagggtggctggatctgggacccttctttctctttgtctccgggcagtggcatccacgctgggtgtgccattcgggttgagttcaagctcctcagattcaatggtgaactccgtgtttctgtggaggcgaccgacggggattaacggttcgtcaagcggtctgcatgctaaaggagacctaagacttacagaagaagacggagcaaactcactccacacggcggttcaaggttcagaaacccataaaagaacatggaattgcaatgcaagagtgaagaagaggttttatccatcgagtcctcaccattgtgaatttgtgatcatcgacaacagtaacagggtcttggcttggggactggggaagaaggcagcagccagcatgatgattcgtgagatctgcatggaagagctggtttag

SEQ ID NO: 14391 - DNA, 498 bp, Oryza sativa
  Clone ID: TFbOSC33100j.C1.o2.gm
atgtgccagatgccacatcatctctcttttctcccttcctctctctctcattggattggccgggccggtggattgacgccgccaccgcacaccgccgcggaggcggatgcggacgtcaccagctcgtcgcaccacggggagggcctcctcgatgaccatcggcggaatcaccctaaactcgtcggcggagctggagcgcggacgacgacgtcgacgacgacttccaggctgccgccgagccaccgacaagcgagcgagcgagacacggcggaagagcgcgagggggagacggcggtccgtgggaggaggacacgcattccggtggccgggctgctcgagcacttcaagctcatcggctgcttcgacgacggcagcgtggagttcatgaccgtcgctgcacgtggcatggcgccgagatcgtcaccgtcgggcgtcggctggtacagcggcaaggaccagagaaagctcctcctctactgctacttccgcaccggctaa

SEQ ID NO: 14392 - DNA, 3958 bp, Oryza sativa
  Clone ID: TFbOSC414410j.C1.o1.np
atggctgattttgccgatgcactgaggccggataaattcaccggtgtgcactttaagagatggcagatcatggtcactttgtggctgacagctatgaaatgcttctgggtgagtattggcaaacctgaaggagttcttactgctgaacagcaaaagcaattcgaggaagccactactctctttgtgggatgcattcttagcgttcttggcgatcgtctggtcgaggtgtatatgcatatgaccgacgctaagaagttgtgggatgcactgaatactaaattcggtgctactgatgctagcaatgatctgtatatcatggagcaattcatgactacaagatggctgacaaccgttctatagtcgaaaaggctcatgagatacaaacaatggctaaggaactcgaactccttaagtgtgtcttacccgacaaatttgtggccgggtgcattattgcgaaacttcctccatcttggagaagttttggtactgcactcaaacacaagagacaggaatactctgttgaggggttgatagcatctcttgatgttgaggagaaagctcaggaaaaagatgctgcgtataagggcgatggtgggcagtccaatgccaatgttgtgcacaaggcccagcacaagagcaaggggaaatacaaagctcagcagaccaccaacttcaagaagcagaagaagaacaacaacaatcctaatcaggatgagaggatttgatttgtgtgtggccaacctggtcatctagctaggaagtgtccacagcgcaaggggatgaaggcacctgcagggcaaacttctaagtctgctaatgtgaccattggcaacactggagatggaagggggtatggtaatttatctactgttttttcagttaatcagtctactaattggtgggttgatactggggccaatgtacatgtttgtgctgacatctcattgttttcttcttatcaggtcgcacggggttccaccgtcctaatggggaatgggtcacatgcttctgttcatggtgttggcacggtagatctaaagtttacttcgggaaagatcgtgcaactgaagaacgtgcagcatgtcccttctatcgacaggaatcttgttagtggctcccgtctgactagagacggatttaagttggtttttgagtctaataaagtagccgtgtctaaacatggatattttattggtaaaggttatgagtgcggaggcctgttccgttttttcctttctgatttctgcaataagtctgtgacccatatttgtggtagtgtggatgatgaggctaatgtctggcactcacgtttatgtcatattaattttggcttgatgtctcggctttccagcatgtgtttaattcctaagttttccattgtcaaaggttatacgcgccatagttgtgtgcaatcaaagcaacctcgcaagcctcacaaggctgctgaggagagaaacttggcacctctagaactcctacattcagatatttgtgaaatgaatggggtgttgacgaagggtggaaaacgatatttcatgacgttgattgatgatgctactagattttgctatgtgtacttgttgaaaacgaaagacgaggctgtagactattttaaaatttataaggcagaagttgaaaatcaacttgacagaaagataaaaagacttaggtctgatcgtggtggagagtttttctcaaacgagtttgacttattctgtgaggaatatgggattatacatgagaggacgcctccctattctcccgagtctaatgggattgccgaaaggaagaaccgcacactgactgacttggtgaatgccatgttggacaccgcgggactacctaaggcatggtggggggaggcattgttgacctcgaatcatgtgttaaacagagttctaacagaaataaggacaaaacaccatatgagatatggattgggagaaaaccatcactttcttacttgtgcacatgggggtgcttggcgaaagtcaatgtaccaataacgaagaaacacaaacttggacctaagactgtggactatatctttctgggatatgctcaccacagcattgcctatagatttttaatagttaaatccgaggtacctgacatgcatgttggtacaattatggagtctcgtgatgctaccttctttgagagctttttcccaatgaaggatacacatagtagttctagtcaaccttctgaaataattcccagttcaatcacaccaccagaacaaactgaatatacacatgaacatgtcactgaggaggatgacagtgaagctcctcgaaggagtaaaagacaaaggacggctaagttctttggtgatgatttcactgtgtacctcgcggacgacactcctaagtcaatttcagaagcatatgcatctcctgatgcagactactagaaggaggctgtccgtagtgaaatggattccattatcactaacggaacttgggaggtgacagagcgcccctatgggtgtaaacctgtggggtgcaagtgggtgttcaaaaagaagctgaggcctgacggtaccattgaaaagtacaaggcttggcttgttgctaagggctatactcagaaagaaggcgaagatttctttgacacttactcacctgttgccagattgaccacaattcgtgtgctactttccctagcagcctcacatggtcttctcgttcatcaaatgaacgttaagacagcttttcttaatggagagctggatgaggagatctatatggatcaacctgatgggtttgtagttgaaggtcaagaagacaaggtgtgcaaattgttgaagtctttgtatggtctgaaacaagctcctaagcaatggcatgagaaatttgatagaacattgacatctgcaggcttcgcagtcaatgaggcagataaatgtgtatactatcgccatggtggaggtgagggagttattctgtgcttatatgttgatgacatactgatatttaggacaaatcttgaggtgataaatgaggttaaatcattcttgtctcaaaaatttgataggaaggatttgggagtagctgatgttatcctaaacatcaagctaattagaggtgagaataagattacactcttgcagtcccattatgtggagaagatcttgaatcgctttggctacattgatagtaagccttctccaacgtcttatgatcctagcttgttgcttcgcaagaacaagagaattgctaggaatcaactggaatactcccaaatcattggctcgctgatgtacctggctagtgcaactaggcctgatatctcctttgctgtgagcaagttgagccggtttacctctaatccaggagatgatcactggcatgcgcttgagcgagtaatgcgctatctgaaaggtactatggaattggggcttcactattttgggtaccctgcggtactggaaggatatagtgattctaactggatctctgatgtggatgatatcaaagccactagtggatatgtcttcacactaggtggtggtgttgtttcgtggaggtcttgcaaacagaccattttgatgaggtcaaccatggaagcagagttgacggcactggatactgctactgttgaggcagaatggctgcgtgatctattaatggatctacctattgttgaaaaaccggtgccggctatctttatgaactgtgacaatcaaacgacatgtgaaaagacgattgaagtctgtcaagaagttgagaaactccggagttataacgttggattacatccaaacaactagaaacctggcagatcccttcacgaagggactatcacgaaatgtgatagacaatgcatcgaaggagatgggtttgagacccatagcattcttgaaagaactcacctttgtgagcttgactgttggtcgcagtctatgaagattttgagtgaatcttctaggaagcttactaaagacctaggagta

SEQ ID NO: 14393 - DNA, 8226 bp, Oryza sativa
  Clone ID: TFbOSC900086j.C1.o19.fg
atggcgctatggaatggcttgggtcaggtggccaacattgcgcagcttgccggggtagatgcatatgggctcatcaagatgatcgtggaggctgcgcagacagctaaaaggaaccgggagacctgccagaagctagcacggcatgtgaagatgatcggcgacctgctgcagcgactccaaagcacagagcttatgcagcatcaagaaacgaggaacccggtggagcagctggaggagacgctccgacacacctacatgctcatcttgtcctgtcaggacagcagctacctgcacagctgcttcatgggagggaagcaggctcaccagctgcgcgaggtgcagagtgatatcaccttctacctccagctcttccctcttgtcagcttcgttgacacgacccgtacctgggagcggcttctgagaagagctcaaccttcttgcactgaggatactgcagatgagttacaaaaagtacatcattcagatcatagaattaggaaccatgtacaggactatgcacacaaatacattaagctgattgagttacattggcaatttatattcagattcaacacagaaattctcaacgcgactgaatttggtgatcagagtgtaactcaatgtccagaagtttttgaggaaaaacgaagtgaacaagcatcaatcagaagcctgaacctggatcaactagttgttaatgatattggaaaaggagcagtgttgactttttcacagatattggctgctacaaacaatttttcagggagatccttaattggacaaggtggatttgggcctgtttacaagggaaaacttcccaatggacttgagattgctgtcaaaaggcatgatacttcttcacatcaaggtgaagaagagttcatggctgagattgacgtcataccaaaacttcgacgaaaaaatataattgagctgattgggttttgtgttcaaggcaaagaatatgaaacaaaaaggatattgctaaattggtctaagcgccttaaaataattgaaggaatctcagatggtcttctttacctacacaaccattctcccaagtgcattgtccatagggacataaaagcaagtaatatcctcttagattatgaaatgaatgctaagatttctgattttggtctggccataaaattagctccgaaagcaactacagaggtgcttgttcgtggcacatggggttatgccgatcctgaatatgttgctactggagtaatctcggagaaaaccgacgtttatagctttggcattgtactgcttgagataataagtggaaagttggaaacgtggcgcggtgggatgagagggcgaggcgagaggggcgacctggctggcgacgggccgaccaccgcggctgtcacctccggcggccgctccagtgccctcaccattgacttgccgcctctcctcccttctccggcaggtatctccaagctgcgcctcccttctccagcccgggctcttaacctctctcaagttcgaccaggtgaagctttccaaaacctcatccttcatctcttccactgccctgttacccctatcgccactacccttggcccgtcaaaaatcatcccaactcctatttggctttgcgctgctccctctaagccgctcaactcgctctatgtcaaaaatgctcttaatttctggttcagttcttcgttttcgtctttctctgtttcttctttgggttttggtttgtttctttctcatgttgcgaacaaagatgtggctacctcgttgtttcttgcgggttcgtctgttcttaagtctgctggtttgtccatccatttgaccaaagattcagctgcaaaggatattcaagaaaatgttacccggttcttggttcagtttgaaggcagttcgtccgttccctctctggtgggtgaaaaagttgttcccgcgcttcaaacagttaagccagcctttactgcaacgtcacgtcatattggatgctcccaacaatccagcaagacctctaccccctctgtgccgacaggccctgcattgaagtctgtttactgccctgtaacaaactccttcagagacgctctcctctcacagccaaaacctaaaccccccgctcgctcagccacttctcgccttcctagcaggggcagaaaaaacctcaccatgctcaaccgatgctttcgctgccttggttctgatcatcaggtcaaagattgccgggatcccttgatttgcgcatcctgccgtcgagcaggtcacaggcaagattcttgccggtcatctatggcttccaacatctcccctcgccgctcatcttcctccttccacccatccacagcaaactccacctcccgcttcactacccgctgggtcaggcgtgctctaaacactccagccccacctccgcctcgcttacctactgccccataccctcgatccaaccacagctccccccctccagataacctagccattgttccttatgttcctcctctgactcatgtggatgcgcagctggaagatgtgattgccatgttggagagcagtctttgttcctctccggtcagatctgttactgctggacctctggtccccatggaggttagtgagaatgcggtcacttcttctgttgcttctcctttaccggacgtaagaaatgccctagtctgtgtgcaagatagttcaatctcagtggctgccttagttccagttcttgcatgtgctgttaatgatctagagactgtctcaactgaagtggtacctgcgactgtttccttggtgtctgttatgcctacaagagctgctgcggttgctgaagttgctcatgctactgttgagtccgttgttgttccgtcctctgtcagcgaagatctctcgccagcggtcaaccttagcagtatgccacctcgtctcagatgcaagaataaaggtttcctcgcttggtacggcgcctgtccatcttcgaggcagccaagctcggtccccccacaggaacctagggatatcttcgtctgttcggaacagttgtctgccaacccaattctgtctccacctcaggatcctgatagcacgagatcgccacctccgacattgagtggcccctcagctgctgagcaaatcagaagagctctagcaggtctaagtccagaaggatctattcactctgcttcactctctccaggtcgggtgccagtcattacttccaatgacactactgctgcgcaggactttgcttttggggaaccagatccagttaacatatcaggagacagtgacgatgatattcttgatatctttatcccctttgttgacatgagagtaactgctcattacgccactgcttatgttacccctccatgtgaatgccctggcagagtaattcgaaaagcaatgcaggatgctcaccctcgttttcagttcactctcatctcagcttgtagaggtgcaatgactctaagatttattcacagtcaggacagagactttgcagttgatcaccaggagaatcttacagctgaaggccacttggttaggcttgaacggcctgaggacagtgcggctcgcttcattcaacacaacactatgctgtccgaactagactgtattgacttcccgccagagatgttgttccctaacaagataagaaatgcttttgaaaattacggcgagctgatggaagtagatgatcaatgcctctatggggacgaacaatcctctctgcgtcttgttgttctgcactatcctggcaagaggatgagccctagatttcggctgcgctacaatttggggattgtctgcactgtctatgtcagggttctaagaacatgggagctggccatgaacgtggatgaagatggaaattacattaagcattatgaacagtttctattccctcatcagttggatcctccccgttcaggaccaactgttggaccagaggcagagttggacaacttgaatcaggctccttcaaatcaaatctctaacaaccaaggacttcagaacaggggaagattgcttgcgattctgcctgcagctagcactgtcttcattgaggaaatctctgatacacctgaaatttttgtccctccgtcaatccattctgctccctccagtatccatgactgcctccaggacctcgtgccctcagatactgaaaatgaacatgagctttcagcccggaaacgcagaaggcagaagaaacggacaattgattcagatgtcaagaggcgatatagcgaaagactggcggccaaagaaggacatttgtacatttcgatggaatccaaagcagccagagcgaaaaaactaaaggaacaacttgccaaatgctcatccaaactcaatgacgcggtacacaagcacaatctgctcgaccttaacttcaagactactccgaaagcgttggaagatctggctattgcttgcagtttgaatgatcacgatattgcccagcttcgaaagctcttcttcagttctctagtgtcttctctcccttcgttatgttctctttcagtctatttactccatgaaactaaacttcaaaacatcccacctgaaaaagcaaaaactattctacctcctaacctcgctaattatgattttgtgggttcttatggctctagagggggcatgcttactgcctggaatgctgactttacaaaaacttctttcatctccagacacttctcgctgacaatctccttcacctcaaccttcacagacctgtccttttctttaaccaacatctatgggccagccgagcttgatcaaaaacaagacttccttcatgagcttttagaaatagatcccctaatccagggccctagacttctcataggagacttcaaccttactagatccccttccgacaagaactcccaaaacttttcaactggtcttgcagctgctttcaaccaaacaataaactccctaagcctgtttgaattaccacttccagacagactatacacctggtcgaacaaaagagaagttccagtcctggcaaggctagaccgagctttcttcaacaatgcttggaacaacaccctcccaaacacctccctctcttcttgcactagaaccacctctgaccatgttccacttcttctcactgcttctacttccattccaaaatcgaaaactttccgctttgagaatcatcttttgctggaccgagattttcttccttcagtcatgcacaggtggccacaacagctcaatatgaatgatccggctgcttgccttgctgccaagctaaaacagacaagatctatcatcaaagtttggatgaaagaacacaggaaacgtagttctctcaatgaagactgtaagttcacaattgatctcctcgactatattgaagaactcagacctttgaatgatggggaacgctgcctaagaaatcttgtacaggagaaattgtttcaggccatccaaagcaaggttgcatactggaaacaaaggggaaaggtcaagcggctaaagattggaattgacaattcggcattcttcaaggctcatgcatcaaaaaattacaggaattcaaggatcagatcaatcaagcacaatgggtcagaaattgcagatcacaatggaaaagctctgcttctgcactccttcttccaacattttctagggtccgactgtcagccgttgtgggacttcgatctgtcaacactatactcagaagatgaacgagactataatcttttggcttcgcaaggattgcaattttctacggaagagataataacatcaattaaaggcatgaactccaacagtgcaccgggaccggatggtttcggaccaagcttctacaattcagcttggaattctataaaggaggatattatcaagctggctgcgagtttctgctcaaattcagtccaactggaaagaattaacagagctcacattgttctaattccaaaacctggcaaggagaatacagtagatggctatcgaccaatctccctccaaaactgctcagtaaaaattctttcaaaggttttggcaaataggcttcaaaaagttctgacaagaatgattcatctggaccagacaggcttccttaaaggtagatgcatctctgaaaatttaatttatgccactgaactgatacaagcgtgccatgcaaggaaatgcaagaccctcattatcaagttagattttgctaaagctttcgattcagttctctggacgagcctgttccaaatcttggctgtccgggggtttccaaacaattggatttcttggatcaaaagcctacttcaaacatcaaagtcggcagtgcttcttaatggaattccaggaaaatggattaactgcaaaaaagggcttcgccagggagaccccttatctccttatttatttattctagtggcagatgtgctgcaacgactgctggagaaaaactttcagattcggcaccctatctatcaggacagaccatgtgcgaccattcagtacgccgatgacacgctggtgatatgccgagcagaggaggatgatgttcttgctcttagatcaaccttgctgcaattctccaaagccacaggattacaaatcaactttgccaaaagtacaatgatctcccttcatatcgaccgttcaaaggaatcgtcattgtcggaattgctacagtgcaagctggaatcgcttccaatgtcttacttgggcctacctctatccttgcataaactcaccaacaatgatctacaaccaattgtggtcaaagtggatagttttcttacaggctgggaggcatctctactttcacaggccgaacgcctaatcctagttaatgcagtgctaagcagtgttccagtttatgcaatgtccgcgttcaaactcccaccaaaggtaatagaagcaattgataaacggcgacgagcctttttttggaccggtgatgacacctgctccggagcaaagtgtttagtggcctgggatgaggtttgtaccgcaaaagaaaagggaggactaggaatcaaaagtttaaagactcaaaatgaagctcttcttctcaaaagacttttcaaccttttctcagataattcctcctggactaattggatttggaaagaatttgatggaagatcactattaaaatctctaccgttaggtcaacactggagtgtctttcagaaactgctgccagagcttttcaagataactacggtgcacattggggatggctcgagaacatccttttggcatgatcgctggactggcaatatgactcttgcagcacagtttgaatctctcttctcgcattcaactgacgacttagccactgttgagcaaattttatccttcggaatttacgatattctcacccctaggctttcatctgcagcgcaaaacgacctacaagaactgcaaaccattcttcagaatttttccttgacaaatgaatcggatactcggctcaacaatcgccttggcaatttaacaaccaagacaatctatgatttaaggtctccgcctggctttccttcaccaaattggaaattcatttgggactgcagaatgccattaaagatcaagctctttgcttggcttctagtcagagatcgactgtccacaaaattgaatctcttgaaaaagaaaatagtacagacagcaacctgtgacatatgcagcaccactgatgaaacagcagatcacctcagcttcaactgcccttttgctatcagtttctggcaagcacttcatatccaaccgatcatcaatgagactaagtacctgtcccaactaaaggcaccagcaactatcccaacaagacattttcagagtttcttcatgctctgcttttgggtcctgtggaaccacaggcatgatgttgtattccgaggaagaccaccttcaattgcttcatgcttgcaacgcggaatttcggaatcctccctatgggctgaaacttttacacctgatgatagatttgtaatagatgtttggaaagacatttcttcctcaattaatgcaatgacaattcaggtggggaacctctcccccccggcactgaagaacagaaaaaagttgcacaagcttattgatccatcattaggtgctaagaaacatgagcgagctcagattatgcaatgtcttagggtggcgatgttgtgcgttcgggatcgcgctgaacatcggcctaccatgtctgaagttgttactatgcttcctagcatcaagacaccgaaagacagaaaggcagttgtcaacgtgcgcttttga

SEQ ID NO: 14394 - DNA, 1413 bp, Oryza sativa
  Clone ID: TFbOSC15265j.C1.o3.fg
atggaatgccgaggatcaagaggatttggttcttcgatgaacatcaagtcaaaatccaaagtgggcattgatcaaagcaaaggagctgtttttgaaaatggctctactcgggacagagagtcccacctggaggttctgtccggaacttcctggcaccaaggtgaggttgaaaaatttcataagtgctgcccagaagttcctggcacttttacccggaagctcctggcaggtttccagttcaaacttgatgctcatctcatttggaacacactcgaggagagatatgacaagtccgagtgtgatgaggcaaagctcgctatagaagaaccacttgtggagtgctcaaattcatcgacaatttgtaaagagcctcaagtgattctatccaatgagcaagatagtcttgccacattcacctcctcaccaacacatgtctccattaaaggtaatgaaatggtagaagtatgtgggaaaaaatggccaagtgaagaatttacatctccaagatgctcatcttcacacttggatgaatattcttgcatcatggagaaatcatatttggagaaagaaaatctagagcttaaagctcaacttgtggagctcactagcaagcatgtggacctacaagaaaaatatgatgagcttttgtgctctcatggaaatcttgtggattcacatgccatgctagaagtaactcatgaggtgatcataataacggtaaaatcctatgtgcctcatgttcaagttgactttacatgtgctaactcttgttgctctcaagcaaatatttttctgcgcactacatgtgacttggattatgtagggaaaaaggataaatacatcgatcatggatttgtttgcaatgctcaaccttctcaagataaccgtgaaagcatgctgaagaagcttgagaagggatcaaccgtagcttgcaccaagttctatcaagaagataacaagtccaacaacaagagcaaggggcaagatcaaagcaagaacaaagcttccattacttgcttcaagtgcaagaaaatgggacatcatgtgagagattgcccttggaagaaacagaagaagttgagcaagaatgaggatcttgctcacagttcttcaaatccaccaaagagggacactttgcctcaagttgtccttgcaagattgatgatgaagccacacttccaagaaagacatcaagaatcaacagaaggaagtgctacggttgcattgagaaggggcatgaaattggattttgtccgcacaagaaggatgatcatagcaatcgatcaagcaagaggcaaaccggcaacaagcaagtcaagaagcaagataaaagcaaaactcaactttgctacaattgccgggcaaagggacatattggtaaaaattgtcccattggttattacttgtgtataa

SEQ ID NO: 14395 - DNA, 1263 bp, Oryza sativa
  Clone ID: TFbOSC402930j.C1.o2.np
atggcacctcaaccaacctgtcagacttgtgtccgcaactaccttggttctaaggaagacccagctttgtcagaaaatccaaatcaactagctgaacaagtcaccaaccaagttgccaagactgataatactgttcctggaccaaacaaggaacccaaggtgaatccagacaagagtaagaatgaggccgcagaaatacaaggaacacaatcagtagaaggcactgatacccataaagagaagaacaaagaattcttaaatgtgatgattacagggatgaaaaccccacttcgagctaataattgccccaaccttcagaactcaatcaataaatccgtatcgcgagaaaatagcatgattaaagaaggaagttgtcacaaaagaaagaccttgccatcagaagttgacatgcaagatgtcccacaatgtcagacaatgcaatcttgccaaaacttacccaagtcccccaccctcaaatcaaagaagatcagacacgttcccggattcatatgcttcatttgccacaaaattggccattacatgagacactgcccccaaaaaccctatatggatgcaccactacaagctaatatgagcacctcaaggatgcccttctatccccaaggaagcccaaattcgccaaatgttaatgcagtacgttcaaccttccctgatgacaaaagagcaaaagcatcctgcgacatgtgccaagacatccaagaaaagaaagagatgcaagaatacaagagacgcaaagtaatgtccctagagattcaagcaaaagaagatttgtgtcgaaaaacaaactcgccagcacaatactatcagaaagcatctcagcattcaactagttccggttctacgtctcgttcgactatgtcagaacctggtcagcaagccacaatgatcaacagtaatagccatgaaggaagcaactccgtaccatgccctacaccttcaaaaagacgtggttataaggcaggagtcgaatgtttcatctgccatgagatgggacactattcatggtgctgccctcagaaagtcaagtcaaaacgagtccaaccaacaacaagccttcccaacgtatctggaccaaaaagttcaaagtcaccaaacagtggttctgcctcgttgacctcaccgcccgtcggacaaggtcgtctgaaccatgtgcaagtagaaacaaacggaaaagttgtgaatctcgagcaagttgaaggagcaggagaagaacaggttccacaggcaagagcagagccacag

SEQ ID NO: 14396 - DNA, 7452 bp, Oryza sativa
  Clone ID: TFbOSC900058j.C1.o11.fg
atgggggatctggcgttgatgagctttctgtccgggaagcgggagcgacagcggcagctctgccaccgacaaattggacgaggccgtggctcaattacttcagtggctaaaactgaaagaaagggtctgcactaccaactaaaagaaaacgtttaccttccagaggacatcttgcggctgatccatgccatgatgccactgcgagatgctgctcgtgctgcttgcgcctcgcacatattcctgcagtcctggagatgtcgtcccaaccttatcttcactggggagacgttgggcttgattataaatggtactggaaaggatgacgctaaaagagacttcatcaatatagtacagcgcatactgctgaatcactcaggcattggcgtgaaaacactaaagcttgaactcctccattttagcgatctcgacttaggttgtctcgaagcctggcttcagattgctgttgcaccagggattgaggaactcaccctgatgtttccttgcgtaagatacaaattcccatgctcgctcttatttgaaagaggtggaaactcggttcgatatcttcacctcatggtctgcaccttccgtcctacaattggtcttggttgcttgataaaattgacgcagttgcatctgtctttcgtgtggattactggagatgagttagagctcctttccaaatgcgtcgctttggagtggctgaaactctcatattgccctgagataatttgcttgaaagtaccttgtatgctaaggcagcttggctcccttgaggtggctgaatgcagatatttgaaagtcatagagatctgtgctccaaatctttcaaatttttatcttactggttttctagtacggacttcatttgagaatccattgctagtgaagaaactacgaatcatgtgtttacgtcaaggcaactttgtttcttatgctcgtacgaagcttccatcccttgtgccaaatgttgaaacacttacagtagcatctaatgaagcgaccgggcaggcgattcccaccgaccgacggccactccggccccggcggccacccccctgcgccggtagccaccccggcgccgacgcccaccacccacgcctctcttgccccatcgcgcttcccctggagcctgctcgaccgccgctcgacgttgctggccagatgcggttggcgtctctgccgccgtcgtggccagcactccagccggcgcatcccacgctgctccgccaccacaaaccagtaatcccctctcaacccctctctggaccacccctttccccacgaagctccaccccacgccggaacccccagttctggctggagtcgccgccgccgccgccatccagatctgctgtgcctttctccgccgacgatgtctcccacgtctcggagtccccggatccaaggagttcgcccacgcctgctatgccacgctccttcgctgatgctgtcaggttggatttcaatcccgccaaaggagacggcctgcccgttttcaaatccccacacggccaaccaccgccgcgcccaaaattgaagtccgccattactatcccagcctggagcacctttcagcgtcgcgcctacagggctactcccggagaggaaatgggcgtgcgtcgcatccatggtacggcgagaccaggccgcttcaatggcgagtggaaggaagtcaagccacgccactggtggcgccgctcgccgcattcacccgagtcccagcggccagcttccaggcgacaagacgcacattcaaggcgctcgttggctcccgctgcatcggcatcgctgcgcctcttcagagagagaacggctggaaaatgcttcaactgccttgcgcgtgatcaccgcgcagcgcgctgcagggacccggttcgttgcttcagatgtttccgttcggggcacaaggcaaactcctgctcccggcgtgaaccgcgaccacgccaacctcgccagtctccacagaaagcgctgcgccgccaagcttctacaccacccccgccacagaacacgtcgcaccgccaggcttctacgccatccccgtctcttccccgggctacacgaccacgccaaccacgccagtctccgcagaacacgtcgtgccgccaagcctccacaccacctctgcagctacctcttccacccaagccgtcctgcaacacgcggatggctctactgggagacccggcgacccggccggatgaagaccactgcttcgttccgacaccgttcgccacggaggctgagcggaaagaatgggaaagctcggcggtggtgtcctgggcgatgcgggcaccggcttccacaacggcgcaagatgttgaggcggcttttcgggaggaattccgtcttcggcgaggggaggtcacggtgacgcgccaccacccggaagccttcctgatcaagttcgagcatagcagtcactgctatgaagctatgcgcaagggcttcgtcaagcgaaacggtattgagctccacttcatcaagtggcgcagcctgagtgcggccctcggcatcgcgctcatgtttcgccggctcatcgcgcgcacctgtggcctcgaggagatcgagaccaacctgatccacccggtcgacactcgcacggtggatgtgtgggcttggaccggcaatccgagctccatcccgaagcggatgtggctaacctttaccggctcgacgcggggagccaaaccagagcaaatcctggtgtccgacagaccgccggcacactggcaacatggcgccaaattctgcgtctacatccacctggaggagatccacgactacacgacggtggcggtagacctcgatggcaacgaggcatgcgcgccctccaagcggcgccttccggagtggcacctcggcgtggccgacggggacccggtaccaacgcgagccttcgagaacttcccgcaccacccgcctccaccacgcactcgtcaaggccgcgagccagagcgcatcgacgaccgcgacgaccgtcgccgaagagccaaagatgatcgtgaccggagccgtcccaggcggtcgtataatgacgaccacccggaccacgacagggaccaagcctggcgacggcgcgacgacgacgacgaccgcgacggcaggggcggccggggccgcgaggcatggcgaggacgagaaagccgcaaagtctcgggccttgatggccaacgcgtgcgcgagcgttcgccgcgtcggcgcgactgggcagaggacgaccgtcgcggtgaccggcgtcatcacgtgcaggctgctgtcgccctgcctgctacaatcccgcctctcaagctcgctccgaagcaggcaccaagggaaaacctccgtgagacgggggaaaggcttgtgaacagggtgaacaatttcgccgctgcggtggatgacgcttctcagcctggcggggaagaagcctggtccgaccgccggccaagtcgcgtccatgacgtcccgatccggcaggtgttcgaccggctcaagcactgcctcttccctgctggcatccactctacaccaagccactcgggccaagtgatgcctcatgacgagagggcgtcgatcggcgcgcgaggcaacactgcagccgccacggcggttgcgtcgaagacggtgacgccgccgcagctgattacagctgcgccaacgacggaacaagatgaacaccaagatgccgggaataagaacacgctgcaagtgctggagagcctcttctccaccccgccgcgcgccgttttgccacggccgacctcccctgcgctgacgacgacccaagcgaccccagcgccagcaccggcgccgccaggtggccacgggatggagcgtcgccgcagcgcaagactcgcggcaaagccgccaatgccaactatgcaacgctgcacgagggtgttattgaagcggcttggcatgctccatgacgacaagacgctcgacgaggtgctctccgactacatcgccatgttcaatggacctctaccgcaacacgtgatcgcagcgctcacgtccatcttcgacatcgacgccgatgcaatcatggaagccaatcacgtcgacaacacgctcctggaggttgtcggcgaaggcgtcgctgaccttgtcgaggagtgtactgcactaaacgagctaatcgcagagacatcttgcaacctcgtctgcatccaagaaaccaaactaagagcagttgatgaccagctagcccgtttcttaggagcctacaggctagacagttacgctttcaaaccgtccaggggcactaggggaggcatcctacttctgtggaacagcacggcgatctcggtgcacagcactcgcataggtcgttactcgttgacagcgaatataactgtcctacgctgcggaacaagcttcatgctcaccacggtctacggcccaacgcgtcacagagaaaaagactccttcctccgtcacataaggagtttaaagccgtccccgggaaacaaatggcttatcctaggagatttcaacttggtttatcgggcacgagataaaaacaacaacaacctaaatttaggccgaatgaatcgcttcagagctgcactcaaccgctgcgagctaaaggagatccacctccaaaacaggaaattcacgtggagcaatgaaagacgacgaccaaccctcatgagacttgataggttcttttgcaatgaggaatgggacctatctttcgaccgccacatcctacacgctctttcaacaggaccttccgatcactgcccgttgttgctcaccgacccatcctgcccacgtaagccgcggcctttcaaattcgagaatttctggataaagttacctggtttcaaggaggtcgtagagcaagcttgggggaaaccgtcgaatcacaccgagcctatgcaccggcttgcgtataaactacgggatatggccaaagaactaaaacggtgggcgagaaccacgtgctctcagactaagctgaaataccatatggccctagatgtcatcctacgactggatgtggcccaggaacaacgtaccctttcgccggaggaagggaacctaagagcagccctgaaaaggagagttttgggtttagcggtgattgaaagagcgagaaagagacaagcgtcacgaataacgaacataagagcaggcgacgcaaacaccaagtttttccacctcaaagtaaactccacaagaaggaagaatcatatacatcgcctccgcaaacaaaacgggtgggcagtgacgcacgaagaaaaaagccaagcgattttcgaccacttttccctcttcatggggaggccgcaagaaagacaactagatctaaactggcaatccctagggctagagacaacggatttaaattcgctcaatgaacctttcaccgtggatgaaatcaagagagcaatttgtcacatgccgacagacaaagcacctggccctgatggttttaccgggtgtttcttcaaagcatgctgggaaaccataaaaaacgacgtcacgacagctttcaacgccatctacaatcatcggtgcaatcatctaaacctcctcaactcggcaagcgtcgtcctcatcccaaaaaaagatggtgcagaacaagtctccgatttcaggccaataagccttatacacggatttgcaaaaatcttctcaaaattactggcccttcggctgcaacctctcatgcacaaacttgtttcaacaagccaaagcgctttcattcggggaaggagcatacatgataatttcctatatgtcagaactctgttcgcaacttctagctccaagatactcctaaacggaataccgggtaccaaaataattcatgggcaaggcctaagacaaggagaccccctatccccgctactcttcatcttagcaattgacccacttcaaagactacttagcaaagcgacagaactcaagctactaagcaagctacgaggaaagtctgtgacactatgtacttccctctacgcggatgacgcagcagtctttattaaaccaggaaaatccgaagtgcagaatttcactgctattctacatcgctttggcctcgcaaccggcctacgtgcaaatatagaaaaaacacaagtggtggccatcagatgtgaaaacgtggacttggatgaggtgcttcaaaacaccccggcaacaagagcttccctacctatgaaatatcttggacttcccctaacaacgggcagattgcgcaaggcagacctacagctgttgtttgacaaatcggccggaaaaatggcagcttggcgaggtagaaacttgggactcgccggacgaactacactagtcaaatcagtgctatcatcacagccggtctaccttcttattgcactaaaggtctccaaggaatcaatggagacgcttgacaagcaaagaaagagcttcctctgggcaggatcggaaaagctaacgagaggaaaatgtaaagtaaattggaaaagaacctgctcaccgactgtctatggtggtctgggcattctgaatttagaaaactttgctagagcgttgcggatcagatggctgtggcaagagtggaaagctccggagagaacctggatcggccgggacaacccatgtgacaacacagagaaaactctttttgcggcggcaacgacaataactgtgggagacggggaaacggctagcttctggaactcagcttggatgcaagggcggcggccgagggatgtgatgccacttgtatatgcaatatccaaaagaaagaatagaagcctcaaagaaggcgtcacagataacgtctgggtacaagacctaaatttctcttccccagatgcaataacagttgagctgctggaccaaatagtgactctgtggtcgataatccaaagcgtgcagctcagtccagacgtgacagatgaaatcacttggaagttcaccaatcatggggagtatacaacaagctccgcctataagatgcagtttctcggatccatcaatgcaaactatgacgcaatcatctggaaaccatgggcaccaaacaaatgtaaaattttcgcatggttggccatccaaaacagagtctggacggctggcaggctgactacacgtggatggccgaacaacactttctgcccgctctgtagacatacccgggaaacggtattccacctcctagtagactgcagatactctaggaggatttgggagaatctggcttgctggacgtcgcaagagcacatcaaaccaggcaattgggctcaacctgcgtcgctccaagactggtggactgcaatagcaacacacccagggacaccgagaaaaggaaatcgcacccttctgttgctagtgacatgggagatttggaaagagagaaatcaaagaattttccagcgcaacgaactctccatactatcgctctgcacaaagataaaggaggaggccaagacctggactctagccggcgcgaaaaggctatctgagataatcccttaa

SEQ ID NO: 14397 - DNA, 5157 bp, Oryza sativa
  Clone ID: TFbOSC400601j.C1.o78.fg
atggcccaaggtgctggcgacgctgtgcttccggcatcacacatcacggcggataggcaccttagcctcccccgcaagattatgccggagggggccgccctgagggcgggggagtcgcgaccgcgaccgcggtactcggatcgattcgtgcacctcctgtccttcgccatggtggggttggtccctccattctccaggttcttccacgaggttttggatttctatgagatccacgccttgcatctcgcacccaacgccgtgatgacgctggccatcttcgcgcatctgtgtgagatgttcgttagggtccggcagacgatgcgattgttccagttcttcttcgtcccgcagctgctgcaagcatggttggcggcttcggagctgggcgagcagtacgacgccgtgcgggaccgcctcaggggcctgcgaagccagggccttacgggggcgatggtctttggtgattacttccattgccgcatcgcacctctccaagagcggtcccgcgaagcgtggaagtatattggacccaacgatctcatgcgcactcatgtgggtgagcgttgggactggggcgaggaggatgcgaaaacgattccgacgtttccggagagtccgtttttgcaggagaagaatttaaagagttccaaggccagcaaggcaactcctggtttggaatggtatattcctggtttggagatagaactgtgcagccgggatggttgttcagaatggttgggcctatgcaacaggatgccgcgctacaagcctgagtatttgtttggtgttgagggatttgtccaggagttgcgtacgatgtcctttgccataggatttgggactgcccctttgtatgcccagattcctcatgatcgtgatgaagagaagtgccaagtcaaagtcaccttgaacagtaatagtgaagatatcctatcagtgatgttcgaagctggaggaggaaactacattcatgcatgtcaggaggtggcaaggatcgccataggagagctccgcgatcgctacagtgatcagttggccgacactgagtatcgctaccatcctcgccaaccccagggaagtgaccgtggcagctaccttgagactgaggggattgagaatgatgctaccacaaggcatttggttgagatgctgtgggctatggatgagacccgcgcggagactgtgttagcagctcaagatcgtgaagaccggaatcgtggtaagatttgcaagctagaggacaagatggtgctcactcgcagcaacgggaatggtcccaacatcaagaataacaacaacaatagagagaatcccacacttgcccaagtcctggctcaacaggcacagcttatgaacatgatgatgcagcaacttcagaaccagcagaaccagggaaataaccatgcacctccccagaacaagttggcagaatttctttgtgtgaggccgcccactttctctagcactactaatcctgttaaagctggtgattggctgcatgccatagagaagaagttagatttgcttcagtgcactgatcaggaaaaggtctcatttgcatcacaccaactgcatggccctgcctctgagtggtgggatcacttccgccttaacaggactactgctgaacctatcacttggcttgaattcaccgctgctttccggaagacgcatataccatcgggagtggtgtctctcaagaagaaggaattcaggtcgctcacccagggatctcgcacggtcaccgagtatctgcacgagttcaatcgtctggctcgttatgctccggaagatgtgcgcactgatgaagagcgccaggagaggttcttggaaggacttaataatgagctttcttacccactcatgactggggattatcatgatttccagaggttagtggataaggctattcgccaggaggacaagtacaaccgcatggagcagaagaaacgccggattgctcacttcaaggcacaacaggggaatagtcagaggccgcgtcttactttaggaccccagtccatgccacagggaggttcttcgtctgttgttcgttcgcagcgtgagttcttcaacaacaacgcgggcaacaacatccgcaatcaagctccacgccctgttgcagcttcgacacagcaacagcctgccaagagggagcaaggcagcaagcctggggtgtgcttcaactgtggagacccaggacattacgctgacaagtatccgaagccccgacgcgtgaaggttgtccctgcccagagcaactctaccgcaccagcatcaaaggctcgtgtcaatcatgttgctgctgcagaagctcaaggtgctccagatgtgattttgggtacgttccttgttaactcagttcctgcaacagtgcttttcgattccggtgcttcccattcatttttatctatgagttttgcgggaaatcatgggatggaagtagaggatcttagacgtcctttgatggttagtaccccgagtaatcaagcactctctttgcaacgtaacccctctgtcagaatagaaattcaaggagtaccatttcttgccaatcttattctgttagaagccaaagaccttgatgtcatcctagggatggactggttagccagatataaaggtgtgatagactgtgccaacagaaaagtaactctcaccaacaatgatggtcgagttgtaactgttcatgcattgtcttctgaatctttaaggtcaagtctgaaccaaatagctttggaagagattcccatagtacaggaatacccggacgtgttcccggacgatttacctggtatgccgcctaaaagagatattgaattcagaatagatctggtaccaagaacaactccgatccataagagaccttatagaatggcggccaatgaattagcagaagtcaagaggcaagtagatgatttgcttcagaaaggatacatcagaccaagttcatctccatggggagctccagttatttttgtggaaaaaaaagaccatacccagaggatgtgtgtggactatcgtgcactaaatgatgtgactatcaagaataagtacccgctgccaagaattgatgatttgtttgatcagcttaaaggtgccaccgttttttccaagatagatcttcgatcagggtatcaccagttgaggattaaagaagaagatatacctaagacggcttttaccactaggtatgggttgtttaaatgtactgttatgtcttttggacttaccaatgcccccgctttcttcatgaacttgatgaataaggtgtttatggaatacctagacaagttcgtggtggtctttattgatgacattcttatctactcccgaacaaaagaagagcatgaagaacatcttcgccttgcactagagaagctacgagaacatcaactgtatgccaagtttagcaagtgtgaattttggttgtctgaagtgaagtttcttggtcacgtcatctcagccggaggagttgccattgatcctagtaatgtggaatccgtaaccaactggaaacaaccaaagacagtttcagagattcgcagtttcctgggtcttgcaggttattaccggaggtttatagagaaattctccaagattgctaagcccatgacacggctgcttcagaaagatgtgaagtacaagtggtcagaagaatgtgagcagagttttcaagagttgaaaagtcgcttaatatcagctcctattttgattttacctgatccaaagaagggtttccaagtgtattgtgatgcatccaaacttgggttaggttgtgttctgatgcaagatgggaaggtggttgcctatgcatctcgtcagttacgcccgcatgagaagaactaccctactcatgatcttgagttagctgtagtggttcatgcgttgaagatttggcgtcattatcttttcggtactcgtacagaggtgaacactgatcacaagagtttaaagtatatttttactcagccagatctgaacatgagacaacagagatggttggaattaattaaggattatgacatgggaattcattatcacccgggaaaggctaatgttgtagcagatgctcttagcaggaaaggctattgcaatgctacggaaggacgacagttgccattggagttatgcaaggaatttgaaagattaaatttgggaattgtcagtagaggtttcgttgcagccctagaagcaaagcccactctaattgatcaagttagagaagctcaaattaacgaccctgatattcaagaaattaagaagaatatgagaagaggaaaagctatcggtttcttggaagatgagcaaggaactgtatggttgggtgagagaatttgcgtcccagacaacaaagatttaaaagatgcaattctaaaggaagcccatgatactttatactccattcaccctggtagtactaagatgtaccaggatctcaaggaaagattttggtgggcaagtatgaagcgtgagatagcggaatacgtagcacctttgaagattcctgaatggaagtgggaggaaatcggtatggatttcatcactggtctacctagaacgtcatcaggccatgactctatttgggtgatagtcgacagacttaccaaagtggctcatttcgtcccagtaaagacaacatattccgaaagtcgtttggcggaattgtatatggcaaggattgtgtgtttgcatggtgttcctaagaagatcgtatccgatcggggaagtcagtttacttcaaagttttggaagaaacttcaagaagagatgggttctaagctgaactttagtactgcttatcatccgcagacagacggacaaaccgaaagggtaaatcagattttggaagacatgttgagagcttgtgctttagacttcggtggaagttgggataagaatctaccttatgcggaattctcatacaacaacagttatcaagctagtcttcagatggctccttacgaagcactgtatggtcggaagtgccgcagtccgcttttgtgggatcaaacgggagaacgtcaggttttcgggactgatatcctaagggaagcagaagagaaggtaaagatcattcaagaaagattgcgtgaggctcagtctcgccataagagttatgccgacaatcgtcgcagagatttgagttttgaataa

SEQ ID NO: 14398 - DNA, 1907 bp, Oryza sativa
  Clone ID: TFbOSC900179j.C1.o14.np
aaggtgcgctgtagtggattgtgttgtgcgaggggtactgtcacagctcctttccgagctcctggtttggaatggtatattcctggtttggagttagaactgtgcagccgggatggttgttcggaatggttgggcctatgcaacaggatgccgcgctacaagcctgagtacttgtttggtgttgagggatttgtccaggagttgcgtacgatgtcctatgtcataggatttgggactgcccctttttatgcctagattactcatgatcgtcacgaagagaagtgccgagtcaaagtcaccttgaacagtaatagtgaagatatcccctcagtgatgttcgaagctggaggaagaaactacatccatgcgtgtcaggaagtggcaaggatcgccataggagagctccgcgatcgctacagtgatcagttggccgacactgagtatcgctaccatcctcgccaaccccagggaagtgactgtggcagttaccttgagactgaggggattgagaatgatgctaccacaaggcatttggttgagatgctgtgggctatggatgaaacccgtgcggagactgtgttagcagctcaagatcgtgaagaccggaatcgtggtaagatttgcaagctagaggacaaggtggatcgtttggagaaggaactagccgcgttgaagggagaagcaccaccgcagaaggccaggattcgtcttaccgcaaggaagagagctctatttgtccctcgctaccaattggcgccaaagatggtgctcactcgcagcaacgggaatggccccaacaacaacaataacaacaacaatggagagaatcccacacttgcccaagtcctggctcaacaggcacagcttatgaacatgatgatgcagcaactccagaaccagcagaaccagggaaataaccatgcacctccccagaacaagttagcagaatttcttcgtgtgaggccgcccactttctctagcaccactaatcctgttgaagctggtgattggctgcatggatttgcttcagtgcactgatcaggagaaggtctcatttgcatcacaccaactgcatggccctgcctctgaatggtgggatcactttcgccttaacagaactactgccgagcctatcacttggcttgaattcaccgctgctttccggaagacgcatataccatcgggagtggtgtctctcaagaagaaggaattcaggtcgctcacccagggatctcgctctgtcaccgagtatctgcacgagttcaatcgtttggctcgttatgctccggaagatgtgcgcactgatgaagagcgccaggagaggttcttggaaggacttaatgatgagctttcgtacccactcatgactggggattatcatgatttccagaagttagtggataaggctattcgtcaggaggacaagtacaatcgcatggagcagaagaaacgccggattgctcacttcaaggcacaacaggggaatagtcagaggccgcgtcttactttaggaccccagtccatgccacagggaggttcttcgtctgttgttcgtccgcagcgtcagttcttcaacaacaatgctggcaacaacatccgcaattaagctccacgccctgttgcagctccaacacagcaacagcctgccaagaaggagcaaggcatcaagcccggggtgtgcttcaactgtggagacccaggacattatgctgacaagtatccgaagccccaacgcgtgaaggttgtccctgtccagagcaactctaccgcacaagcatcaactctccataggcggcggccgtgctcacgtcggcagctcagagggtggcatgttagtgcaaaggaattgctaaaatagagaggagaggctgactagtgggtcccatacctgtttctcccctccgttg

SEQ ID NO: 14399 - DNA, 4134 bp, Oryza sativa
  Clone ID: TFbOSC26838j.C1.o2.fg
atgagggcacaagtgagtacaaggatgccaagcttcacttcctcaagatccaatatgagacattctccatgttgcctcatgagtgtgaatgacatgtatgggaggctcaatgtcattgtggatgatctcaaggggcttggggcaaactacaccgatcttgaggttgcccaaaagatgcttagggctctaccggagaagtatgagacccttgtcaccatgctcatcaactccgacatgtcaaggatgacaccggcaagcctcttggggaagatcaacaccaatgacatgtacaagttgaagaagaaggagatggaggaaacctcaccttccaagaagtgcattgctcgccaagccgaagttgaagacaagggcaatggcaaggtgaatgaagccaatgagaacttggaggaagagattgcccttcttgctagaaggttcaatgatctcttgggaaggagaaaggagagaggaaggggctccaactccaataggagaagaaatagaagacccaacaagactctctccaacttgaggtgctttgagtgtggtgagaagggacactttgctttaaagtgcccttccaaggatgatgatggagacaagtcatccaagaagaagagtggaggctacaagctcatgaaaaagctcaagaactccgcctcatccgggtccgaggaagaagatggtgatgatacaagctccaagaagaagaagatggccgttgttgccatcaaggaggctccatcactcttcgctccactttgtctcatggcaaagggctcttctaaggtaacatctcttagtgatagtgagagtgatgatgattgtgatgatgtttcctatgatgagcttgtgagtatgtttgaggagctctatgcttatagtgagaaggagattgtcaagttcaaggccctaaagaaggatcatgcttctttggaggtcttgtatgaggagctaaagacttctcatgagagactcaccatttctcatgagaagcttaaggaagctcaagacaacctcatttccactactcaacatggagctctcattgatgttggcatatcttgtgatttgcttggtgatagtgctacttgccatattgctcatgttgcatcatctagcatttctacctcttgtgatgatcttgtggatatgtctagctctagctctacctcttgtgtttctatttgtgatgcctcacttgttgttgagaacaatgagcttaaagagcaagtggctaagctcaacaagagcttggagaggtgcttcaaggataagaacactcttgacaagattttgagtgagcaacggtgcatccttaacaaggagggacttggattcattccaaagaagggtaagaaaccttctcactgtgccactcgttttgtcaagagcaatggaaggctcatgatggtagcattgttgctagatatgtgggttcccctatactcggtggtgaactaccgcaccggtgggagccattgggtgtttgatagtggatgcactcaacacatgaccggtgatagggctatgttcaccacatttgaagtaggagggaataaacaagagaaagtgacatttggagacaatagcaaaggaaaggtaattgggttaggtaaaattgctatctccaatgatttgtcaattgataatgtctctcttgttaaatctctaaatttcaatttgctttcggttgctcgaatttgtgatcttggcttgtcatgtgctttcttaccgcaagaagttattgtttctagccttcttgacaagtcttgtgtgttcaaaggttttagatatggaaatctttatttggttgatttcaattctagtgaagcaaatttgaaaacttgtttagttgcaaaaacttctttgggttggctttggcatagaaggctagcccatgttggtatgaatcaattgagcaaactttcaaaacgtgatctagttgtggacttaaaagatgtgaagtttgagaaagataagctttgtagtgcttgtcaagccggcaagcaagttgcatgttctcatcctactcagagtatcatgtccacatctagaccattggagctcttgcatatggatttgtttggcccaacaacctataagagcattggtggtaatagtcattgtcttgtgattgttgatgattattctcgctatacttgggtgttctttttgcatgataagtctattgttgccgagcttttcaaaaagtttgcaaaaagggcccaaaatgaatttagttgcactcttgtgaaaattagaagtgacaatggttccgagtttaagaataccaatatcgaggactattgtgatgatcttggttatgcctcaaatagcaaggcataccaggtctacaacaagaataaaggtattgtggaagaaaccgccgatgttcaatttgacgagactaatggctcccaagaggggcacgagaatttggatgatgtaggtgatgaaggcttgatgagagctatgaagaacatgtcaattggagatgtcaagcctattgaagtggaagacaagccatccacctccactcaagataagtcatctacttccgctacgccaagtcaagctcaagttgaagtggaggaggagaaggcacaagatccacctattccaccaagaatacacaccgctctttccaaggatcacccaattgaccaagtgttgggtgacattagtaagggtgttcaaactcgatctcgtgtcgcttcgatttgtgaacattactcgtttgtttcttgtcttgagccaaaacatgtagatgaagctctttgtgatcttgattggatgaatgctatgcatgaagagctcaacaactttgcaagaaacaaggtttggactttggttgaaagacctagagaccacaatgtcatagggacaaagtgggtctttaggaacaaacaagatgagaacgggttggtggtaagaaacaaggcaaggttggtggcacaaggtttcacacaagttgaaggtttggactttggtgaaacttttgcccccgtagcaagacttaaggctattctcatccttcttgcatttgcatcatgttttgacataaaactatttcaaatggatgtgaaaagtgcttttctaaatgatttcaaaattggaaaagttgacaccactcttttcacaaaaatcattggtgatgatttctttgtgtgccaaatttatgttgatgacatcatattcggttctactaatgaagtattttgcaaggaatttggtgatatgatgtctagggaatttgatatgtccatgattggagagttgagcttcttccttggacttcaaatcaagcaactccaggatgggacgttcgtgagccaaaccaagtacattaaggatctactcaagaggtttggcttggaggatgcgaaacccatcaagacacatatggcaaccaacgggcatctcgaccttgatgagggaggtaaaccagtagatttaaagctttatcgttctatgattgttagcttgctttaccttaccgcatctaggccagatatcatgtttagtgtttgcatgtgtgcacggtttcaagccgctcctaaggagtgtcacttagtggccgtgaaaaggattctaagatatttaaagcattcctctactattggcttgtggtacccaaaaggtgctaaatttaagcttgttggctattccgattcggattatgccggttgcaaagtggatagaaagagcacatcctgtagtttccaaatgcttggtagatcccttgtgtcatggtcatccaagaaacaaaactccgtagccctctctaccgccgaggcggaatatgtttcggcgggtagttgttgtgcccagttgctttggatgaaacaaatcttgttggattatggcatatccttcaccaaaaccccactcctatgtgacaatgatagtgccataaagatagccaataacccggtccaacattctagaaccaagcatattgacatacgccatcacttcctaagagaccatgttgccaagtgtgacatagtcattagccacataagaaccaaggatcaactagctgacatctttaccaagcctcttgatgaaacccgcttttgcaagttgaggaatgagttaattgtcatagacttctctaatgtggcttga

SEQ ID NO: 14400 - DNA, 4140 bp, Oryza sativa
  Clone ID: TFbOSC31509j.C1.o2.fg
atggcaagccgacgtcgggcaacaaccagcaatgacgaaactcagacacccgacttaaccactctggccggagttatggccacccaaactcaacttctgcaagctatcgcgaacaaccaaggcaaccgcggagggtcaagctttggagagtttatgaggaccaagccacccacattcgccacagctgaagaacctatggatgctgaagattggttaaggatcattgagaagaagctaactcttgttcgagtacgtgaggccaataaagtgatctttgcggcaaaccaattggaaggaccagccggagactggtgggacacgtacaaagaagcccgagaagaagatgctggagaaccaaactgggaggaatttaccacagccttccgtgacaacttcgtgcctgccgcggtgatgcggatgaagaagaatgagttcaggagactacggaaagggaataccacagtacaagagtacctgaaccgtttcactcagctagcgcgctacgcgactagagatcttgccgacgaggaggaaaagatcgacaaattcattgaaggcttgaatgacgagttacgcgggcccatgattggacaagatcacgatagtttccagagtttaatcaataaggtcgttaggctggagaacgaccggaaggtcgtggagcacaatcgtaaaaggaggcttgccatgaaccgctcgcctcagaccgcaccccagcgtcctaaagggacaacctcctcggcatggagaccaacagtggtgacaaccagtcgacctgccgcctccagcaatttccacaggtcggttaccattcagaaccgagctcctgcaccgaatcaggccgccactggatcagtaaggacaggaagctgtttcaactgtggagagtacgagcatttcgccaataaatgtcctcatccaaacaagacacccattcgcaccggagctaatgcaacggctattcacgggactgctacccctgctgctggacgaggtctattcaggactccgcagactaacaggaccgctaccggatttggacgcgggcaagtgaaccacgttcgagctgaagaggcccaggaagaccaaggcgtactgatgggtatgttttcactcaactccactccagttaaagttctcttcgattcaggagcatcgcattcatttatatctttgaaagcaagtcaacaacacaatttaaccagagttaaactaagacaaccaatgttagtacattcacctggggttgagatagcagtggatacagcttgcattgacgtacccatccgccttagggatgtggtatttctctacaatcttatggtgctaataccccaaactcttgatgtcattttgggtatggattggttagcaaagcatagaggaataattgactgtagacatagagaagttaccctgaccacaccctggggatcggatatgagagcaaccatggatcaagatcctaggctaaccgaacgtgccggaggtatatttaccatgctacccctaaagggaatgcccgtagtgcagcgatttcctgatgtgttcccagaagatttacctggaatgccaccagatcgtgacatagagttcattattgacctgatacccggaactgcctccatatccaagagaccatatcagatgccggtcaatgagttagaagaacttaaaaagcaaatcagggagttgcaagagaagggatttgtacgccccagttcatcaccttggggagccccagtgttatttgttaaaaagaaagacggtagcatgagaatgtgtgtagactaccgatcactgaacgaagtaactattaaaaacaagtatccactaccacggattgatgatctttttgatcaactcaacggagctaaggtgttctctaagattgaccttcggtcaggataccaccaattgaaaattagaaccggggacatacccaaaaccgcgttctcaacatgctatggattatatgagttcaccgtaatgtcgtttggtttaaccaacgctccggcatactttatgaatcttatgaacaaagtgttcatggactacttggacaaatttgtggtggtattcatcgatgatattctaatctactctaaagatgaggaagaacatgcggaacacttgcgattggtactcgagaaacttcggaagcataagttatatgcaaaattcagcaagtgtgagttctggttaaaagaagtcgcttttctaggccacgtaatctcggccggtggagtagcagtggatcctgctaaagtagaggctgtcacggaatggaaagcacccaaatctgtgactgaaattcggagttttctaggcttggctggatactaccgacggttcattgaagggttctctaagatagcccgaccaatgacacaactactcaagaaggaaaagaagtttgtgtggtcagaacagtgtcaggaaagctttgagcagctcaaagaaaagctgacctcggcacctattttagttcttcccgacatcaggaaagactttgttatatattgtgatgcttcaaggcaaggactaggaggaagacattatctaattggaaaccattgcgatatctacactgaccacaagagtctaaagtatatcttcacccagtcagatctcaacttgaggcaaaggcgatggttagaattaatcaaggactatgatttagaggttcactatcacccaggcaaagcaaacgtggtggccgaagctctgagtcgtaagagccattgcaatcatctgagaatggaagggatggtccctgagcttagggaggaaatagctcagctgaacctacatatagtacctcgtggacggataaacaccctggacattcaacctcttttgagaacccaaatagaagaagcccagaaggacaacgaggaagtccgagaggtgaaggaacgcttagctgcaggacgtgcaaaggaattttcaaccgacgaaaaagatgttctatggtataaaaagagaatttacgtacccgaacagggtggactgaggggattaattttaaaggaagctcacgaatcggcatattcattgcaccccggaagtacgaagatgtaccaagatctgaaggaaggatactggtggcccaacatgaagagagatgtggtggaatacgtagcactctgtgacgtgtgccaaaaagtgaaggctgagcatcagcgaccggcaggcttgctgcaaccccttaggattcccgaatggaaatgggatgagatagtatgtcttcatggtgtacctaagaaaattatatctgatcggggcacacagtttacctcacatttctgggagaaagtccatgaagccctaggaagttacctcgcagttagcacagcttatcatccccagacagatggccagacggagagaaccaaccaggtcctggaggacatgctgagggcttgtgctctggattttagcaaggactgggagagatgtttgccctacgccgaattctcctacaacaacagctttcaagcaagcctaaaaatgtcaaccaatgaggcattgtttggtcgacaatgtcgtaccccgctaatgtggtccgagactggagaacgggcggtatttggacctgacattattcaagaagccgaagaaaaggttcgcttgatccgtgaccgtctaaaagtagcacaatcacgacaaaagagttacgccgacacccgaagaagaaacctggaatttaaggagggagattacgtttatctaaaggtttctccgatgagggaaacaaaaaggtttaaggtcaaaggaaaactggcaccaagatatgtgggaccattccagatcatcgccaagcgaggagaagttgcatatcagttacagttaccagagaatatcgcggatgtgcacccagtcttccatgtgtctcagctaaagaaatgtttacgagtgccggaagagcaagctccgctggaagagattcacattagcaatgatctcacatatccagaacacccgatccggatattggatgaagccgaaaagaggactaggagcaaagtgtggcgtatgtacaaggtacaatggagcaatcacactgaggatgaagccacatgggaaagcgaagaattcttgaggacggagtacccgcatatattcgaaaactggtaa

SEQ ID NO: 14401 - DNA, 4293 bp, Oryza sativa
  Clone ID: TFbOSC400100j.C1.o2.fg
atggcaagccgacgtcgggcaacaaccagcaatgacgaaactcagacacccgacttaaccactctggccggagttatggccacccaaactcaacttctgcaagctatcgcgaacaaccaaggcaaccgcggagggtcaagctttggagagtttatgaggaccaagccacccacattcgccacagctgaagaacctatggatgctgaagattggttaaggatcattgagaagaagctaactcttgttcgagtacgtgaggccaataaagtgatctttgcggcaaaccaattggaaggaccagccggagactggtgggacacgtacaaagaagcccgagaagaagatgctggagaaccaaactgggaggaatttaccacagccttccgtgacaacttcgtgcctgccgcggtgatgcggatgaagaagaatgagttcaggagactacggaaagggaataccacagtacaagagtacctgaaccgtttcactcagctagcgcgctacgcgactagagatcttgccgacgaggaggaaaagatcgacaaattcattgaaggcttgaatgacgagttacgcgggcccatgattggacaagatcacgatagtttccagagtttaatcaataaggtcgttaggctggagaacgaccggaaggtcgtggagcacaatcgtaaaaggaggcttgccatgaaccgctcgcctcagaccgcaccccagcgtcctaaagggacaacctcctcggcatggagaccaacagtggtgacaaccagtcgacctgccgcctccagcaatttccacaggtcggttaccattcagaaccgagctcctgcaccgaatcaggccgccactggatcagtaaggacaggaagctgtttcaactgtggagagtacgagcatttcgccaataaatgtcctcatccaaacaagacacccattcgcaccggagctaatgcaacggctattcacgggactgctacccctgctgctggacgaggtctattcaggactccgcagactaacaggaccgctaccggatttggacgcgggcaagtgaaccacgttcgagctgaagaggcccaggaagaccaaggcgtactgatgggtatgttttcactcaactccactccagttaaagttctcttcgattcaggagcatcgcattcatttatatctttgaaagcaagtcaacaacacaatttaaccagagttaaactaagacaaccaatgttagtacattcacctggggttgagatagcagtggatacagcttgcattgacgtacccatccgccttagggatgtggtatttctctacaatcttatggtgctaataccccaaactcttgatgtcattttgggtatggattggttagcaaagcatagaggaataattgactgtagacatagagaagttaccctgaccacaccctggggatcggatatgagagcaaccatggatcaagatcctaggctaaccgaacgtgccggaggtatatttaccatgctacccctaaagggaatgcccgtagtgcagcgatttcctgatgtgttcccagaagatttacctggaatgccaccagatcgtgacatagagttcattattgacctgatacccggaactgcctccatatccaagagaccatatcagatgccggtcaatgagttagaagaacttaaaaagcaaatcagggagttgcaagagaagggatttgtacgccccagttcatcaccttggggagccccagtgttatttgttaaaaagaaagacggtagcatgagaatgtgtgtagactaccgatcactgaacgaagtaactattaaaaacaagtatccactaccacggattgatgatctttttgatcaactcaacggagctaaggtgttctctaagattgaccttcggtcaggataccaccaattgaaaattagaaccggggacatacccaaaaccgcgttctcaacatgctatggattatatgagttcaccgtaatgtcgtttggtttaaccaacgctccggcatactttatgaatcttatgaacaaagtgttcatggactacttggacaaatttgtggtggtattcatcgatgatattctaatctactctaaagatgaggaagaacatgcggaacacttgcgattggtactcgagaaacttcggaagcataagttatatgcaaaattcagcaagtgtgagttctggttaaaagaagtcgcttttctaggccacgtaatctcggccggtggagtagcagtggatcctgctaaagtagaggctgtcacggaatggaaagcacccaaatctgtgactgaaattcggagttttctaggcttggctggatactaccgacggttcattgaagggttctctaagatagcccgaccaatgacacaactactcaagaaggaaaagaagtttgtgtggtcagaacagtgtcaggaaagctttgagcagctcaaagaaaagctgacctcggcacctattttagttcttcccgacatcaggaaagactttgttatatattgtgatgcttcaaggcaaggactaggaggaagacattatctaattggaaaccattgcgatatctacactgaccacaagagtctaaagtatatcttcacccagtcagatctcaacttgaggcaaaggcgatggttagaattaatcaaggactatgatttagaggttcactatcacccaggcaaagcaaacgtggtggccgaagctctgagtcgtaagagccattgcaatcatctgagaatggaagggatggtccctgagcttagggaggaaatagctcagctgaacctacatatagtacctcgtggacggataaacaccctggacattcaacctcttttgagaacccaaatagaagaagcccagaaggacaacgaggaagtccgagaggtgaaggaacgcttagctgcaggacgtgcaaaggaattttcaaccgacgaaaaagatgttctatggtataaaaagagaatttacgtacccgaacagggtggactgaggggattaattttaaaggaagctcacgaatcggcatattcattgcaccccggaagtacgaagatgtaccaagatctgaaggaaggatactggtggcccaacatgaagagagatgtggtggaatacgtagcactctgtgacgtgtgccaaaaagtgaaggctgagcatcagcgaccggcaggcttgctgcaaccccttaggattcccgaatggaaatgggatgagataggtatggattttattgttggattgcccaaaaccgcaacaggatatgattctatttgggtgatcgtggatcgactcaccaagacggcgagattcattcccgttaagacaaattatagcagtgctaagctagccgagttatacatgaccaggatagtatgtcttcatggtgtacctaagaaaattatatctgatcggggcacacagtttacctcacatttctgggagaaagtccatgaagccctaggaagttacctcgcagttagcacagcttatcatccccagacagatggccagacggagagaaccaaccaggtcctggaggacatgctgagggcttgtgctctggattttagcaaggactgggagagatgtttgccctacgccgaattctcctacaacaacagctttcaagcaagcctaaaaatgtcaaccaatgaggcattgtttggtcgacaatgtcgtaccccgctaatgtggtccgagactggagaacgggcggtatttggacctgacattattcaagaagccgaagaaaaggttcgcttgatccgtgaccgtctaaaagtagcacaatcacgacaaaagagttacgccgacacccgaagaagaaacctggaatttaaggagggagattacgtttatctaaaggtttctccgatgagggaaacaaaaaggtttaaggtcaaaggaaaactggcaccaagatatgtgggaccattccagatcatcgccaagcgaggagaagttgcatatcagttacagttaccagagaatatcgcggatgtgcacccagtcttccatgtgtctcagctaaagaaatgtttacgagtgccggaagagcaagctccgctggaagagattcacattagcaatgatctcacatatccagaacacccgatccggatattggatgaagccgaaaagaggactaggagcaaagtgtggcgtatgtacaaggtacaatggagcaatcacactgaggatgaagccacatgggaaagcgaagaattcttgaggacggagtacccgcatatattcgaaaactggtaa

SEQ ID NO: 14402 - DNA, 4605 bp, Oryza sativa
  Clone ID: TFbOSC9141j.C1.o1.fg
atgtcggcgcacgggaacgtgtcgtggggctgtgtcttgtgggtacagttgtacacctctgatcagagtaaaactattcgaatagccgtgcccgcggttatgggcggtcgaccagattcacaatgggtagtactcagtcttgctctcttttcccctactccagagctaaagttcttctcagctggagctgtctcagaaaggtttgctgcttgtgggttagccggcggtcgatatcatgtgttagtgatggtgaagacaaggaatgatccccgtgactccaacggcgccagtggcagcgaagagcagatcaatggagcacataccagtggtgcatctagcaacattccatctccaccgcccgagaacccaatggtcattcagatgatgacaatgatgatgcaacagatgcagcaacattaccatgagatgttgcagcaggcgcagcagaaccagcagtctggtcctccaccattacatttgtccaagctgttagacttcctctatatcaagccacttactttctcaagcaccaccaacctaatggaggccaacgactggctccatgctattgagaagaaactgaaccttctgcaatgcaacgaccaagagaaggttgcttttgctacacaccagttgcaaggaaggcacagattcccgaggggatcatggcacaaaagaagagagttccgtgcactgcaacaaggaaccagaacagttacagaatacctgcatgagttcaaccgccttgtgcgctacgctcctgaggacgtgcgcaccgatgccaagaggcaggagaagtttttgtttggtctggatgatgaattgaccaaccagctgatctcaggagtttacgaggacttcaagaagcttgtggacaaggctatccatcaggaagagcaacgcaacaaaatggaccgtaaaagaaaggcagctcagttcaggactcctcaggggaacagtcagaagcctcgcttcatgacgggacagctgggtgagccttccaccctgatcgtccgtcagcaccgtccctaccactcgggtaacttcaacaacgactacaacggtggcagtcacaacagtagtgagcagcaccaccacaactcaactccacccccattaatggcaccagctgagtcagaactaccagctatgtcagcccagtcagaacagctcaagaaggagtctgcaggaaagccaggaccctgcttcaactatggcaagcacggccactttgctagcaagtgtccgaagctaaagcgtgctggacccaagttcgtccaggcccgcatcaatcatgcgtctgcagaggaggcacaagcagcaccagaggtcgtgctgggcacgtttctagtgaactcatatccggcaacagttctttttgattcgggtgcaacgcattctttcatttccaagaagtttgctgggacacatggattgtcggtagtggaacttaaaataccaatgcgggttcatacccctggaaatgacatgaacaccgcacactactgcccctcgatgactatagagatcaaaaggtcaccgtttctatccaaccttatccttcttgaatccaaagacctagatgtcattctcggaatggattggttgaccagacacaagggagtgatcgactgcgcgagtcgcaccatcaccctaaccaacgacaaaggggagaagatcaccttccgttctccagtgtcgcagaagtccgtagcaagtctgaatcaggctgctattaaggaacagacagaaatagtggagaaaagtcctaaggagttagaggatatccctatagtacaagagtatcctgaggtgtttcctgaagacctcactacaatgccaccgaagagagaaatcgagttctggattgatttggcaccgggaactgctccgatctacaagaggccttataggatggcagctaacgagctagcagaagtcaaagagcaagttgatgaacagctgcggaaaggatacatccgactgagtacttcaccttggggtgccccgattatctttgtggagaagaaagataagaccaagaggatgtgtgtcaattatcgcgcactcaatgaggtcattatcaagaacaaatatcctttgccaaggattgatgacctgtttgaccagttaaagggtgccaaagtgttttctaagatagacctacgatcaggctatcaccagttgagaattcgggaagaggatattcccaagacagccttcactactcggtatgggttgtttgagtgcacagtcatgtcttttggactcaccaatgcaccagctttcttcatgaacttgatgaacaaagtgtttatggagtttttggacaagtttgtcgtggtgttcattgacgacatacttatctattcaaagtctgaagaggaacatgagcagcacctccgtctggtactcgagaaattgaaggagcaccagttatatgcaaagttcagtaagtgtaacttctggttgtcggaagtcaagtttctgggtcacgtcattactgctcaaggtgtggcagtggatccgtcgaatgtggagtcagttactaagtggaccccaccaaagacaatttttcagatccggagttttcttggacttgcgggttattaccgtcggttcatcgaaaatttctctaagattgccagacccatgactcagttgctgaagaaagatgaaaattttaagtggtcagttgagtgcaaccaaagttttgaagaacttaagaagaagttagtatctgcaccagttctaattctgccggatcagatgaaagacttccaggtctactgtgatgcatctcgccaagggctaggatgtgttttgatgcaagaaggcagagtggtcgcatatgcttcgcggcagttgcgtccacacgagaccaattatcctactcatgatcttgagttagtagcagtggttcacgctttgaaaatgtggcggcactatcttattggcaactgctgtgaagtctacactgatcacaagagtctgaagtatatcttcactcagcctgacttgaacctccgacaacgaagatggctggaattaattatagattatgacatgagcattcactaccatccgggcaaagccaatgtggtggcagatgcattaagcaggaagagctactgcaatgctttgggcaccgaaggcatgtgtaaggaattgcagcaggagcttgaacatctcaacttgggaatcgtagaacacgggtttgtggccgctctagaggcgcggcctacgcttatggatcaagtcagagcagctcaaataaatgatcctgaaatagctgaactgaaaaagaatatgagggtcagaaaagcccgggatttcctggaagatgaacatggcacaatctggctgggagaaagattgtgcgtatgcgtacctgatgacaaagagctgaaagatctgatactcaccgaggctcatcagactcagtactccattcatccgggcagtaccaatatgtaccaagatctcaaggaaaaattttggtgggccagcatgaggagggaaatagctgaattcgtcgcactctgcgatgtttgtcagcgggtcaaggcagaacaccagaggcccgcaggtttgcttcaacctcttcagattccggaatggaaatgggaggaaattgggatggatttcttcactggtttacccagaacatcatcgggacatgactcaatctgggtagctgtggaccgtctcacaaaggtcgctcatttcattcgagtgcataccacatatacggacaaaagattagcagagctttacctctcaaggatcatgtgtttgcatggggtacccaagaagatcgtatcggatcgagggagtcagttcacttcaaagttctggcagagactacaagaagaattgggaacccgtttgaatttcagcacagcttatcacccgcaaactgatggtcagaccaagcgagtcaaccaaatattggaggatatgctgcgagcctgtgcactcgattttggcggagcttgggataaaagcctgccttatgctgaattctcttacaacaatagctaccaggccagtttgcaaatggcaccgtttgaagcattggaaagattgaggatcgctcagtctcggcagaagagttacaccgataaccgccgaagggagctcacttttgaagcaggggattatgtgtaccttcgtgttactccgctccggggagtacaccgtttccagacgaagggcaagttggcaccacgctttgtgggaccatacaaaatcttggaacgaagaggagaagtcgcgtatcagctagaactcccgtccaacatggctggtatccatgatgtgttcgatgtgtctcagttaaagaagtgcttaagagtaccagaagaacaagccaattcggagcacatcgacattcaagaagatctgacttatgtggagaagccagtccgcatccttgagaccagtgaaagaagaaccagaaacaaggttaccaggttctgcagggttcaatggagccaccactccgaggaagaagcaatatgggaaagggaagatgagttgaaggccgcccatccgcacctcttcgccagctcttccgaatctcggggtcgagattccatttaa

SEQ ID NO: 14403 - DNA, 4246 bp, Oryza sativa
  Clone ID: TFbOSC30406j.C1.o2.np
cttggtgttgaccggcggcggcgacggcacggtgtggcaggaacggtggtctgcaaagggaaaaggagggggtgctggatctacttatagaggaggacagggaggcgggcgacagctcgtcgtgcagcggattgttaaggaagatggctccgtctactatccaatactcagacgctcaaattactccgattgggcggtgttgatgcgagtcaatctccaggctcaaggtctgtgggatgctgtcgacaccggcgatgtcccgtatcaggaagattgccaggcgctttcagccatcttgcgagcggtgccggctgagatggtccggccgcttgccgagaaggacagcgccaaagacgcctgggatgcgctcaaatccatgcgagtaggcgcagatcgtgttaaggagtcccgagcacagaagctgcgccaaacttttgagtccatgcgattcaagaatggcgaacacctggaggatttcagccttcgtctccagtccttggagatgatctgtctgaagagaaggttgtttgaaaattgcttcgcgtcgttccccggaggtatcgccaaatggctctatcgattgaaaccttgattgatctcactttgctttctattgaggatctgactggccggcttctcaccgtcgacgatcaccccgactctgatggcgaggacgcgggtcaggtgctcttcagcgaaaaggaggcccctgctcactcaaacaaggaagctgggcagaactcagccggggggagggcgtccagctcacggcaaccacaccgcagcaggcgcgagcgcgacggcaacggctccgacggcaagtcaggttcgtcccaagcggcaaaccgcaatgtgtccaaggacaaatgccggtactgtggcaaacttggtcactgggccaaggactgttgcaaggcgaagcgagaccgcgagaaactggctcaggcaaaccttctcatcaccgagcctgctcaagccgcggacgaaggggagccgacactgctgatggcgcaagtgtgcgagcttgcccctgctaccgatcctgtcattactgacggggaggtgacactgaaggaggaacgtgctcacgtttctcttcaggatgaaggaaagcccgttgatctagactggatccttgacacgggcgcttcaaatcacatgacgggctaccgtgatgtgttctccgagcttcacaccaccgtgcgcggcactgtcaagtttggtgatgcgtcgagagtctggattgaaggacgaggcatggtgctgttcgcttgcaagaatggtgaccactgcgcgctcactagcgtctactacatccccaagcttcggagcaacatggtcagccttggctagcttgatgaggcgcattgcaagacggtgatcgaggatggtgttctcactttgcatgatccacagcgacagctgctgtgtagggtgcgccaaggagttgggcgcctctacgttctccacgtcgagctggcgcaaccggtttcccttctcgcaaaggggaaggatcaagcctgggtctggcacgctagatacgggcacctcaacttcgacgctctccgctcactggcgagccgcggcatggtgcgcggcattcccactctggagcgggttaccaaggtctgcgacggctgcctaataagcaagcagcgacgagcgccgttcccaacggcggcattgcatcgcgccactatccatcttgatctggtgcacggggacatctgtggacccatcacatcgtcgacacatggcagtaaaaaatacttcctacttctgattgatgatctaactcgctacatgtggttgtttctgttaacatcaaaaagcgaggctcccgctaccatcaagcggttcaaggcaggagtggaggtggagaccggctgcaagctgcgcgttctccacactgatcgaggaggggaattcacctctgtcgagttcgggctatactgcacgaacgaaggcgtcgccaggcagctaacgacgccatactctccacagcaaaacagcgtcatcgagcaccgcaaccaaacggttgtggccatggccagatgcatgatgaaggccaagaacatgccgggggagttctagggcgaggcggtcaccactgccgtctacatcctcaaccgggcgccgacaaagagcgtccgcgacaagacaccgttcgagtcatggcacggtcaaacacctgttgtgcactactttcacacatttggctgcgtcgtctacgtcaaggaggtgaaaccacacatcaagaacttgatgatcggagcaaggtgatggtctttctcggctacgagccgggttcaaaggcatatcgtatatacgacccggtggccaagcgcatcgtcgtgagccgtgacgccgtgttcgatgaggcggcatcatggccatgggcgtcacccggggaggaggacgggggaacgtctcctcaggaaaccttcaccgtgcgctacgaggtagtggcggtggacgtgccgtcccgccactccgactccatgtcgtcgccggctcacatgggaacaccagtgccatcaatctctgcgtcaccgggtgtcctagcggtggagtttgtgtcgctgcctgcggaaacacctgatgtcgacgacgacagcacagggccacgtcgtttttggatggtggccaaaatccttgacactacctcgccaattgagctcgactccgacgagcttcatgtggctgctgccgaggaaccaagcaaccacgctgaggcggcacaggacgcactctggatgcgagcgatgcaggagtaactcaagtccatcgaggagaacaacacgtggactctcgctgatctccctgctgacaagcgtcccattggcctgaaatgggtgttcaagctcaagaaggacgagacgggcgcaattgtcaagcacaaggcccgcctggtcgctaagggttacgttcagcggcaggggattgatttcgacgaagtattcgcccctgtcgccagaatggaatccgtgcggctgctactcgccattgcagctcaccttgggtcgtctgtgcatcacatgaatgtgaagtcagccttcctgaacggagagctagaggaggaggtgtacgtcgcccagccactaggcttcatcgacgacaagcacccacatcaagtcctgcgcctaaacagagcactttatggtctgcgtcaagctcctcgtgcctggaacgcgaagctggatgttagtcttcatgaactcgggttcacacggggcatcacagaacatgctgtgtacacgcgcgggaccgggaacgcgcggctaattatcggcatatacgtcgacgatctcatcatcaccggcgctcactctaaaacaattcagagtttcaaggaggagatgcactccctattccggatgagtgatcttggattactcagctactacctcggcatcgaggttcatcaaggcaacgatgggatcacaataaaccaatccacttatgcgcagaagcttttgaagatgggtggcctggcggcttcagcttccgttccaatggaacccagattgaaactgacgaagaacagcgatcgaccaagtgttgattcaaccttttatcgcggcttagtggggagtttgcggtacctggtgcattcacggccagacattgctttcgcggtgggttacgtcagccgattcatggagtcaccgcgcaatgatcatctcacggcggtgaagcacattctgcgctatgttgcaggtactatgaactatggttgcaaatttgtaaattcaggagaagagggaatccatttgctaggattttctgacagtgatttggggggagatgcgcacgatcggaagagtacctgtggtgctctcttcttcctcggctcaagcccgattgtatggcagtcccagaagcagaaagtggtcgctctttcctccagtaaagctgaatatatcgccgccactggagcagcgtgtctcggcatatggctggctcgattgctagctgaggtgctgggaagtgatccagggaaggctctcctcaaggtcgacaacaagtcggcgatctccctgtgcaagaatccggttttccatgaccggagtaaacacatcgatacaaggtaccactttatcaggcaatgcattgaggagaaaaagttgaggtggagttcgttccttcggacgaataggttgccgacattctcacgaagccactcggacgaatcaagtttcaagagtttcgcagtcaggcgggcatggatcaagctcatcaggaa

SEQ ID NO: 14404 - DNA, 1113 bp, Oryza sativa
  Clone ID: TFbOSC419957j.C1.o9.fg
atgaaggcgcaggcagctgcaacaatacgcttgagtctctcggattctgtcatgtaccaggtcatggacgaaaaatcaccgaaggaaatttgggacaagttggcaaacctgtatatgtccaagtcgctaacgagtaaattgtatctcaaacaacagctgtatggtttgcagatgcaagaggagtcagatcttaggatgcacgtggacgtcttcaatcagttgattgtggatctaagtaagttagatgtgaaactggatgatgaagacaaggccataattcttctgtgctcgcttccaccgtcttatgaacatgtggtgactaccctgacgtacggcaaggatactgtcaaaactgaggagataatttcgtcgttgcttgcacgagacttgagaagatcaaagaaaaacgaggcaatggaggcttctcaggctgagagtttgctggtcaaggcaaagcatgatcatgaagcgggggtgtcgaagagcaaggagcatgatcatgtttgctataagtgtcatgagtttggacatataaggaggaattgcccattactgaagaagaggagaagtgcgagtgcaagtttagtagcccatagtgatgattcagagagcagcagtcatgagattctcacagtgtctaacgagaagtctggagaagcgtggatgttggactcagctagttcctatcatgtgacatcgaagcgggagtggttctcttcatacaaatctggtgattttggtgctgtttacttaggtgatgacacgagttatcgtgttgttggagtgggcgatgtcaaattcaagatgtatgatggaaatgaggtgctactttcatatgtgagacacgtgctgggactaaggaagagtttgatttcgcttggaagcctacatgagacgggttggttgtatcaggtggattctgataggaagaccatgaatatcatgaaggatggcaagactgttatgactggtgagaggacaagctcatgtttgtacaagttacaagggagtgctgttgcaggtggagtcatggaaaatggttatgctggtgttgctgtgcacgatcctgaaggcggtgagcctggcgtaggctcgtcgggcgactcggcgtga

SEQ ID NO: 14405 - DNA, 4851 bp, Oryza sativa
  Clone ID: TFbOSC900379j.C1.o17.fg
atgtcgggtcaaacggggaatggcaaggatggtgataagggagctacgtttccttatgactatccctccacatctacatcttatgtgagcacctatagcggcaaagctccgtacttcaatgatacggactatgccacttggaaacataagatgaagatgcatttgaaatctattaaccctttgatttggagaatagtcgaaaaaggctatgttttgcagaatcccgaggaacccaccaaagaggacgacgagaacgagcacaagaacgctcaagccgctaatgcaattcttagcgccttgagtggaagtgagttcaaccgtgtggacggcattgagagtgccaaagtgatttgggacacgcttcggaatttgcatgaaggcacggatagtgttcgcgagtccaaggtggagattctcaaggggcaatttgagcggtttgtgatgttggatggtgagagtccaagcgacatgtatgatcgattgagcaagatcgttaatgagatcaagggacttggctccaaggacatgaccgatgaggttgtggtcaagaagatggttcgggcaatcactccaaggaactctaccttggtgaccatcattcgtgagcgtccggactacaaaactctcacacctcatgacttgctcgggcgtatccttgcccatgacatgctcgagcaagagtccaaggaggtcatccaatacatcaaccaaacctcaatcacaagcatcaagaaggaagacttggcattgaaggcgaaggaagaagaagaagagagtcgcaagagcaagagcaaggcggagatcgatgatgaagagatggctctcttcgtgaagaagttcggcaagttcatgaagcaaagcggcttcttcaagggaagttcgtccaagtattcctccaacaagtcaagtggaagacactccgcaagggtgtgctatgtgtgcaaagagcccaggcacttcattgcggattgcccccacatcaaggattgcctccacttcaaggaagacaagaagcttgagaagaaggagaagcacaagcatagcaagcatgatcgctatggccaagctcaccttgggatgatcttcggctccgactccgagtcaagctcaagtgatgaagaaggagttgccacgttcgccgtcaagccttcatcaccaccgagattcttcaactactcaagtgatgaggacgctcccatttgcctcatggcaaaggagtctaaggtaccctctcccctcaactcatttaatgttgatcttgttagtgatgaggaggaagatgttgaggatgaggttatggatgacgagttgttcaaatccataaccaaggaatctataccacacttgagtgagttgcttgggagacttgaggaccaatatgcaactcttgagaggcaagaggctttgctcattcgtgagaaaaagcgatctcatgaactcaagagtgagcttgctaaggagagagagaaaaatgaggctttggtacggctctacaagcaaaccaaagagtctcatgctaatcttgaggtggcgaacgctcaacttcaagagagagtggatggcttggacaaagcatacctctctcttgaagaaaagttcgaaaccttaaagaatagtgtctctctccctatgctttgcaaaagcaaaatgagaagcttatgtgactctttcacaatggcactacttaagtgccatatgggtagtaaggccctaaaggagtacctaggctatcaaagggacaacttcaaccatgagggtcttgggtatgttcctccaccaaaaggaaaggtggacaagagtgtgatgatcaagaggccccaaggtcttagcaattttattaaggccaaaagtatccttcctaatgattatgcttcacattgttcttttgatgcatcttatgttcttaggaagaatgctagtggtcgtgttgttgctaagtatgtaggcccgaggggcaaaaatgtttccattaagagagttctttgggtgcctaaggcacttgtcactaacatgagaggacccaagcaagaatctctctccggtggaagaagttgggtgattgatagtggatgcacaaatcacatgaccggagaagaatcaatgttttgctcccttgatctaaatggcacttcgcaagagaacatagtctttggggacaatggaaagggaaaagtaatgggattggatagggtgtgtagcgcgtgtcaagccggaaaacaaattggagctcatcacccggtcaagaacgtaatgacaactacaagaccgttggaacttctacacatggacctcttcgggccaattgcttatctaagcattggaggtaacaaatatggtctcgttattgttgatgacttttcacgcttcacgtgggtgttcttcttgcatgacaagagtgagacacaagcaatcttcaagaagtttgcaaaaagagcccaaaatgagttcgacctcaagatcaagaacattcgaagcgacaacggcaaggagttcaagaacatgtgcatcgagagtttccttgatgaagaaggcatcaagcacgagttctcggctccatattcacctcaacaaaatggagtagccgagaggaagaataggactctcatcgagatggcgaggaccatgttggatgagtacaagacatcggactgtttttgggccgaagccgtcaacaccgcatgccacgccattaaccgcctctatcttcaccgccttcttaagaagactcccgatgagcttcttaccggtaacaaaccaaatgtctcttactttcgtgttttcggtagtaagtgcgacattcttaataagaaggctaggtcctcaaagtttgctcctaaagttgatgaggggttcttgcttgggtatgggtcaaatgaatgcgcataccgcgttttcaacaaaacctccaatattgttgagatcgcgcgtgatgtgacatttgacgaaactaatggctctcaagtagagcaagttgactcacatgtgttaggtgaagaggaggaccctagcgaagcaatcaaaagattggctcttggagacgtgcgtcctagggagccacaacaaggggcctcttcctcaacacaagtggagccacctacatcaacccaagccgacaatccctccacttcaagcttggatcaaggtgaagaaggcgagcaagtgccaccctctccgataaatctagctcacccaagaatccaccaaagtatccaacgagatcaccccaccgacaacatcttaggagacatcaacaagggagtatccactcgttctcgtattgcaaatttttgtgagcattactcgtttgtgtcttctattgaacctctaagggtggaagaagctcttaatgatccagattgggtgatggcgatgcaagaggagttgaacaatttcacccagaatgaagtgtggactttggtggagcgacctcggcaaaatgtgattggcacaaagtggatctttcgcaataagcaagatgaggccggggtcgtaataaggaacaaggcgaggttagtggcgcaagggttcacccaaatcgaaggattagattttggtgaaacttttgcgccggtagctagacttgagtcaattcgcatattgcttgcttttgctactaacctcaattttaagctatatcaaatggatgttaaaagcgccttcctcaacgggcccatcaacgagttggtatacgtggagcaaccaccgggcttcgaggatccgaagtatcccaaccacgtgtacaagctccacaaggcactctacgggcttaagcaagcccctagagcttggtatgagtgttttcacaattttcttgtgaaaaacggctttgagatcgggaaagccgattcaactctttttactaaaagacatgataatgatatttttgtgtgccaaatatatgtcgatgacattatatttggttctactaacaagtcttttagtgaagagtttagtaggatgatgaccaaatgttttgagatgtccatgatgggtgaattaaagtttttcctcggccttcaaatcaagcaactcaaggaaggaaccttcatttgccaaacaaagtatttgaaggacatgctcaagaagtttggaatggagaatgcgaagccaatccacactcccatgccatcaaatggccacctcgacctcaacgagcaaggtaaagacgtcgaccaaaaggtataccgttccatcattggctcactcctttacctttgtgcatctaggcccgatattatgcttagtgtgtgcatgtgtgcaagatttcaagccgctccgaaggagtgtcaccttgtggccgtgaagagaattcttagatatttagtgcacacatctaatcttggtctttggtatcctaagggagcgaggtttgatctcatttgttatgctgatgcggattatgccgggtgcaaagtggataggaaaagcacatcgggtacttgccaattcttgggtaggtcccttgtttcttggtcttccaagaagcaaaactccgtcgccctatccaccgccgaagcggaatacatttcggcggggagttgttgtgctcaacttctttggatgaagcaaaccttgagagactatggcctcaatgtgtccaaaatcctactcctatgcgacaatgagagcgccattaagatagccaataatcccgtacaacattcccgaaccaaacatatagatattcgccaccatttcttgagagaccattccacaagaggcgacatagacatccaacatgtgagaaccgacaaacaattggcggatatcttcaccaagcctctagatgaagctaggttttgtgagttgagaagtgaactaaatatcttggattctcggaatgtggcttga

SEQ ID NO: 14406 - DNA, 2216 bp, Oryza sativa
  Clone ID: TFbOSC23942j.C1.o1.np
tcccgcgatcatcatgattattatcttgttttttgggattaaaatatgctaatttatgaccaaatttccaacattccaaaaatttgataggtcttttttggtagttggttttgtggcattactaaaaccacatgctttcgatggtccaaattataaaagatggaaagcatgtgcactattgtggttgatggctatgcaatgcttctttgcttcacggggcaagatgtccgaacaacctgtctcacctgagaaggaggctaagtttgaggtgacggattgcctgttccgtgtagcattaatcaatgtactagctgacaacatagtggacatgtatatgcacatgccttcagggaaggacatgtgggatgcacttgaggccaagttcggagtctccgatgctggcagtgagttgtatgtaatggagcagttctatgactacaacatggtcgatgactgatctgtagtggaacaagctcatgagattcagatgctggcaaaggaacttgagaacaacaaatgtgtgttgtcggataagttggtggcaggtggcattattgccaaattgccacattcgtggtcggactttgccacttctctgaaacacaagaggcaagagttcagtgttactgatttcattggctctttgggtgttggagagaaggcgagggcaaaagacaaccgcggctaaaaggtcgagggaggttctagcgccaatttggtgcagaagaagaacccccatgcatctcacaacaacaagaaagtcaaacctgatgtcaaacccaagacaacaatcaattctaagaagaaaggcaaggaaaaagtgaaaggcgactactttgtgtgcggtaagcttgggcattgggccaaggattgtcctgatcgcaaggacaaaaattctgcaaacatggttgttagcaatggcagaggaacaatggggtacggtaatttttacctacaattctctctatttttcactcacctaattggcgggttgataatggtgctaatagtcatttgtgtgctgacattttcctgttttcttcttatcagatcgccggaggttcttccttgttgatggggaacagatcgcttgcagctattcatggtgttggtatggtagttctgaagtttacttcgggaaagaccttgcagctgaagaacgtgcagcatgtcccctcaataaagagaaatctagttagcggctctcatcatgtagagatggttttatacttgtgtttaaatccaatagatgtgtcgtatctaaatatggaacttttattggttaaggttatgatagcggaggcttgttccgcttttctttagatgataggtgtaatatagttgtgaaccatgtaagcaatgatgatgagtccaatgtgtggcaatagccactttgccatgtgaattttggttgtatgacacgcttagctaacatgagtttaatctcgaaattcactttagccaagggttctaagtgtcatacttgtgttcaatcgaaacaacctcgcaagcctcacaagcatcagaggcgagaaatttagcacctttagaacttgttcattccgatatgtgtgaaatgaacgtcgtgttgactaaaggaggaaagaaatacttcatgacacttatagatgattgcactagattttgttgtgtacttattgaaaacaaatgatgaagcattgcattactttatgatctgtaaggctgaggtagaaaccaacttgaaaggaaaatcaaacagttggggtctgatcagggtggagagtatttttctaccgagtttacttcattttgcgaagagtttggaatttttcatgagaggatgcctctctattcaccccagtcaaatggggtagccgaaagaaagaaccgcactctaactgagttggtgaatgccatgttagacactgcgggactttccaaggaatggtggggtgaggcaatattgactgcttgtcatgtcctgaatagaatttctactaaaaaaagaagtaacatcattcgaggaatgggaaaagaagaagttaaatctctcatacttgcgcacatagggatgtttggctaaggtcaatgtgcctatagtcaaaaagcgcaaacttagactaaaaaccgtagattgtgtgtttcttggttatgttatccacggcgtgggatatagattcttaatagcaaattctagagtatcacagcagccagcgtagagttttctttcgtca

SEQ ID NO: 14407 - DNA, 816 bp, Oryza sativa
  Clone ID: TFbOSC419129j.C1.o1.fg
atgtccatcgtcgagcactccgcgtcgcgatcgatgagggaaggcggcgtgtcgctgccatacccgatgctcacctccaccaactactccacctgggcgatcaagatggaggccaacatggaggcgcaaggcatttgggatgccatcgagtccgcggctgatgatgtcgtggagaagaagaaggacaagatggcgttggcatgtctttttggggccgtccctgatgaggtgctgcagcagatcgccaacaagaagacggcgaaagaggcttgggagagcctaaagacaagatttcttggtgttgatcgagtgaagaaggcgcgggtgcaaactttgaagagtgaattcaaggcactatgcatgaagaaaaccgagaccatcgatgagtttgcaggcaaaatcagtggcctagcaaacgcaatgagtggtcttggtgcaaccatgacggacgatgagctcgtcaagaagctacttgactcagtgcctgaaaagtttttgcacataattgcagcgatagagcaattctgcgatttggacaccatgccatttgaggaggctattggccgcctcaaagctttcgaggagaggatacggaagcacagtgacaattatggggagcagcttcttctcaccacacgcaacactgatgatggtgctggtcgagcccgcagcaagaggtttgataaatccaaggtgatgtgctatcactgccaagagctcggtcattttgcgtttgagtgtccagcaaaaaagaagaacaaggagatagcgcttcttgccacagcatcaagtgatgatgaaccaactctcttgtga

SEQ ID NO: 14408 - DNA, 963 bp, Oryza sativa
  Clone ID: TFbOSC900350j.C1.o20.fg
atggagcaaacaacgttcatgaagaccaagctcaactgcatgtggagtgctgcgagaagtagccgaattgcaagcaagacaagaggagagattcccaacaattggtatcagagccaatttatgcccaagatcctgcgcttcaacaagatgtccatcgtcgagcactccgcgtcgcgatcgatgagggaaggcggcgtgtcgctgccatacccgatgctcacctccaccaactactccacctgggcgatcaagatggaggccaacatggaggcgcaaggcatttgggatgccatcgagtccgcggctgacgatgtcgtggagaagaagaaggacaagatggcgttggcatgtctttttggggccgtccccgatgaggtgctgcagcagatcgccaacaagaaaacggcgaaagaggcttgggagagcctaaagacaagatttcttggtgttgatcgagtgaagaaggcgcgggtgcaaactttgaagagtgaattcaaggcactatgcatgaagaaaaccgagaccatcgatgagtttgcaggcaaaatcagtggcctagcaaacgcaatgagtggtcttggtgcaaccatgacggacgatgagctcgtcaagaagctacttgactcagtgcctgaaaagtttttgcacataattgcagcgatagagcaattctgcgatttggacaccatgccatttgaggaggctattggccgcctcaaagctttcgaggagaggatacggaagcacagtgacaatgatggggagcagcttcttctcaccacacgcaacactgatgatggtgctggtcgagcccgcggcaagaggtttgataaatccaaggtgatgtgctatcactgccaagagctcggtcattttgcgtttgagtgtccagcgaaaaagaagaacaaggagatagcgcttcttgccacagcatcaagtgatgatgaaccaactctcttgtga

SEQ ID NO: 14409 - DNA, 1497 bp, Oryza sativa
  Clone ID: TFbOSC402013j.C1.o4.fg
atggacatctctaggacaaatgaaggctacacgagctgtggcccggtagtcgagatgtcatggtacagggctggtgtcctgctgctaggggctcaatcctgcctacctgtcccggaggttccggccgtaggtggggttgggtcggtactcttgtttatggctaggatgggttgggaactatgtcacgtcttccgtccgtataccgtggtgctaaaatgtggaatggttggcctgggttggcttgggacgagctgggacccagggtcgggttgccagttcggtctgaatcatcgtaggccttgggttaaggcaggccttaagtgcctttgtaataatatgtttaacagagaaaaaggaaagaatgtcagcgggtatgcctcaagtaactccagttttcaactcaatccaccactggcctcaagagagttaaccagggcacacccttggtccattccaagtatgcggcttagttcacagctaccattggttggaagtcaagaccaaaataagtatgtgtttgatcgagcatttgccacccaggccaatgagcttcccatgccagaagagcatgtccccttttgtcatgattgtagagaacaaggacactatgccctgaattgtccatgggtatatgctaaagaagccccttcctttggtttagcagggcagacatcgctaagccagcctcctcgcaccaagtcaagcttgcagcctagtgtgcaaagcagagagcccaatgaagagaatccattgaatcccgggaaatgctttctttctagcctttcgtaccacgtggggtcacacactaagcaagccaaaggcaagaagagtaagaatcagaagagaaaagcgccgatgcgaactgaagaagaagtacgtaagatgactattaccagcaccgaatggcctccagcagggataactattcctagacgtcaaagaggaaataccttccgaggtgcacgacagttgacccagcacctcctaagccatggtggcagagtatatgatagtgaagggtcagatcaagtctcctcggattatgaagatgagtctccccgacatctcggtgaggaagagatggaatcaaaagcatgcaaccgttgtggagaaattggacacattgctagcatgtgtctcacactctgccctcattgtggggaagaccatccaccaggtgaatgtcccacccgcaaggtcacatgttttctgtgcgaagcaccaaccattctctgcaccgacagcctcagcaaagaattgtcatcgatggaagaagttgtgtctctccccgacctactccaggccgagcaaagggcaatcaatctcaggagggcgataccaagcagaagaccgttctctgcttcgaatagcaatcagaaggaagcttctcctgtgaatgatagcaatatgcagtcctatcacatcatcacagaaccaatcaaggatgcagtcactagaacaatgccagctatacctctccagaatcagaatgagtag

SEQ ID NO: 14410 - DNA, 1248 bp, Oryza sativa
  Clone ID: TFbOSC402037j.C1.o4.fg
atgtcatggcacagggccggtgtcctgctgctagggggctcaatcctgcctgcctgtcccgggggttccggccgtaggtggggttggatgtttaacagagaaaaaggaaagaatgtcagcgggtatgcctcaagtaactccagttttcaactcaatccaccactggcctcaagagagttaaccagggcacacccttggtccattccaagtatgcggcttagttcacagctaccattggttggaagtcaagaccaaaataagtatgtgtttgatcgagcatttgccacccaggccaatgagcttcccatgccagaagagcatgtccccttttgtcatgattgtagagaacaaggacactatgccctgaattgtccatgggtatatgctaaagaagccccttcctttggtttagcagggcagacatcgctaagccagcctcctcgcaccaagtcaagcttgcagcctagtgtgcaaagcagagagcccaatgaagagaatccattgaatcccgggaattgctttctttctagcctttcgtaccacgtggggtcacacactaagcaagccaaaggcaagaagagtaagaatcagaagagaaaagcgccgatgcgaactgaagaagaagtacgtaagatgactattaccagcaccgaatggcctccagcagggataactattcctagacgtcaaagaggaaataccttccgaggtgcacgacagttgacccagcacctcctaagccatggtggcagagtatatgatagtgaagggtcagatcaagtctcctcggattatgaagatgagtctccccgacatctcggtgaggaagagatggaatcaaaagcatgcaaccgttgtggagaaattggacacattgctagcatgtgtctcacactctgccctcattgtggggaagaccatccaccaggtgaatgtcccacccgcaaggtcacatgttttctgtgcgaagcaccaaccattctctgcaccgacagcctcagcaaagaattgtcatcgatggaagaagttgtgtctctccccgacctactccaggccgagcaaagggcaatcaatctcaggagggcgataccaagcagaagaccgttctctgcttcgaatagcaatcagaaggaagcttctcctgtgaatgatagcaatatgcagtcctatcacatcatcacagaaccaatcaaggatgcagtcactagaacaatgccagctatacctctccagaatcagaatgagtag

SEQ ID NO: 14411 - DNA, 942 bp, Oryza sativa
  Clone ID: TFbOSC858j.C1.o1.fg
atgccagaagagcatgtccccttttgtcatgattgtagagaacaaggacactatgccctgaattgtccatgggtatatgctaaagaagccccttcctttggtttagcagggcagacatcgctaagccagcctcctcgcaccaagtcaagcttgcagcctagtgtgcaaagcagagagcccaatgaagagaatccattgaatcccgggaattgctttcttcctagcctttcgtaccacgtggggtcacacactaagcaagccaaaggcaagaagagtaagaatcagaagagaaaagcgccgatgcgaactgaagaagaagtacgtaagatgactattaccagcaccgaatggcctccagcagggataactattcctagacgtcaaagaggaaataccttccgaggtgcacgacagttgacccagcacctcctaagccatggtggcagagtatatgatagtgaagggtcagatcaagtctcctcggattatgaagatgagtctccccgacatctcggtgaggaagagatggaatcaaaagcatgcaaccgttgtggagaaattggacacattgctagcatgtgtctcacactctgccctcattgtgaggaagaccatccaccaggtgaatgtcccacccgcaaggtcacatgttttctgtgcgaagcaccaaccattctctgcaccgatagcctcagcaaagaattgtcatcgatggaagaagctgtgtctctccccgacctactccaggccgagcaaagggcaatcaatctcaggagggcgataccaagcagaagaccgttctctgcttcaaatagcaatcagaaggaagcttctcctgtgaatgatagcaatatgcagtcctatcacatcatcacagaaccaatcaaggatgcagtcactagaacaatgccagctatacctctccagaatcagaatgagtag

SEQ ID NO: 14412 - DNA, 4572 bp, Oryza sativa
  Clone ID: TFbOSC900038j.C1.o7.np
gtgaagacaaggaatggttcacgtgactctagcaatgtcagtggcagcgaagagcagattagtggagcacgtgccaacagtgcatctgacaacagtccatctccaccgcccgagaacccaacgatcgctcaggtgttggacaatcagactcagatgatgtcaatgatgatgcaacagatgcaacaacagtaccatcaggtgttgcagcaggtgcagcagcaagcacaacagcagcagcagaacctgcagtttggtcttccacctcctcaatccaaactgttagaatttctccatgtcaaactgcccactttctcaagtaccaccaacccaatcgagaccaacgactggcttcatgctattgagaagaagctgaaccttttgcaatgcaacgaccaagagaaggttgcttttgctacacactagctgcaaggtcccgcttctgtttggtgggacaactacgtggggacccgtccagctaggacagaggttacctgggcagagttttgtcagagtttcaataaagcacaggttcccgagggaattgtggcaccaaagaagagagagttccgttccttgcaacaaggaaccagaacagttatagagtatttgcatgagttcaatcgcctcgcgcgctacgctcctgaggacgtgcgcactgatgccgagaggcaggagaagtttttgtcgggtcttgatgatgaattgaccaaccagttgatctcccgagattatgaggactttcagaagttggtagacaaagctatccgtcaggaggagcagggtaacaaaatgaaccgaaaaaggaaggcatcttagttcagaacttcccaggggaacagtcagaagcctcgcttcacgatgggacatcagggtggaccttccaccatgattatccggcaccatcgtccttaccacccggacaatttcaacagcatcaacaacagtggcagtcacagaaatagtgagcagcacagcctcaaccctactccaagtccactaatgattccagctcagtcagttcagtcagctcagcaagaacagcccaaaaagtttggagaaaagcccgaactctgcttcaattgtaacgagcctagacacatggtacgtatgtgcccgaagccaagacgtgccagactcaagttcgttcaggcccgtgtcaatcatgcatctgcagaggaggcgcagtcagcaccagaggttatattgggcacattccccgtcaactcgacaccggcagtaatattgtttgattctggtgcaactcattccttcatttccaagcgttttgctggtgcgcatgggttatctttagtgaagcttaagataccaatgcgagttcatactcctggaggtggcatgaccacaactcactactgcccatcaatgacagttgaaattcaagggttgatttttccagccaacctcattcttcttgagtccaaggaccttgatgtcattcttggaatggattggttgacacggtacagaggagtgattgattgtgctagccgcaccatcaagttaaccaatgcgaaaggagaagtggtaaccttccagtctccagtgccgcagaagccagggatcagtttaaaccaggctgctggtgaagaacaagaggtagcagtggagaaaaccactaagaagttggaggatattcctatagtcagagagtatccagaggtttttccggatgatctgacaacaatgccaccaaaaagggatatcgagttccggattgacttggtacctagaactgcaccgatccacaagaggccttacagaatgagagccaacgagttggcggaagtcaagaaccaagttgatgaacagttacagaagggatacattcgcccgagcacgtcgccttggggtgctctagttatctttgtggaaaagaaagataaaaccaaaaggatgtgcgtcgactaccgcgcactcaatgaggtcactattaagaacaagtatccgttgccaagaattgatgatctgtttgatcagttgaaaggagctactgtgttctctaagatagacctacgatcaggctatcaccagttgaggatccgcgaagaggatattccaaagacagcattcatcgctcggtaagggttgttcgaatgcacagttatgtctttcggactcactaatgcacctgctttcttcatgaatttgatgaacaaggtgtttatggaatttctagacaagtttgtcgtggttttcatcgatgacatacttatctactccaagtccgaggaagagcatgagcagcatctccgactagtacttgaaaagttaaaagagcaccagctatatgccaagttcagcaagtgtgacttttggcttaaggaagttcagtttctcggtcacatcgtgaatgctcaaggagtagctgtggatccagcaaatgtggagtcagttaccaaatggaccccaccaaggacagtcactcaggttcagagtttcttatgacttgcgggctattaccgccgtttcattgagaacttctctaaaattgctaagccaatgacacagctattgaagaaggaagaaaaatttatctggtctgctgaatgcaataggagttttgaagaactcaaacgacggttggtgtctgcaccagtcttaatcctgcctgatcagacgaaagttttacaggtctattgtgatgcatctcgtcaggggctaggatgtgtgttgatgcaggatggcaaagtggtttcttatgcttcatggcagttgcgtcctcatgaaggcaactacccgacgcatgatctggaattggccgcagttgttcatgctttaaagatttggtggcactatctcatcggtaaccgttgtgaggtatatacagatcacaaaagtctaaagtacatcttcactcaacctgatttgaatctcagacagcgaagatggttagagctaatcaacgattatgatatgggaatacattatcatcccggcaaggctaatgtggttgcagatgccttgagcaggaagagctactgcaatgttgcatgggtagagcaactatgttgtgaggttcaatgtgatttggaacatctgaaccttggtatagttgagcacggattcgtggctgccctagaggcacaacccacactggtggagcaggttcgcatagctcaagcaagtgaccctaaaatagcagagctcaaaaagaacatgagagttggaaaagcccgaggttttgttgaggatgaacaaggaacaatctggatgggggaaagattgtgtgtacctgaaaacaaggagttaaaggacttgataatgacagaagctcatcaaactcagtattccattcatcctggcagtaccaagatgtaccaagacctcaaagaaaaattctggtgggtcaacatgagaagggaaatagctgaattcgtcgcactctgtgacgtttgccagcgagtaaaggcagaacaccaaaggccagcaggtttgctacagccacttcagattccagaatggaagtgggaagaaatcggaatggatttcattacgggtttgcccaggacgtcatcggggcatgattctatttgggtagttgttgatcgactcactaaagtggctcactgcattccggtgcatactacctactcagggaagaggttagcagaactttatctgacaagaatcatgtgtttacatggggtacctaagaagatagtgtctgatcgagggagccaattcacttcaaagttctagcagaaattacaagaggaattgggaacccttctgaacttcagcactgcttaccatccacaaacagatggctagaccgagcgagtcaatcaattactagaggatatgttgagagcctgtacgcttgactttggtggagcatgggacaaaagcttgccgtatgctgaattctcttacaataacagttaccaagctagtctgcagatggcaccgtttgaagcactgtatggatggaggtgtcgtactctgctcttctgggatcagacaggggaacgccagttgtttggtacataagttttaaatgaggcagaagagaaagtcagagctgtcagggaaagattgagaatcgcacaatgtcgacaaaaaagctatgtagacaaccgccgaagagagctcattttcgaaacagaggattatgtgtatctccgtgtcactccgctcaggggagtacatcacttccaaaccaaaggaaagttggcaccacgctttgtgggaccatacaggatcttggaacgtagaggtgaagttgcttaccagcttgagcttccctccaacatgcttggcatccacaatgtgttccacgtctctcagttgaagaaatgtttgagagttcctgaggaacaggcaagtccggatcaaatcgaaatccaaaaagacttgacgtatgtggagaagccgactcgtatcctcgaaactagcgagagaaggaccagaaacaaagtaatcagattctgcaaggttcagtggagtcatcactcagaagaagaggccacctaggaaagagaaaatgagttaaagaccgcccatccgcacctcttcaccaattcttccgaatctcggggtcgagattccgtt

SEQ ID NO: 14413 - DNA, 2442 bp, Oryza sativa
  Clone ID: TFbOSC400433j.C1.o8.gm
atggaccttgcactccaggaattagctcgtcgaatattttgtggagtccagatcgcatttcaagagtggcctgaatcgagatttgggtccctgccgcatgcctcggcggtcgatagggcctctgtgccatgtgccatctcctgctccccatctctgccccttccacgctggctgtcctcgcctcctcctgatgttttcgtccgtccggacctttgcactgcccacctgcttctccccgaccccattctgtgcgcaaggtgcctccgaagctccgtccgcttgagaacctgcacgggtaggcgggcgatcaagtttttgggtagcgcttcaagcgcgactgctctcgttcttcgcggctactgctgctacatcggcgccttcaccaagatgtcaacggagattggagacaagaagatgaacgacatcaacggaggcaatactgcctcaaaatctagcggtgggacgttctcgggtgtgctcgccgacaatattgtggacgtgtatatgcacatgccttcagggaaggacatgtgggatgctcttaaggccaagttcggggctcatgagattcagatgttggcaaaggaacttgagaacaacaactgtgagttgccggacaagtttgtggcaggtgtcattattgccaaattgccaccttcttggacggactttggtacttctctaaaacacaagaggcaagagttcagtgttactgatcttattggctctttgggtgttgaggagaaggcgagggcaaaggacaaccggggcaaaaagatcgagggaggttctagcgccaatttggtgcagaagaagaaccctcacgcatcccacaacaacaacaagaaagtcaaacctgacgtcaaacccaaggctacaaccaattttaagaagaaaggcaagggaaaggcaaaaggaggttgctttgtgtgtggcaagtctgggtattgggccaaggattgtcctgagcgcaaggacaagaagtctggaaacatggttattagtgagggcggaggaacatcgaggtatggatgcaaatgggttttcaaggaaaagcttaggcctgatggtacaattgaaaagtacaaggcaaggcttgtggccaagggttatacccaaaaagaaggcgaggactttttcgacacttattcatcggttgctcgcttgaccacgattcgagtactacttgctctggcagcctctcatggtctactcgtccatcagatggatgttaagacagctttcctcaatggagagttggatgaggagatctatatggatcaaccagatgggtatgtactagaaggtcagaagggaatggtgtgcaagctgttgaagtccttgtatggtctcaaacaagcgcctaagcaatggcatgagaagtttgacaatacacttacatctgctggctttgttgtgaacgaagctgataaatgtgtatactatcgctatggtgggggagagggagtgatcttgtgtttatatgttgatgacatattgatctttgagaccagcctcaatgtgattgaggaggtcaaggactttctgtccaaaagctttgaaatgaaggattttgactgcaaggcagctcctactccttatgatcccagtgtgctattaaggaaaaaccgaagaatagcaagggatcaattgagatactctaagatcattggttcattgatgtacttagctagtgcaacgaggcctgacatctcatttgctgtgaacaagttgggccggtttgtttcaaatccgggagatgatcattggcatgctcttgaaagagtaatgcgctatctaaaagggataatgagctatgaaattcactacgtcgggtacccaaaagtgctggagggctatagtgagtcaaactggatatttgatgctgatgagataaaggccacaagtgggtatgtgttcacacttggagggggcgctgtttcctggaagtcttgcaagcagaccatcttaacgaggtcaacaatggaagcagaactcacagctttagatactgccacagttaaggccgaatggcttcgtgagctcctgatggacttgccggtggttgaaaaaccagtaccagcaatcctgatgaattgtgataatcaaacagtgattattaaagtgaacagttcgaaggacaacatgaagtcatccaggcatgttaaaagaagactgaagtgcctccgaagctccgtccgcttgagaacctgcacgggtaggcgggcgatcaagtttttgggtagcgcttcaagcgcgactgctctcgttcttcgcggctactgctgctacatcggcgccttcaccaagatgtcaacggagattggagacaagaagatgaacgacatcaacggaggcaatactgcctcaaaatccagcgggatggggggtgccaggcccaccccggcacccccgggtggcttcgccactggaggtggatga

SEQ ID NO: 14414 - DNA, 3012 bp, Oryza sativa
  Clone ID: TFbOSC15301j.C1.o1.fg
atggctggttttgccgatgcactgaggccggataaatttaccggtatgcactttaagagatggcagatcagggtcactctgtggctgacagctatgaaatgcttctgggtaagtactggcaagcctatgggcgttcttaatgctgatcagcagaaagaattcgatgaggccactactctctttgtgggatgcattcttagcgtgcttggcgatcgtcttgtcgagaacaagagcaaggggaaatacaaagctcagcagaccaccaacttcaagaagaagaagaacaataacaatcctaatcaggatgagaggacttgctttgtgtgtggtcaacctggctatctggcaagaaagtgtccacaacacaaggggatgaaggcacctgcagggcagacctctaagtctgccaatgtgaccattggcaacactggagatggaagcgggtatggggccaatatacatgtttgtgctgacatctcattgttttcttcttatcaggccgcacggggttccaccgtcctaatggggaatgggtcacatgattctatcgacaggaatcttgttagtggctcccgtctgactagagacggatttaagttggtttttgagtctaataaagtagtcgtgtctaaacatggatattttattggtaaaggttatgagtgcggaggcctgttctgcttttccctttttgatttctgcaataagtctgtgaaccatatttctggcagtgtggatgatgaggctaatggtggaaaacgatatttcatgacgttgattgatgatgctactagattttgctatgtgtacttgttgaaaacgaaagacgaggctctagactattttaaaatttataaggcagaagttgaaaatcaacttgacagaaagataaaaagactttggtctgatcgtggtggagagtttttctcaaacgagtttgacttattctgtaaggaacatggcattatacatgagaggacgcctccctattctcccgagtctaatgggattgctgaaaggaagaaccgcacactgaccgacttggtgaatgccatgttggacactgcgggactacctaaggcatggtggggggaggcattgttgacctcgaatcatgtgttaaacagagttcctaacagaaataaggacaaaacaccatatgagatatggattgggagaaaaccatcactttcttacttgcgcacatggggttgcttggcgaaaatcaatgtaccaataacgaagaagcgcaaacttggacctaagactatggactgtgtctttctgggatatgctcaccacagcattgcctatagatttttaatagttaaatctgaggtacctgacatgcatgttggtacaattatggagtctcgtgatgctatcttctttgagagctttttcccaatgaaggatacacatagtagttctagccaaccctctgaaataattcccagttcaatcacaccaccagaacaaactgaatatacacatgaatatgtcactaaggatgatgacagtgaagctcctcgaaggagcaaaagacaaaggatggctaagtcttttggtgatgatttcactgtgtacctcgtggatgacactcctaagtcaatttcagaagcatacgcatctcctgatgcagactactggaaggaggctgtccgtagtgaaatggattccattatcgctaacgggacttgggaggtgacagagcgaccctatgggtgtaaacctgtggggtgcaagtgggtgttcaagaagaagctcaggcctgacgcctcacatggtcttctcgttcatcaaatggacgttaagacaacttttcttaatggagagctggatgaggacatctatatgaatcaacctgatgggtttgtagttgaaggtcaagaaggcaaagtgtgcaaattgttgaagtctttgtatggtctgaaacaagctcctaagcaatggcatgagaaatttgacaaaacattgacatctgcaggctttgcagtcaatgaggtagataaatgtgtgtactatcaccatggtgggggtgagggagttattccgtgcttgtatgttgatgacatactgatatttgggacaaaccttgaggtgataaatgaggttaaatcattcttgtctcaaaattttgatatgaaggatttgggagtagctgatgttatcttaaacatgaagctaattagaagtgagaatgggattacactcttgcagtcccattatgtggagaagatcttgaatcgctttggctacattgataataagccttctccaacaccttatgatcctagtttgttgcttcgcaagaacaagagaattgctaggaatcaactgcaatactcccaaatcattggctcattgatgtacctggctagtgcaactaggcctgatatctcctttgctatgagcaagttgagccggtttacctctaatccaggagatgatcactggcgtgcgcttgagcgagtaatgcgctatctgaaaggtactatggaattggggtttcactattctgggtatcctacggtactggagggatatagtgattctaactggatctctgatatggatgagatcaaagccactagtggatatgtcttcacactgggtggtggtgctgtttcctggaggtcttgcaatcagactattttgacgaggtcaaccatggaagcagaactgacggcactggatactgctactgttgaggcagaatggctgcgtgatctattaatggatctgcctattgttgaaaaaccggtgccggctatccttatgaactgtgacaatcaaacggtaattctcaaagtgaatagttccaaggataatatgaaatcatctagacatgtgaaaagacaagtgaagtctgtcaggaaattgagaaactccggagttataacgttggattacatccaaacagctagaaacctggcagatcccttcacgaagggactatcacgaaatgtgatagataatgcatcgaaggagatgggtttgagacccatgtga

SEQ ID NO: 14415 - DNA, 2991 bp, Oryza sativa
  Clone ID: TFbOSC379j.C1.o2.fg
atggctcccgccaatcctcgccaccgcctcatcgccccgatccacgccgccgccgccgccggaggaggaggaggaggcgcgggcgccacctctccctcgggcctacccagcctcgtcgggatcgcgcacctgctggtgtcgctggggatcgtgctggcctccgacaagttcctgaagcaggcgttcgcggcggcgtccatcaagttccccagcgccctcttcggcatgttctgcgtcttctccgtcctcgtcgtcctcgacgccttcgcgcccgcgctcgccaaggggttcatggacttcttcgagccggccaccctcttcatccagaggtggctgcccctcttctacgtcccttccctggtcgtcctgccgctcgccgtcagggacgtcccggctgcttccggcctcaagatcttcctcatcatttttggtggctggtttgcttcactcatggtggccggatacacagcactcaccgtgaggaagattgtccagacacagcttataccagctgagccgatgagcaagccgtctccgttcgcgacgctggaattctgggcctggggtgctgtctttgtcgcatcgtttgctgttgcgtatgttaaccccacagcgcttggcaccacggcaagaacatgtcttcctttcctcctcgcttcaactgtactgggatacatggttggttctgggataccatctggtgtcaagaaagtgcttcacccaatcatttgttgtgcactctctgcagatttggcagcaatagcatatgggtatctctcccggtctggagttgatgcagtgctaggtgattacctcacaaaggcgccatctaatcctggagctggtgacgtcctgatgggatttcttggttcagtcatcatatcgtttgcattctcaatgttcaagcagagaaagcttgtgaagaggcatgcagcggaaattttcacatcaattgccatcgcatcaacattctcgttatactcaactgccatcctaggacgggtgatagggctagagccttcactgaccatatcaatattaccgaggtgcataaccgtggcgttggctctgagcatcgtgtctttctttgaaggtgtaaattcttcgctaaccgctgcggtcgtcgtcctcaccgggctgatcggcgcaaattttgtgcaagcagccatggacaagcttggcctcaacgaccccatcgcgcgaggaatagggacggcttccagtgctcatggactgggaacagcagcgctgtcggccaaggagcctgaagcgctgcccttctgcgccatcgcttacggcctgacggggatcttcgaaaacatgaatacacctagaagggaaaatgctaaagctatcttcacgaaatctaagacaaactatgaagtccaagggaagagccaagcgcgcacggcgaggacgagtgcggggacgggcggtcggcaggaggctgcaccgcgtcagcaagaagcctttggctgggaagaagcctctgctgctaaggtggattcagacgaggatgacgcggcggaagagtgcgacgatggtgcggtggtgctcggcggcgttgagcgagaggtagcaggcgaggaggtcctgcaggtcctccagccaccagacgccattggtgcacagcatcttgatcatgctgtccaccagcttgatgaggacatcctctactattacccactggcaaagacgcaaaagtcgagcgctaaccttagtgtgcctaagaactgtttgagtccaggcaaccttaatttgttgggcctcggccaaccccacctaggccggattgttatcattttggtggagatgcggggtattcttgaatacaaagaatacaataccgtgaatagattattccaatttgcttgcaaagctgaaagagaagtgcagggacgcaacaagcataggagttcttttgcaggtgctacttccacacgacaatcaacaccacgtcaatttactacggccgttcgtccacctacctccacgccatcccatgctcaagaaacaagcaaaaatgcttcagttcagactccagccaagagtgcaacttcggtagcttccactggacgtacccgtgatattacatgtcataggtgccatggcattggacacattgcccgcgactatccaaatcagcgagctctatttgtgaatgatgatggtgagtatacttctactagtgattgtgatgatgaatatgctttagttgccactgaccatgtaggaggacaagataacgatgacatcgaggaagtccatttgcatccagagtcgctagatcagtatcctagcctaattgtcaagctagcacttagtgctaaagagaagtgtgaagagcaaaaccaacgccacaatttattccaaagcaaagttcttgtgaaaggccataccgtcaaagtgattattgatagcgggagttgcaacaatttagcaagtgaagagatggtcaagaagcttggcttgactacccatccacatccacatccgtatcatattcagtggtttaatacatgtggtaagatgaaggaatatgagggtgcttttcatgatgagatacctccaaggatgacccctggacgacagagtgaacacgatcaagaagatgggattgagtcgaggacgactccaattcaagaaggggaggatgatgaggacatcacttcgtcggaaacgcacataacttcacacgttccaatgataattccaagtccaagtccatttcggcctccggagacagcactgacttcaaacggacctagcgccttcttgccaactccgatttgggtgatcttggactttgtggaaagctatctcgctacctttcaaacgcattcggtctcatgtccaaattcatctcgagtcaacgggaatcaccaaaacaagacagtgatgttgctcaaaccgaacttgggtcttgggccttgtaatagactaggcccatctcggaagtgtctccctccacctccacgaattagcacttaa

SEQ ID NO: 14416 - DNA, 3066 bp, Oryza sativa
  Clone ID: TFbOSC400758j.C1.o37.fg
atgccgacgcaacccctcctcctcctcctcctcctcccgccaagcggcggcaatctccatggctcccgccaatcctcgccaccgcctcatcgccccgatccacgccgccgccgccgccggaggaggaggaggaggcgcgggcgccacctctccctcgggcctacccagcgtgagtcgtcaatcagtcaaaatgcacgcagcctcgtcgcgatttcgcatgacctgccgatcgaactgacatgcttcctgaagcaggcgttcgcggcggcgtccatcaagttccccagcgccctcttcggcatgttctgcgtcttctccgtcctcgtcgtcctcgacgccttcgcgcccgcgctcgccaaggggttcatggacttcttcgagccggccaccctcttcatccagaggtggctgcccctcttctacgtcccttccctggtcgtcctgccgctcgccgtcagggacgtcccggctgcttccggcctcaagatcttcctcatcatttttggtggctggtttgcttcactcatggtggccggatacacagcactcaccgtgaggaagattgtccagacacagcttataccagctgagccgatgagcaagccgtctccgttcgcgacgctggaattctgggcctggggtgctgtctttgtcgcatcgtttgctgttgcgtatgttaaccccacagcgcttggcaccacggcaagaacatgtcttcctttcctcctcgcttcaactgtactgggatacatggttggttctgggataccatctggtgtcaagaaagtgcttcacccaatcatttgttgtgcactctctgcagatttggcagcaatagcatatgggtatctctcccggtctggagttgatgcagtgctaggtgattacctcacaaaggcgccatctaatcctggagctggtgacgtcctgatgggatttcttggttcagtcatcatatcgtttgcattctcaatgttcaagcagagaaagcttgtgaagaggcatgcagcggaaattttcacatcaattgccatcgcatcaacattctcgttatactcaactgccatcctaggacgggtgatagggctagagccttcactgaccatatcaatattaccgaggtgcataaccgtggcgttggctctgagcatcgtgtctttctttgaaggtgtaaattcttcgctaaccgctgcggtcgtcgtcctcaccgggctgatcggcgcaaattttgtgcaagcagccatggacaagcttggcctcaacgaccccatcgcgcgaggaatagggacggcttccagtgctcatggactgggaacagcagcgctgtcggccaaggagcctgaagcgctgcccttctgcgccatcgcttacggcctgacggggatcttcgaaaacatgaatacacctagaagggaaaatgctaaagctatcttcacgaaatctaagacaaactatgaagtccaagggaagagccaagcgcgcacggcgaggacgagtgcggggacgggcggtcggcaggaggctgcaccgcgtcagcaagaagcctttggctgggaagaagcctctgctgctaaggtggattcagacgaggatgacgcggcggaagagtgcgacgatggtgcggtggtgctcggcggcgttgagcgagaggtagcaggcgaggaggtcctgcaggtcctccagccaccagacgccattggtgcacagcatcttgatcatgctgtccaccagcttgatgaggacatcctctactattacccactggcaaagacgcaaaagtcgagcgctaaccttagtgtgcctaagaactgtttgagtccaggcaaccttaatttgttgggcctcggccaaccccacctaggccggattgttatcattttggtggagatgcggggtattcttgaatacaaagaatacaataccgtgaatagattattccaatttgcttgcaaagctgaaagagaagtgcagggacgcaacaagcataggagttcttttgcaggtgctacttccacacgacaatcaacaccacgtcaatttactacggccgttcgtccacctacctccacgccatcccatgctcaagaaacaagcaaaaatgcttcagttcagactccagccaagagtgcaacttcggtagcttccactggacgtacccgtgatattacatgtcataggtgccatggcattggacacattgcccgcgactatccaaatcagcgagctctatttgtgaatgatgatggtgagtatacttctactagtgattgtgatgatgaatatgctttagttgccactgaccatgtaggaggacaagataacgatgacatcgaggaagtccatttgcatccagagtcgctagatcagtatcctagcctaattgtcaagctagcacttagtgctaaagagaagtgtgaagagcaaaaccaacgccacaatttattccaaagcaaagttcttgtgaaaggccataccgtcaaagtgattattgatagcgggagttgcaacaatttagcaagtgaagagatggtcaagaagcttggcttgactacccatccacatccacatccgtatcatattcagtggtttaatacatgtggtaagatgaaggaatatgagggtgcttttcatgatgagatacctccaaggatgacccctggacgacagagtgaacacgatcaagaagatgggattgagtcgaggacgactccaattcaagaaggggaggatgatgaggacatcacttcgtcggaaacgcacataacttcacacgttccaatgataattccaagtccaagtccatttcggcctccggagacagcactgacttcaaacggacctagcgccttcttgccaactccgatttgggtgatcttggactttgtggaaagctatctcgctacctttcaaacgcattcggtctcatgtccaaattcatctcgagtcaacgggaatcaccaaaacaagacagtgatgttgctcaaaccgaacttgggtcttgggccttgtaatagactaggcccatctcggaagtgtctccctccacctccacgaattagcacttaa

SEQ ID NO: 14417 - DNA, 3918 bp, Oryza sativa
  Clone ID: TFbOSC422113j.C1.o1.np
atggctggttttgccgatgcactgaggccggataaatttaccggtgtgcactttaagagatggcagatcagggtcactctgtggctgacagctatgaaatgcttctgggtgagtactgacaagcctatgggcgttcttaatgctgaccagcagaaagaattcgatgaggccactactctctttgtgggatgcattcttagcgtgcttggcgatcgtctggtcgaggtgtatatgcatatgaccgacgctaaggagttgtgagatgcactgaatactaaattcggtgctactgatgctagcaatgatctgtatatcatggagcagtttcatgactacaagatggctgacaaccgttctgtagtcgaacaggctcatgagatacaaaccacggctaaggaactcgaactccttaagtgtgtcttacccgacaaatttgtggctgggtgcactattgcgaaactaactccatcttggagaggtttcggtactgcactcaaacacaagagacaggaatactccgttgaggggttgatagcgtctcttgatgttgaggagaaagctcgggaaaaagatgccgcgtctaagggcgatggtgggcagtccactgccaatgttgtgcacaaggcccagaacaagagcaaggggaaatacaaagctcagcagaccaccaacttcaagaagaagaacaataacaacaatcctaatcaggatgagaggacttgctttgtgtgtggtcaacctggctatctggccaggaagtgtccacaacgcaaggggatgaaggcacctgcagggcagacctctaagtctgctaatgtgaccattggcaacactggagatggaagcgggtatggtaatttacctactgttttttcagttaaccagtctactaattggtgggttgatacaggggccaatgcacatgtttgtgctgacatctcattgttttcttcttaggtcgcacggggttccaccgtcctaatggggaataggtcacatgcttttgttcatggtgttggcacggtagatctgaagtttacttcgggaaagatcgtgcagctgaagaatgtgcagcatgtcccttctatcgacaggaatcttgttagtggctcccgtctgactagagacagatttaagttggtttttgagtctataaagtagtcgtgtctaaacatggatattttattggcaaaggttatgagtgcggaggcctgttctgcttttccctttctgatttctgcaataagtctatgaaccatatttgtggcagtgtggatgatgaggctaatgtatggcactcacgtttatgtcatattaattttggcttgatgtctcggctttccagcatgtgtttaattcctaagttttccattgtcaaaggttctaagtgccatagttgtgtgcaatcaaagcaacctcgcaagcctcacaaggctgctgaggagagaaacttggcacctctagaactcctacattcagatctctgtgaaatgaatagggtgttgacgaagggtgaaaaacgatatttcatgacgttgattgatgatgctactagattttgctatgtgtacttgttgaaaacgaaagacgaggctctagactattttaaaatttataaggcagaagttgaaaatcaacttgacagaaagaaaaaaaagacttaggtctgatcgtgatgtagagtttttctgaaacgagtttgacttattctgtgaggaacatgacattatacatgagaggacgcctccctattctcccgagtctaatgggtttgctgaaagcgagaaccgcacactgaccgacttggtgaatgccatgttggacaccgcgggactacctaaggcatggtggggggaggcattgttgacctcgaatcatgtgttaaacagagttcctaacagaaataaggacaaaacaccatataagatatggattgggagaaaaccatcactttcttacttgcgcacatgggggtgcttggcgaaagtcaatgcatcaataacgaagaagcgcaaacttggacctaagactgtggactgtgtctttctaggatatgctcaccacagcattgcctatagatttttaatagttaaatctgaggtacctgacatgcatcttggtacaattatggagtctcgttatgctaccttctttgagagctttttcccaatgaaggatacacatagtagttctagccaaccctctgaaataattcccagttcaatcacactaccagaacaaactgaacatacacatgaacatgttactgaggaggatgatagtgaagctcctcgaaggagtaaaagacaaaggacggctaagtcttttggtgatgatttcactgtgtacctcgtggatgacactcctaagtcaattttagaagcataagcatctcctgatgcagactactggaagtaggctgtccgtagtgaaatggattccattatcgctaatgggacttgggaggtgacagagcgaccctatgggtgtaaacctatggggtgcaagtgggtgttcaagaagaagctcaggcctgacggtactattgaaaagtacaaggctcggcttgttgctaagggctatactcagaaagaaggtgaagatttctttgacacttactcacctgttgctagattgaccacagttcgtatgctactttccctagcagcctcacatggtcttctcgttcatcaaatggacgttaagacagcttttcttaatggagagctggatgaggagatctatatggatcaacctgatgggtttgtagttgaaggtcaagaaggcaaagtgtgtaaattgttgaagtctttgtatggtctgacacaagctcctaagcaatggcatgagaaatttgacaaaacattgacatctgcaggcttcgcagtcaatgaggcagataaatgtgtgtactatcgccatggtgggggtgagggagttattctatgattgtacgttgatgacatactgatatttgggacaaaccttgaggtgataaatgaggttaaatcattcttgtctcaaaattttgatataaaggatttgggagtagctgatgttatcttaaacattaagctaattagaggtgagaatgggattacactcttacagtcccattatgtggagaagatctttaatcgctttggctacattgatagtaagccttctccaacaccttatgatcctagcttgttgcttcgcaagaacaagagaattgctaggaatcaactggaatactcccaaatcattggctcgctgatgtacctggctagtgcaactaggcctgatatctcctttgctgtgagcaagttgagccagtttacctctaatccgggagatgatcactggcgtgcggttgagcgagtaatgcgctatctgaaaggtactatggaattggggcttcactattctgggtatcctgcggtactggagggatatagtgattctaactggatctctgatgtggatgagatcaaagccactagtggatatgtcttcacactaggtggtggtgctgtttcgtggaggtcttgcaaacagactattttgacgaggtcaaccatggaagcagaactgacggcattggatactgctactgttgaggcagaatggctgtgtgatctattaatggatctgcctattgttgaaaaaccgacatgtgaaaagacgattgaagtctgtcaggaaattgagaaactccggagttataacgttggattacatccaaacaactagaaacctagcagatcccttcacgaagggactatcacgaaatgtgatagataatgtatcgaaggagatgggtttgagacccatagcattcttgaaagaactcacctttgtaagcttgactgttggtcgcagtctatgaagattttgagtgaatcttctaggaagcttactaaagacctaggagta

SEQ ID NO: 14418 - DNA, 4167 bp, Oryza sativa
  Clone ID: TFbOSC101253j.C1.o7.fg
atgggttgcattaaagatattccgaccctaaaaggagataactacgcagaatggaaaagaaaactcgaccttgcttttatcttgggagaggtggactgggtattgactaccccatgtcctatagaacctgctgaccttgtcagaggtgaaaatgagtcagatgctgactggcaaaagagacagagggacaatgctcctctcgtcatgtcgtatgacattgaacaaaagaaatggtccttagccaacaagaaatgtttggctgtggtaaagaatacgattgagcctaccatattgggctcgatcccagagtgtgacgctgtctcagagtaccttgaaagaataaagagtcagtttactggctcttcaaagacttatgctacacagctgatcaagcagcttgtgacagaaaggtaccatggaggtggtgttagagaccacatacttagaatgagcaacatggcttccaaattgaagccaatggatttgggcataacagatgactttctggtccatctggttatggcctcattgccaaagcagtttgacaattttattgtcaactacaacataagtccagagaaatggaactttgagaagctcattgctaattgtgtgcaagaggaggagagaatcaaagaatcaaatggtggttcaataaactatgttaaagataagaaaaagaaccacaagtctcccacctcaaaaggtaaacagtctcagcatctgcctcaacaacaacagttcgctgttgagaaagatcaatgtctccactgcaagaagacaggacactacaagaaagattgtcctgactttttgaaaatgatcatggcaaagaaaggtgagaacattattacatttgtaaatgaatctcattatgttggttactctagatccacatggtggattgattctggagcaactattcatgcttgtaattgtttaaaggcattccgttcgacgaggactacgcaaagaagagaaagcaccattagagttgccaatggagttgaagaaaaagttgaagctgttggagatcttcctctagagctcgcgaatggcttcatacttttacttcgagatgtcttttatgttccttctttgcaaaggaacttaataagtgtatcaaagttggattttgatggatatgattgccgctttggaagtggcaaatgtgaactatggcataataatgcatgtattggtcttgctgtgttgcgagacgagctttatttgttatctctttctgagaatgtgaatgttgtgtcctcgttgacaaaagaaaacaagaaaagaaagcgaactcccgatgtctcatcgaaattatggcactgtcgtttgggccatatttcgagggggagaattgagagactagttaagaatgaaattcttcctccattggagttctcagacttagaacaatgcatagaatgcattaaaggaaaatttgtaaagagcatcaaaaagggtgcaaaacgaagcgcgggaattttagagatcattcatacagatatttgtggtccatttcctgtgaaaagtgtggatggctatgactcgttcataacattcacagatgattactcccgctatggttatatttatccaattaaagagcgatcagaagcactggataaatttaagatattcaaagctgaagttgaaaatcagcatgatataaagattaaagtagtaagatctgaccgtgggggggagtactatggtcgacatacgccttatgggcaagtccctggaccttttgcaaggttcttgctagagaatggaatagtagcccagtattcaacaccgggcgaacctcaacagaatggggtagctgaaaggcgcaaccgtacccttatggatatggtgcgcagcatgatgagctactccacactaccactcggtttatggatggaggcgttaaaaaccgccattcatattctcaacagagttccaagcaaatcggtgcccaaaacaccgtatgagctatggacagggagagtaccctcgctaactcacctccgtgtgtgggggagtcctgcagaggccaaagtatttaacccaaatattgggaagttggaccccaaaacagtcagttgccattttattggctatcctgaaagatcaaaaggctatcgtttctactgtccaaacagttatacaaagtttgtagaaacgagacacgccgtcttcttggaagacgaaatgattagggggagctcggtagttcgagaaattgatcttgaggagaggcgggtgtctgtacccgctccgtcgactcaggaacctttcttctctctacctgctgatgttgtgcctgcaatgcctgtcattgaggtaccagcacctgttgttacccctcctgtggcaacaatgaatgagagtgaggaacctgttatacaggattcaacagaaatggttgccacaccagaggaggagctacaacagcctcaaatagataatgtgccagtacaggagactcatcaagagcctcaggtacaggatgtgccaaatgtgcaggcccctagaaggtctgaaagagtcagaagatcggctatccgtgatgactataaagtttataatatagaagagtcgcatatggaggatgatcccacctcatatgaagaggccatgagaagcgctcgctcatctgaatggttggaagccatgaaagatgaaatgaaatcaatgaaactaaacgatgtttgggatttagaagaaattcctaaaggagccaaaacagtaggctgtaaatgggtctacaaaaccaaatatgactccagagggaatatagaaaagtttaaagcgcgacttgtggcaaaaggcttcacgcaacgagaagggattgattacaatgagacattttctccagtctcttgtaaagattccttcaggattataatggcactagtggcacattatgatttggaattacatcagatggatgtaaaaacggcatttctaaatggagatttggaggaaaaagtatacatggcgcaaccgaaaggttttgtcatgaaaggaaacgaaaatatgggatgtcgtctaaagagatccatttatggattaaagcaagcttcgagacagtggtacttgaagtttgatgggacaataaagaaatttgggtttcaagagaatgtcgaggacaactgtatttattcaaagtttaagaatgggagatttattttcctaattctgtatgtggatgacattctactggctagtagtgatgtcagtctactgcaggaaacaaagaaattcttgtcctcaaactttgacatgaaagacctcggtgaggcttcatatgttttgggcatagagattcaccgagatagaacaaagtatgcattgggactttctcaaaagacatatatagaaaaggtgttgaagaaattcaacatgtacagatgcagtgctacacctgctcctataatgaaaggcgaaaagtatggggcatcgcaatgtcccagaaatcagtatgagctcaatgaaatgaaaacaaagccatatgcgtcagctgtaggaagcctacagtacgcgcaagtgtgcacacgacctgacttggcatttgttaccgggttacttggcagatttcagagtaatccaggcctagagcactggaaattggtaaagaaagtcttgcgttatttgcaaggaacaaaaggcctcatgctgtcttacagaagatcagaatcactccagatagtggggtactcagattctgactttgcaaaagataatacaaagtcaacatcgggatacgtgtttaccctggcaggaggagctatttcatggaaaagctcaaaacagactatcactgcagggtctactatgtatgccgagtttatagcatgctatgaggcaacggggcaggtgaactggctaaagaagttcatacccggtttaaaggtggttgacagtattgagaaaccactaaagttatactgcgacaacgaacccgcagtaatgtacgctcacaacaatcagtcaagtggtgctgccaaacacattgacataaagtactatgttgtgaaggacaaagtccgggatcaaacaatcagtctcgagcacattaaaacagaaaggatgctcgcggatccgctcacgaaaggcctaccacccaacgtgttcaaggaacatgtagccggcatgggtttaagggaagccttatga

SEQ ID NO: 14419 - DNA, 492 bp, Oryza sativa
  Clone ID: TFbOSC101253j.C1.o8.gm
atggtgaagggccatggtttggttgcgttgcaaatccatccattcactcccttgcgccgtcatggtcttcatcgccaccaccacagcggcactggcaccggcgtcatggcgcggccgccgcccgcgtcacactcaacgccatcggagagacgctttgccacagctgaatcaactggaagtgttctaggcccctccccggcagccaccggctcgtcgtcggcaccccgacccagcctcccgcgccaagcccgccgcccccaggagggcggttcggggatttcaccaggcgaaatcgatgtgagggcagagctcggccaggaacgatgcccacagtgcacgcgccttgctttttcggcgccgcgcgcttcctcgcttcgacgaagtttcgcgctccttagcttagggacaagtcgccaagtgaggtcccaggcgcatgctccacgtagaccaaaagctgagctggcgcgacgaggttacgcgccaactcagtga

SEQ ID NO: 14420 - DNA, 2084 bp, Oryza sativa
  Clone ID: TFbOSC11286j.C1.o1.fg
gtggctactccttgatgggttgcattaaagatattctgaccctaaaaggagataactacgcagaatggaaaagaaaactcgaccttgcttttatcttgggagatgtggactgggtgttgactaccccatgtcctatagaacctgctgaacttattagaggtgaaaatgagtcagatgctgattggcaaaagagacagagggacaatgctcctctcgtcatgtcgtatgacattgaacaaaagaaatggtccttagccaacaagaaatgtttggctgtggtaaagaatacgattgagccaaccatattgggctcaatcccagagtgtgacgctgtctcagagtaccttgaaagaataaagagccagtttactggctcttcaaagacttatgctacacagctgatcaagcagcttgtgacagaaaggtaccatggaggtggtgttagagaccacatacttagaatgagcaacatggcttccaagttgaagccaatggatttgggcataacagatgactttctggtccatctggttatggcctcattgccaaagcaatttgacaattttattgtcaactacaacataagtccagagaaatggaactttgagaagctcattgccaattgtgtgcaagaggaggagagaatcaaagagtcaaatggttgttcaattaactatgttaaagataacaaaaaaaagaaccacaagtcgtctcccacctcaaaagctaaacagtctcagcatctgcctcagcaacaacagttcgctgttgagaaagatcagtgtctccactgcaagaagacaggacattacaagaaagactgtcctgacttcttgaaaatgatcatggcaaggaaagacgagctttatttgttatctctttctgagaatgtgaatgttgtgtcctcgttgacaaaagaaaacaagaaaagaaagcgaactcccgatgtctcatcgaaattatggcactgtcgtttgggccatatttcgagggggagaattgagagactagttaagaatgaaattcttcctccattggagttctcagacttagaacaatgcatagaatgcattaaaggaaaatttgtaaagagcatcaaaaagggtgcaaaacgaagcacaggaattttagagatcattcatacagatatttgtggttcatttcctgtgaaaagtgtggatggctatgactcgttcataacattcacagatcattacttccgctatggttatatttatccaattaaagagcgatcagaagcattggataaatttaagatattcaaagctgaagttgaaaatcaacatgatataaagattaaagtagtaagatctaaccgtgggggggagtactatgtcgacatacaccttatgggcaagtccatggaccttttgcaaggcgaacctcaacagaatggggtagctgaaaggcgcaaccgtacccttatggatatggtgcgcagcatgatgagctactccacactaccactgggtttatggatggaggcgttaaaaaccgccattcatattctcaatagagttccaagcaaatcgatgcccaaaacaccgtatgagctatggacaggaagagtaccctccctagctcacctccgtgtgtgggggagtcctgcagaggccaaagtatttaacccaaatattgggaagttggatcccaaaacagtcagctgccattttattggctatcctgaaagatcaaaaggctatcgtttctactgtccaaacagttatacaaagtttgtagaaacgagacatgccgtcttcttggaagacgaaatgattagggggagctcggtagttcgagaaattgatcttgaggagaggcgggtgtctgtacccgctccgtcgactcaggaacctttcttctctctacctgctgatgttgtgcctgcaatacctgtcattgatgtaccagcacctgttgttacctctcctgtggcaacaatgaatgaaaatgaggaacctgttatacaggattcaacagaaatggttgccacaccagaggaggagctgcaacagcctcaaatagataatgtgccagtacaggagactcaacaagagcctcag

SEQ ID NO: 14421 - DNA, 4188 bp, Oryza sativa
  Clone ID: TFbOSC14708j.C1.o1.fg
atggcgacgccgtccacgcggtcgcgtggctactccttgatgggttgcattaaagatattccgaccctaaaaggagataactacgcagaatggaaaagaaaactcgaccttgcttttatcttgggagaggtggactgggtattgactaccccatgtcctatagaacctgctgaccttgtcagaggtgaaaatgagtcagatgctgactggcaaaagagacagagggacaatgctcctctcgtcatgtcgtatgacattgaacaaaagaaatggtccttagccaacaagaaatgtttggctgtggtaaagaatacgattgagcctaccatattgggctcgatcccagagtgtgacgctgtctcagagtaccttgaaagaataaagagtcagtttactggctcttcaaagacttatgctacacagctgatcaagcagcttgtgacagaaaggtacaatggaggtggtgttagagaccacatacttagaatgagcaacatggcttccaagttgaagccaatggatttgggcataacagatgactttctggtccatctggttatggcctcattgccaaagcagtttgacaattttattgtcaactacaacataagtccagagaaatggaactttgagaagctcattgctaattgtgtgcaagaggaggagagaatcaaagaatcaaatggtggttcaataaactatgttaaagataagaaaaagaaccacaagtctcccacctcaaaaggtaaacagtctcagcatctgcctcagcaacaacagttcgctgttgagaaagatcaatgtctccactgcaagaagacaggacactacaagaaagattgtcctgactttttgaaaatgatcatggcaaagaaaggtgagaacattattacatttgtaaatgaatctcattatgttggttactctagatccacatggtggattgattctggagcaactattcatgcttgtaattgtttaaaggcattccgttcgacgaggactacgcaaagaagagaaagcaccattagagttgccaatggagttgaagaaaaagttgaagctgttggagatcttcctctagagctcgcgaatggcttcatacttttacttcgagatgtcttttatgttccttctttgcaaaggaacttaataagtgtatcaaagttggattttgatggatatgattgccgctttggaagtggcaaatgtgaactatggcataataatgcatgtattggtcttgctgtgttgcgagacgagctttatttgttatctctttctgagaatgtgaatgttgtgtcctcgttgacaaaagaaaacaagaaaagaaagcgaactcccgatgtctcatcgaaattatggcactgtcgtttgggccatatttcgagggggagaattgagagactagttaagaatgaaattcttcctccattggaatgcatagaatgcattaaaggaaaatttgtaaagagcatcaaaaagggtgcaaaacgaagcgcaggaattttagagatcattcatacagatatttgtggtccatttcctgtgaaaagtgtggatggctatgactcgttcataacattcacagatgattactcccgctatggttatatttatccaattaaagagcgatcagaagcactggataaatttaagatattcaaagctgaagttgaaaatcagcatgatataaagattaaagtagtaagatctgaccgtgggggggagtactatggtcgacatacgccttatgggcaagtccctggaccttttgcaaggttcttgctagagaatggaatagtagcccagtattcaacaccgggcgaacctcaacagaatggggtagctgaaaggcgcaaccgtacgcttatggatatggtgcgcagcatgatgagctactccacactaccactcggtttatggatggaggcgttaaaaaccgccattcatattctcaacagagttccaagcaaatcggtgcccaaaacaccgtatgagctatggacagggagagtaccctcgctaactcacctccgtgtgtgggggagtcctgcagaggccaaagtatttaacccaaatattgggaagttggaccccaaaacagtcagttgccattttattggctatcctgaaagatcaaaaggctatcgtttctactgtccaaacagttatacaaagtttgtagaaacgagacacgacgtcttcttggaagacgaaatgattagggggagctcggtagttcgagaaattgatcttgaggagaggcgggtgtctgtacccgctccgtcgactcaggaacctttcttctctctacctgctgatgttgtgcctgcaatgcctgtcattgaggtaccagcacctgttgttacccctcctgtggcaacaatgaatgagagtgaggaacctgttatacaggattcaacagaaatggttgccacgccagaggaggagctacaacagcctcaaatagataatgtgccagtacaggagactcatcaagagcctcaggtacaggatgtgccaaatgtgcaggcccctagaaggtctgaaagagtcagaagatcggctatccgtgatgactataaagtttataatatagaagagtcgcatatggaggatgatcccacctcatatgaagaggccatgagaagcgctcgctcatctgaatggttggaagccatgaaagatgaaatgaaatcaatgaaactaaacgatgtttgggatttagaagaaattcctaaaggagccaaaacagtaggctgtaaatgggtctacaaaaccaaatatgactccagagggaatatagaaaagtttaaagcgcgacttgtggcaaaaggcttcacgcaacgagaagggattgattacaatgagacattttctccagtctcttgtaaagattccttcaggattataatggcactagtggcacattatgatttggaattacatcagatggatgtaaaaacggcatttctaaatggagatttggaggaaaaagtatacatggcgcaaccgaaaggttttgtcatgaaaggaaacgaaaatatgggatgtcgtctaaagagatccatttatggattaaagcaagcttcgagacagtggtacttgaagtttgatgggacaataaagaaatttgggtttcaagagaatgtcgaggacaactgtatttatccaaagtttaagaatgggagatttattttcctaattctgtatgtggatgacattctactggctagtagtgatgtcagtctactgcagaaaacaaagaaattcttgtcctcaacttttgacatgaaagacctcggtgaggcttcatatgttttgggcatagagattcaccgagatagaacaaagtatgcattggaactttctcaaaagacatatatagaaaaggtgttgaagaaattcaacatgtacagatgcagtgctacacctgctcctataatgaaaggcgaaaagtatggggcatcgcaatgtcccagaaatcagtatgagctcaatgaaatgaaaacaaagccatatgcgtcagctgtaggaagcctacagtacgcgcaagtgtgcacacgacctgacttggcatttgttaccgggttacttggcagatttcagagtaatccaggcctagagcactggaaattggtaaagaaagtcttgcgttatttgcaaggaacaaaaggcctcatgctgtcttacagaagatcagaatcactccagatagtggggtactcagattctgactttgcaaaagataatacaaagtcaacatcgggatacgtgtttaccctggcaggaggagctatttcatggaaaagctcaaaacagactatcactgcagggtctactatgtatgccgagtttatagcatgctatgaggcaacggggcaggtgaactggctaaagaagttcatacccggtttaaaggtggttgacagtattgagaaaccactaaagttatactgcgacaacgaacccgcagtaatgtacactcacaacaatcagtcaagtggtgctgccaaacacattgacataaagtactatgttgtgaaggacaaagtccgggatcaaacaatcagtctcgagcacattaaaacagaaaggatgctcgcggatccgctcacgaaaggcctaccacccaacgtgttcaaggaacatgtagccggcatgggtttaagggaagccttatga

SEQ ID NO: 14422 - DNA, 4188 bp, Oryza sativa
  Clone ID: TFbOSC14723j.C1.o1.fg
atggcgacgccgtccacgcggtcgcgtggctactccttgatgggttgcattaaagatattccgaccctaaaaggagataactacgcagaatggaaaagaaaactcgaccttgcttttatcttgggagaggtggactgggtattgactaccccatgtcctatagaacctgctgaccttgtcagaggtgaaaatgagtcagatgctgactggcaaaagagacagagggacaatgctcctctcgtcatgtcgtatgacattgaacaaaagaaatggtccttagccaacaagaaatgtttggctgtggtaaagaatacgattgagcctaccatattgggctcgatcccagagtgtgacgctgtctcagagtaccttgaaagaataaagagtcagtttactggctcttcaaagacttatgctacacagctgatcaagcagcttgtgacagaaaggtacaatggaggtggtgttagagaccacatacttagaatgagcaacatggcttccaagttgaagccaatggatttgggcataacagatgactttctggtccatctggttatggcctcattgccaaagcagtttgacaattttattgtcaactacaacataagtccagagaaatggaactttgagaagctcattgctaattgtgtgcaagaggaggagagaatcaaagaatcaaatggtggttcaataaactatgttaaagataagaaaaagaaccacaagtctcccacctcaaaaggtaaacagtctcagcatctgcctcagcaacaacagttcgctgttgagaaagatcaatgtctccactgcaagaagacaggacactacaagaaagattgtcctgactttttgaaaatgatcatggcaaagaaaggtgagaacattattacatttgtaaatgaatctcattatgttggttactctagatccacatggtggattgattctggagcaactattcatgcttgtaattgtttaaaggcattccgttcgacgaggactacgcaaagaagagaaagcaccattagagttgccaatggagttgaagaaaaagttgaagctgttggagatcttcctctagagctcgcgaatggcttcatacttttacttcgagatgtcttttatgttccttctttgcaaaggaacttaataagtgtatcaaagttggattttgatggatatgattgccgctttggaagtggcaaatgtgaactatggcataataatgcatgtattggtcttgctgtgttgcgagacgagctttatttgttatctctttctgagaatgtgaatgttgtgtcctcgttgacaaaagaaaacaagaaaagaaagcgaactcccgatgtctcatcgaaattatggcactgtcgtttgggccatatttcgagggggagaattgagagactagttaagaatgaaattcttcctccattggaatgcatagaatgcattaaaggaaaatttgtaaagagcatcaaaaagggtgcaaaacgaagcgcaggaattttagagatcattcatacagatatttgtggtccatttcctgtgaaaagtgtggatggctatgactcgttcataacattcacagatgattactcccgctatggttatatttatccaattaaagagcgatcagaagcactggataaatttaagatattcaaagctgaagttgaaaatcagcatgatataaagattaaagtagtaagatctgaccgtgggggggagtactatggtcgacatacgccttatgggcaagtccctggaccttttgcaaggttcttgctagagaatggaatagtagcccagtattcaacaccgggcgaacctcaacagaatggggtagctgaaaggcgcaaccgtacgcttatggatatggtgcgcagcatgatgagctactccacactaccactcggtttatggatggaggcgttaaaaaccgccattcatattctcaacagagttccaagcaaatcggtgcccaaaacaccgtatgagctatggacagggagagtaccctcgctaactcacctccgtgtgtgggggagtcctgcagaggccaaagtatttaacccaaatattgggaagttggaccccaaaacagtcagttgccattttattggctatcctgaaagatcaaaaggctatcgtttctactgtccaaacagttatacaaagtttgtagaaacgagacacgacgtcttcttggaagacgaaatgattagggggagctcggtagttcgagaaattgatcttgaggagaggcgggtgtctgtacccgctccgtcgactcaggaacctttcttctctctacctgctgatgttgtgcctgcaatgcctgtcattgaggtaccagcacctgttgttacccctcctgtggcaacaatgaatgagagtgaggaacctgttatacaggattcaacagaaatggttgccacgccagaggaggagctacaacagcctcaaatagataatgtgccagtacaggagactcatcaagagcctcaggtacaggatgtgccaaatgtgcaggcccctagaaggtctgaaagagtcagaagatcggctatccgtgatgactataaagtttataatatagaagagtcgcatatggaggatgatcccacctcatatgaagaggccatgagaagcgctcgctcatctgaatggttggaagccatgaaagatgaaatgaaatcaatgaaactaaacgatgtttgggatttagaagaaattcctaaaggagccaaaacagtaggctgtaaatgggtctacaaaaccaaatatgactccagagggaatatagaaaagtttaaagcgcgacttgtggcaaaaggcttcacgcaacgagaagggattgattacaatgagacattttctccagtctcttgtaaagattccttcaggattataatggcactagtggcacattatgatttggaattacatcagatggatgtaaaaacggcatttctaaatggagatttggaggaaaaagtatacatggcgcaaccgaaaggttttgtcatgaaaggaaacgaaaatatgggatgtcgtctaaagagatccatttatggattaaagcaagcttcgagacagtggtacttgaagtttgatgggacaataaagaaatttgggtttcaagagaatgtcgaggacaactgtatttattcaaagtttaagaatgggagatttattttcctaattctgtatgtggatgacattctactggctagtagtgatgtcagtctactgcaggaaacaaagaaattcttgtcctcaaactttgacatgaaagacctcggtgaggcttcatatgttttgggcatagagattcaccgagatagaacaaagtatgcattgggactttctcaaaagacatatatagaaaaggtgttgaagaaattcaacatgtacagatgcagtgctacacctgctcctataatgaaaggcgaaaagtatggggcatcgcaatgtcccagaaatcagtatgagctcaatgaaatgaaaacaaagccatatgcgtcagctgtaggaagcctacagtacgcgcaagtgtgcacacgacctgacttggcatttgttaccgggttacttggcagatttcagagtaatccaggcctagagcactggaaattggtaaagaaagtcttgcgttatttgcaaggaacaaaaggcctcatgctgtcttacagaagatcagaatcactccagatagtggggtactcagattctgactttgcaaaagataatacaaagtcaacatcgggatacgtgtttaccctggcaggaggagctatttcatggaaaagctcaaaacagactatcactgcagggtctactatgtatgccgagtttatagcatgctatgaggcaacggggcaggtgaactggctaaagaagttcatacccggtttaaaggtggttgacagtattgagaaaccactaaagttatactgcgacaacgaacccgcagtaatgtacactcacaacaatcagtcaagtggtgctgccaaacacattgacataaagtactatgttgtgaaggacaaagtccgggatcaaacaatcagtctcgagcacattaaaacagaaaggatgctcgcggatccgctcacgaaaggcctaccacccaacgtgttcaaggaacatgtagccggcatgggtttaagggaagccttatga

SEQ ID NO: 14423 - DNA, 259 bp, Oryza sativa
  Clone ID: TFbOSC15718j.C1.o5.np
tgtcacgaccggaaataacccaacgggcgttccttacgtgcgtgcattaatccttgtcccaggaggcaaggcccagcacacacaaagacaaacgacaaacagcggaagactagggcgacgaccacaggcacttgacggcaggcacgagctagacaccaaagccttcatcctccaggaactcctcttctgggtttgggaaaaattgagcaagactgagtacaaccaccgtactcaacaagacacacccacaagtgcagaa

SEQ ID NO: 14424 - DNA, 2310 bp, Oryza sativa
  Clone ID: TFbOSC18458j.C1.o2.hg
atgtcgtatgacattgaacaaaagaaatggtccttagccaacaagaaatgtttggctgtggtaaagaatacgattgagcctaccatattgggctcgatcccagagtgtgacgctgtctcagagtaccttgaaagaataaagagtcagtttactggctcttcaaagacttatgctacacagctgatcaagcagcttgtgacagaaaggtaccatggaggtggtgttagagaccacatacttagaatgagcaacatggcttccaagttgaagccaatggatttgggcataacagatgactttctggtccatctggttatggcctcattgccaaagcagtttgacaattttattgtcaactacaacataagtccagagaaatggaactttgagaagctcattgctaattgtgtgcaagaggaggagagaatcaaagaatcaaatggtggttcaataaactatgttaaagataagaaaaagaaccacaagtctcccacctcaaaaggtaaacagtctcagcatctgcctcaacaacaacagttcgctgttgagaaagatcaatgtctccactgcaagaagacaggacactacaagaaagattgtcctgactttttgaaaatgatcatggcaaagaaaggtgagaacattattacatttgtaaatgaatctcattatgttggttactctagatccacatggtggattgattctggagcaactattcatgcttgtaattgtttaaaggcattccgttcgacgaggactacgcaaagaagagaaaacaccattagagttgccaatggagttgaagaaaaagttgaagctgttggagatcttcctctagagctcgcgaatggcttcatacttttacttcgagatgtcttttatgttccttctttgcaaaggaacttaataagtgtatcaaagttggattttgatggatatgattgccgctttggaagtggcaaatgtgaactatggcataataatgcatgtattggtcttgctgtgttgcgagacgagctttatttgttatctctttctgagaatgtgaatgttgtgtcctcgttgacaaaagaaaacaagaaaagaaagcgaactcccgatgtctcatcgaaattatggcactgtcgtttgggccatatttcgagggggagagttgagagactagttaagaatgaaattcttcctccattggagttctcagacttagaacaatgcatagaatgcattaaaggaaaatttgtaaagagcatcaaaaagggtgcaaaacgaagcgcaggaattttagagatcattcatacagatatttgtggtccattttctgtgaaaagtgtggatggctatgactcgttcataacattcacagatgattactcccgctatggttatatttatccaattaaagagcgatcagaagcattggataaatttaagatattcaaagctgaagttgaaaatcagcatgatataaagattaaagtagtaagatctgaccgtgggggggagtactatggtcgacatacgccttatgggcaagtccctggaccttttgcaaggttcttgctagagaatggaatagtagcccagtattcaacaccgggcgaacctcaacagaatggggtagctgaaaggcgcaaccgtacccttatggatatggtgcgcagcatgatgagctactccacactaccactcggtttatggatggaggcgttaaaaaccgccattcatattctcaacagagttccaagcaaatcggtgcccaaaacaccgtatgagctatggacagggagagtaccctcgctaactcacctccgtgtgtgggggagtcctgcagaggccaaagtatttaacccaaatattgggaagttggaccccaaaacagtcagctgccattttattggctatcctgaaagatcaaaacgctatcgtttctactgtccaaacagttatacaaagtttgtagaaacgagacacgccgtcttcttggaagacgaaatgattagggggagctcggtagttcgagaaattgatcttgaggagaggcgggtgtctgtacccgctccgtcgactcaggaacctttcttctctctacctgctgatgttgtgcctgcaatgcctgtcattgaggtaccagcacctgttgttacccctcctgtggcaacaatgaatgagagtgaggaacctgttatacaggattcaacagaaatggttgtcacaccagaggaggagctacaacagcctcaaatagataatgtgccagtacaggagactcatcaagagcctcaggtacaggatgtgccaaatgtgcag

SEQ ID NO: 14425 - DNA, 4173 bp, Oryza sativa
  Clone ID: TFbOSC26474j.C1.o5.fg
atggcgacgccgtccacgcggtcgcgtggctactccttgatgggttgcattaaagatattccgaccctaaaaggagataactacgcagaatggaaaagaaaactcgaccttgcttttatcttgggagaggtggactgggtattgactaccccatgtcctatagaacctgctgaacttgtcagaggtgaaaatgagtcagatgctgactggcaaaagagacagagggacaatgctcctctcgtcatgtcgtatgacattgaacaaaagaaatggttcttagccaacaagaaatgtttggctgtggtaaagaatacgattgagcctaccatattgggctcgatcccagagtgtgacgctgtctcagagtaccttgaaagaataaagagtcagtttactgactcttcaaagacttatgctacacagctgatcaagcagcttgtgacagaaaggtaccatggaggtggtgttagagaccacatacttagaatgagcaacatggcttccaagttgaagccaatggatttgggcataacagatgactttctggtccatctggttatggcctcattgccaaagcagtttgacaattttattgtcaactacaacataagtccagagaaatggaactttgagaagctcattgctaattgtgtgcaagaggaggagagaatcaaagaatcaaatggtggttcaataaactatgttaaagataagaaaaagaaccacaagtctcccacctcaaaaggtaaacagtctcagcatctgcctcagcaacaacagttcgctgttgagaaagatcaatgtctccactgcaagaagacaggacactacaagaaagattgtcctgactttttgaaaatgatcatggcaaagaaaggtgagaacattattacatttgtaaatgaatctcattatgttggttactctagatccacatggtggattgattctggagcaactattcatgcttgtaattgtttaaaggcattccgttcgacgaggactacgcaaagaagagaaagcaccattagagttgccaatggagttgaaaaagttgaagctgttggagatcttcctctagagctcgcgaatggcttcatacttttacttcgagatgtcttttatgttccttctttgcaaagaaacttaataagtgtatcaaagttggattttgatggatatgattgccgctttggaagtggcaaatgtgaactatggcataataatgcatgtattggtcttgccgtgttgcgagacgagctttatttgttatctctttctgagaatgtgaatgttgtgtcctcattgacaaaagaaaacaagaaaagaaagcgaactcccgatgtctcatcgaaattatggcactatcgtttgggccatatttcgagggggagaattgagagactagttaagaatgaaattcttcctccattggagttctcagacttagaacaatgcatagaatgcattaaaggaaaatttgtaaagagcatcaaaaagggtgcaaaacgaagcgcaggaattttagagatcattcatacagatatttgtggtccatttcctgtaaaaagcgtggatggctatgactcgttcataacattcacagatgattactcccgctatggttatatttatccaattaaagagcgatcagaagcaatggataaatttaagatattcaaagctgaagttgaaaatcagcttgatataaagattaaagtagtaagatctgaccgtgggggagagtactatggtcgacatacgccttatgggcaagtccctggaccttttgcaaggttcttgctagagaatggaatagtagcccagtattcaacaccgggcgaacctcaacagaatggggtagctgaaaggcgcaaccgtacgcttatggatatggtgcgcagcatgatgagctactccacactaccactcggtttatggatggaggcgttaaaaaccgccattcatattctcaacagagttccaagcaaatcggtgcccaaaacaccgtatgagctatggacagggagagtaccctcgctaactcacctccgtgtgtgggggagtcctgcagaggccaaagtatttaacccaaatattgggaagttggaccccaaaacagtcagctgccattttattggctatcctgaaagatcaaaaggctatcgtttctactgtccaaacagttatacaaagtttgtagaaacgagacacgccgtcttcttggaagacgaaatgattagggggagctcggtagttcgagaaattgatcttgaggagaggcgggtgtctgtacccgctccgtcgactcaggaacctttcttctctctacctgctgatgttgtgcctgcaatgcctgtcattgaggtaccaatgaatgagagtgaagaacctgttatacaggattcaacagaaatggttgccacaccagaggaggagctgcaacagcctcaaatagataatgtgccagtacaggagactcatcaagagcctcaggtacaggatgtgccaaatgtgcaggcccctagaaggtctgaaagagtcagaagatcggctatccgtgatgactataaagtttataatatagaagagtcgcatatggaggatgatcccacctcatatgaagaggccatgagaagcgctcgctcatctgaatggttggaagccatgaaagatgaaatgaaatcaatgaaactaaacgatgtttgggatttagaagaaattcctaaaggagccaaaacagtaggctgtaaatgggtctacaaaaccaaatatgactccagagggaatatagaaaagtttaaagcgcgacttgtggcaaaaggcttcacgcaacgagaagggattgattacaatgagacattttctccagtctcttgtaaagattccttcaggattataatggcactagtggcacattatgatttggaattacatcagatggatgtaaaaacggcatttctaaatggagatttggaggaaaaagtatacatggcgcaaccgaaaggttttgtcatgaaaggaaacgaaaatatgggatgtcgtctaaagagatccatttatggattaaagcaagcttcgagacagtggtacttgaagtttgatgggacaataaagaaatttgggtttaaagagaatgtcgaggacaactgtatttattcaaagtttaagaatgggagatttattttcctaattctgtatgtggatgacattctactggctagtagtgatgtcagtctactgcaggaaacaaagaaattcttgtcctcaaactttgacatgaaagacctcggtgaggcttcatatgttttgggcatagagattcaccgagatagaacaaagtatgcattgggactttctcaaaagacatatatagaaaaggtgttgaagaaattcaacatgtacagatgcagtgctacacctgctcctataatgaaaggcgaaaagtatggggcatcgcaatgtcccagaaatcagtatgagctcaatgaaatgaaaacaaagccatatgcgtcagctgtaggaagcctacagtacgcgcaagtctgcacacgacctgacttggcattcgttaccgggttacttggcagatttcagagtaatccaggcctagagcactggaaattggtaaagaaagtcttgcgttatttgcagggaacaaaaggcctcatgctatcttacagaagatcagaatcactccagatagtggggtactcagattctgactttgcaaaagataatacaaagtcaacatcgggatacgtgtttaccctggcaggaggagctatttcatggaaaagctcaaaacagactatcactgcagggtctactatgtatgccgagtttatagcatgctatgaggcaacggggcaggtgaactggctaaagaagttcatacccggtttaaaggtggttgacagtattgagaaaccactaaagttatactgcgacaacgaacccgcagtaatgtacgctcacaacaatcagtcaagtggtgctgccaaacacattgacataaagtactatgttgtgaaggacaaagtccgggatcaaacaatcagtctcgagcacattaaaacagaaaggatgctcgcggatgcgctcacgaaaggcctaccacccaacgtgttcaaggaacatgtagccggcatgggtttaagggaagccttatga

SEQ ID NO: 14426 - DNA, 3594 bp, Oryza sativa
  Clone ID: TFbOSC34338j.C1.o3.fg
gtggattgtgtgttgactaccccatgtcctatagaacctgctgaacttgtcagaggtgaaaatgagtcagatgctgactggcaaaagagacagagggacaatgctcctctcgtcatgtcgtatgacattgaacaaaagaaatggtccttagccaacaagaaatgtttggctgtggtaaagaatacgattgagcctaccatattgggctcaatcccagagtgtgacgctgtctcagagtaccttgaaaaaataaagagtcagtttactggctcttcaaagacgtatgctacacagctgatcaagcagcttgtgacagaaaggtaccatggaggtggtgttagagatcacatacttagaatgagcaacatggcttccaagttgaagccaatggatttaggcataacagatgactttctggaggagagaatcaaaggatcaaatggtggttcaataaactatgttaaagataagaaaaagaaccacaagtctcccgcctcaaaagctaaacaatctcagcatctgcctcagcaacaacagttcgctgttgagaaagatcagtgtctccattgcaagaagacaggacactacaagaaagattgtcctgattttttgaaaatgatcatggcaaggaaaggtgagaacattattacatttgtaaatgaatcttattatgttggttactctagatccacatggtggattgattctggagcaactattcatgcttgtaattgtttaaaggcattccgttcgacgaggactacgcaaagaagagaaagctccattagagtcgccaatggagttgaagaaaaagttgaagctgttggagatcttcctctagagctcgcgaatggcttcatgcttttacttcgagatgtcttttatgttccttctttgcaaagaaacttaataagtgtatcaaagttggattttgatggatatgattgccgctttggaagtggcaaatgtgaactatggcataataatgcatgtattggtcttgctgtgttgcgagacgagttttatttgttatctctttctgagaatgtgaatgttgtgtcctcgttgacaaaagaaaacaagaaaagaaagcgaactcccgatgtctcatcgaaattatggcaccgtcgtttgggccatatttcgagggggagaattgagagactagttaagaatgaaattcttcctccattggagttctcagacttagaacaatgcatagaatgcattaaaggaaaatttgtaaagagcatcaaaaagggtgcaaaacgaagcgcaagaattttagagatcattcatacagatatttgtggtccatttcctgtgaaaagtgtggatggctatgactcgttcataacattcacagatgattactcccgctattgttatatttatccaattaaagagcgatcagaagcattggataaatttaagatattcaaagctgaagttgaaaatcagcatgatataaagattaaagtagtaagatctgaccgtgggggggagtactatggtcgacatacaccttatgggcaagtccctggaccttttgcaaggttcttgttagagaatggaatagtagcccagtattcaacaccgggcgaacctcaacagaatggggtagctaaaaggcgtaaccgtacccttatggatatggtgcgcagcatgatgagctactccacactaccactgggtttatggatggaggcgttaaaaaccaccattcatattctcaacagaattccaagcaaatcggtgcccaaaacaccgtatgagctatggacaggaagagtaccctcgctagctcacctccgtgtgtgggggagttctgcagaggccaaagtatttaacccaaatattgggaagttggatcccaagacagtcggctgccattttattggctatcctgaaagatcaaaaggctatcgtttctactgtccaaacagttatacaaagtttgtagaaatgagacatgccgtcttcttggaagacgaaatgattagggggagctcggattcaacagaaatggttgccacaccagaggaggagctgcaacagccacaaatagataatgtgccagtacaggagactcaacaagagcctcaggtacaggatgtgccaaatatgcaggctcctagaaggtctgaaagagtcagaagatcggctatccgtgatgactataaaatttataatatagaagagtcgcatatggaggatgatcccacctcatatgaagaggccatgagaagcgctcgctcatctgaatggttggaagccatgaaagatgaaatgaaatcaatgaaactaaacaatgtttgggatttagaagaaattcctaaaagagccaaaacagatttaatggcactagtggcacattatgatttggaattacatcagatggatgtaaaaacggcatttctaaatggagatttggaggaaatagtatacatggtgcaaccgaaaggttttgtcatgaaaggaaacgaaaatatgggatgccgtttaaagagatccatttatggattaaagcaagcttcgagacagtggtacttgaagtttgatgggacaataaagaaatttgggtttcaagagaatgtcgaggacaactgtatttattcaaagtttaagaatgggagatttattttcctaattctgtatgtggatgacattctactggctagtagtgatgtcagtctactgcaggaaacaaagaaattcttgtcctcaaactttgacatgaaagacctcggtgaagcttcatatgttttgggcatagagattcaccgagatagaacaaagtatgcattgggactttctcaaaagacatatatagaaaaggtgttgaagaaattcaacatgtacagatgcagtgctacacctgctcctatagtgaaaggcgaaaagtatggggcatcgcaatgtcccagaaatcagtatgagctcaatgaaatgaaaacaaagccatatgcgtcagctgtaggaagcctacagtatgcgcaagtgtgcacacgacctgacttggcatttgttaccgggttacttggcagatttcaaagtaatccaggcctagagcactggaaattggtaaagaaagtcttgcgttatttgcaaggaacaaaaggcctcatgctgtcttacagaagatcagaatcactccagatagtggggtattcagattctgactttgcaaaagataatacaaagtcaacatcgggatacgtgtttaccctggcaggaggagctatttcatggaaaagctcaaaacagactatcactgcagggtctactatgtatgctgagtttatagcatgctatgaggcaacggggcaggtgattgacagtattgagaaaccactgaagttatactgcgacaacgaacccgcagtaatgtacgctcacaacaatcagtcaagtggtgctgccaaacacattgacataaagtactatgttgtgaaggacaaagtccgggatcaaacaatcagtctcgagcacattaaaacagaaaggatgctcgcggatccgctcacaaaaggcctaccacccaacgtgttcaaggaacatgtagccggcatgggtttaagggaagccttatga

SEQ ID NO: 14427 - DNA, 3447 bp, Oryza sativa
  Clone ID: TFbOSC400203j.C1.o35.fg
atggaaaaaaaactcgaccttgcttttatcttgggagaggtggactgggtgttgactaccccatgtcctatagaacctgctgaacttgtcagaggtgaaaatgagtcagatgctgactggcaaaagagacagagggacaatgctcctctcgtcatgtcgtatgacattgaacaaaagaaatggtccttagccaacaagaaatgtttggctgtggtaaagaatacgattgagcctaccatattgggctcgatcccagagtgtgacgttgtctcagagtaccgtgaaagaataaagagtcagtttactggctcttcaaagacttatgctacacagctaatcaagcagcttgtgacagaaaggtaccatggaggtggtgttagagaccacatacttagaatgagcaacatggcttccaagttgaagccaatggatttgggcataacagatgactttctggtccatctggttatggcctcattgccaaagcagtttgacaattttattgtcaactacaacataagtccagagaaatggaactttgagaagctcattgctaattgtgtgcaagaggaggagagaatcaaagaatcaaatggtggttcaataaactatgttaaagataagaaaaagaaccacaagtctcccacctcaaaaggtaaacagtctcagcatctgcctcagcaacaacagttcgctgttgagaaagatcaatgtctccactgcaagaagacaggacactacaagaaagattgtcctgactttctgaaaatgatcatggcaaagaaaggtgagaacattattacatttgtaaatgaatctcattatgttggttactctagatccacatggtggattgattctggagcaactattcatgcttgtaattgtttaaaggcattccgttcgacaaggactacgcaaggaagagaaagctccattagagttgccaatggatttgaagaaaaagttgaagctgttggagatcttccgctagagctcgcgaatggcttcacacttttacttcgagatgtcttttatgttccttctttgcaaagaaacttaataagtgtatcaaagttggattttgatggatatgattgccgctttggaagtggcaaatgtgaactatggcataataatgcatgtattggtcttgctgtgttgcgagacgagctttatttgttatctctttctgagaatgtgaatgttgtgtcctcgttgacaaaagaaaacaagaaaagaaagcgaacttccgatgtctcatcgaaattatggcactgtcgtttgggccatatttcgagggggagaattgagagactagttaagaatgaaattctttccccattggagttctcagacttagaacaatgcatagaatgcattaaaggaaaatttgtaaagagcatcaaaaagggtgcaaaacgaagcgcaggaattttagagatcattcatacagatatttgtggtccatttcctatgaaaagtatggatggctatgactcgttcataacattcacagatgattactcccgctatggttatatttatccaattaaagagcgatcagaagcactggataaatttaagatattcaaagctgaagttgaaaatcagcatgatataaagattaaagtagtaagatctgaccgtgggggggagtactatggtcgacatacgccttatgggcaagtccctggaccttttgcaaggttcttgctagagaatggaatagtagcccagtattcaacaccgggcgaacctcaacagaatggggtagctgaaaggcgcaaccgtacccttatggctatggacaggaagagtaccctcgctaactcacctccttatacaaagtttgtagaaacgagacacgccgtcttcttggaagacggaatgattagggggagctcggtagttcgagaaattgatcttgaggagaggcgggtgtctgtacccgctccgtcgactcaggaacctttcttctctctacctgctgatgttgtgcctgcaatgcctgtcattgaggtaccagcacctgttgttacccctcctgtggcaacaatgaatgagagtgaggaacctgttatacaggattcaacagaaatggttgccacaccagaggaggagctacaacagcctcaaatagataatgtgccagtacaggagactcatcaagagcctcaggtacaggatgtgccaaatgtgcaggcccctagaaggtctgaaagagtcagaagatcggctatccgtgatgactataaagtttataatatagaagagtcgcatatggaggatgatcccacctcatatgaagaggccatgagaagcgctcgctcatctgaatggttggaagccatgaaagatgaaatgaaatcaatgaaactaaacgatgtttgggatttagaagaaattcctaaaggagccaaaacagtaggctgtaaatgggtctacaaaaccaaatatgactccagagggaatatagaaaagtttaaagcgcgacttgtggcaaaaggcttcacgcaacgagaagggattgattacaatgagacattttctccagtctcttgtaaagattcctttaggattataatggcactagtggcacattatgatttggaattacatcagatggatgtaaaaatggcatttctaaatggagatttggaggaaaaagaaacaaagaaattcttgtcctcaaactttgacatgaaagacctcggtgaggcttcatatgttttgggcatagagattcaccgagatagaacaaagtatgcattgggactttctcaaaagacatatatagaaaaggtgttgaagaaattcaacatgtacagatgcagtgctacacctgctcctataatgaaaggcgaaaagtatggggcatcgcaatgtcccagaaataagtatgagctcaatgaaatgaaaacaaagccatatgcgtcagctgtaggaagcctacaaagatcagaatcactccagatagtggggtactcagattctgactttgcaaaagataatacaaagtcaacatcgggatacgtgtttaccctggcaggaggagctatttcatggaaaagctcaaaacagactatcactggagggtctactatgtatgccgagtttatagcatgctatgaggcaacggggcaggtgaactggctaaagaagttcatacccggtttaaaggtggttgacagtattgagaaaccactaaagttatactgcgacaacgaacccgcagtaatgtacgctcacaacaatcagtcaagtggtgctgccaaacacattgacataaagtactatgttgtgaaggacaaagtccgggatcaaacaatcagtctcgagcacattaaaacagaaaggatgctcgcggatccgctcacgaaaggcctaccacccaacgtgttcaaggaacatgtagccggcatgggtttaagggaagccttatga

SEQ ID NO: 14428 - DNA, 2499 bp, Oryza sativa
  Clone ID: TFbOSC400458j.C1.o27.fg
atggcgggtgcagcgaaggcgtcgtggatggtggcgatgagcgtgggcgccgtggaggcgctcaaggaccagggcggactctgccgctggaactacgcgctgcggtccatccacaaagcagccaaggccaacgccgccggcgtctctcagggcaagaagctgcctgcttctgcggcggcggtggcggagaggaggagagcggagaaggccgaggaggggctgaggacggtcatgtacctcagctgctggggtcccaattgtggctactccttgatgggttgcattaaagatattccgaccctaaaaggagataactacgcagaatggaaaagaaaactcgaccttgcttttatcttgggagaggtggactgggtattgactaccccatgtcctatagaacctgctgaccttgtcagaggtgaaaatgagtcagatgctgactggcaaaagagacagagggacaatgctcctctcgtcatgtcgtatgacattgaacaaaagaaatggtccttagccaacaagaaatgtttggctgtggtaaagaatacaattgagcctaccatattgggctcgatcccagagtgtgacgctgtctcagagtaccttgaaagaataaagagtcagtttactggctcttcaaagacttatgctacacagctgatcaagcagcttgtgacagaaaggtaccatggaggtggtgttagagaccacatacttagaatgagcaacatggcttccaaattgaagccaatggatttgggcataacagatgactttctggtccatctggttatggcctcattgccaaagcagtttgacaattttattgtcaactacaacataagtccagagaaatggaactttgagaagctcattgctaattgtgtgcaagaggaggagagaatcaaagaatcaaatggtggttcaataaactatgttaaagataagaaaaagaaccacaagtctcccacctcaaaaggtaaacagtctcagcatctgcctcaacaacaacagttcgctgttgagaaagatcaatgtctccactgcaagaagacaggacactacaagaaagattgtcctgactttttgaaaatgatcatggcaaagaaaggtgagaacattattacatttgtaaatgaatctcattatgttggttactctagatccacatggtggattgattctggagcaactattcatgcttgtaattgtttaaaggcattccgttcgacgaggactacgcaaagaagagaaagcaccattagagttgccaatggagttgaagaaaaagttgaagctgttggagatcttcctctagagctcgcgaatggcttcatacttttacttcgagatgtcttttatgttccttctttgcaaaggaacttaataagtgtatcaaagttggattttgatggatatgattgccgctttggaagtggcaaatgtgaactatggcataataatgcatgtattggtcttgctgtgttgcgagacgagctttatttgttatctctttctgagaatgtgaatgttgtgtcctcgttgacaaaagaaaacaagaaaagaaagcgaactcccgatgtctcatcgaaattatggcactgtcgtttgggccatatttcgagggggagaattgagagactagttaagaatgaaattcttcctccattggagttctcagacttagaacaatgcatagaatgcattaaaggaaaatttgtaaagagcatcaaaaagggtgcaaaacgaagcgcaggaattttagagatcattcatacagatatttgtggtccatttcctgtgaaaagtgtggatggctatgactcgttcataacattcacagatgattactcccgctatggttatatttatccaattaaagagcgatcagaagcactggataaatttaagatattcaaagctgaagttgaaaatcagcatgatataaagattaaagtagtaagatctgaccgtgggggggagtactatggtcgacatacgccttatgggcaagtccctggaccttttgcaaggttcttgctagagaatggaatagtagcccagtattcaacaccgggcgaacctcaacagaatggggtagcagaaaggcgcaaccgtacgcttatggatatggtgcgcagcatgatgagctactccacactaccactcggtttatggatggaggcgttaaaaaccaccattcatattctcaacagagttccaagcaaatcggtgcccaaaacaccgtatgagctatggacagggagagtaccctcgctaactcacctccgtgtgtgggggagtcctgcagaggccaaagtatttaacccaaatattgggaagttggaccccaaaacagtcagttgccattttattggctatcctgaaagatcaaaaggctatcgtttctactgtccaaacagttatacaaagtttgtagaaacgagacacgccgtcttcttggaagacgaaatgattagggggagctcggtagtttga

SEQ ID NO: 14429 - DNA, 1980 bp, Oryza sativa
  Clone ID: TFbOSC400762j.C1.o4.fg
atgtcggacttagggggaaagaacggggaaaatggaaatgaagatggagcaagcagcaagggaactccatcacccaagggagctactataccttttgattacagcaaacttaccattccccctcacaactttgtctccgtgccttccgggcgtgctcctcaatttgatgggacacattacgccgcttggaagcacaagatgaagttgcatctaatctctttgcatccaagtatttggaaagttgtttgtacaggtgttgatgtaccccatgatgacatgaagctcactttggagcaagagcaactcatccaccgcaatgctcaagcttccaatgcaaattctctccgccttgagtccggaggagttcaacaagaggaagctcatgaagtgaggcaaatggtgaagaatgccgccatgatcaaaaatcaagaagttgctttgaaggcaaaacaagaagaagagtcaagttgtgaagaaagtgaagatgaagagatggcttttattgtcaagagattcaagcactttattcgcaagagtggctatggcaaagggagaaatgatgatgacaagggaaagaggcaatcaaagagagcttggtttaattgtggcgaatatggccacttcattgccgattgtcccaagtcaaataaagctaaggctaagggaggcaagaagaagccggagcgtgctcatgtggcggaggcacacatggcggaggtgtggtactccggagatgaagaagatctcgaggtcaagcccaagcccaagccaaaagacaaggttgaaggagaatgtggtgttgctaccgtcgccttcaagtcatcctcttcaagtaaggagtgtctcttcaacaacttgagtgatgacgacgacgactcctaccactactcttgtttcatggctcaaggccgtaaggtgatgactcaaaagccctctcacacctctcttgatgttgattctaatgatgaggaaagtgataatgaattagatgatgtgcttaagagctttagcaaacccgctatgcaacatttggctaagttaatgagagctttggatagtaaagaacaatctctcgaaaggcaagaagaattacttattcttgagaagaaaagaaaccttgccttagaggagagcctagctaaagaatgtgctaaaaatgaacaactagctaatgagcttaatttggctaatggttctctagctagccttagggatgccaatgaaactcttcaagagaaatttgctagtttagacaaaagtcataaagatcttgaagttcaatttgacactctttggaataacacttctcaaccaaatgtggtttctaattcttccaatccatctactagcaatggttgtgctaggtgttacaatattgatttgaactctcatgctactaatgttgatgctatgcaagctcttaagaaagagaataaaaggttgggcacattggtgaaatatggatgcatgaagacataccattcaaaagatgccctttacaagaccatcaccgctcatcctaacaaggatggacacgggctcgggttttctggtggaagtcctgtgtctaagcatgtgatggtaaatgtgaaagaatgcttaatgtttgtgagagaaggaaaagctccacaagcaagtgaggtgacttgtcccctcactggtcagacacctggaagttccgggcaaaatgaccggaagttcctgccctgtaagacaggaagttccaggaagttccgggcttctgataggccgaaggggctgactggaagttccgggtataatgccaggaagttccggccagagggtctttactatgatttatatgtaatttccaaaaattcagagggcaaagtggttgcttattttaatgggaattacaatgatgagtaccgcacttgtgtgtgggtgccaaagggtttggtgactaacatcaagggacccaaacttagacaagtttgggttcctaaatcccaagcttga

SEQ ID NO: 14430 - DNA, 4218 bp, Oryza sativa
  Clone ID: TFbOSC401215j.C1.o30.fg
atgtccggcgcctcttcctccacgaactcctcaaccggtggctactccttgatgggttgcattaaagatattccgaccctaaaaggagataactacgcagaatggaaaagaaaactcgaccttgcttttatcttgggagaggtggactgggtattgactaccccatgtcctatagaacctgctgaccttgtcagaggtgaaaatgagtcagatgctgactggcaaaagagacagagggacaatgctcctctcgtcatgtcgtatgacattgaacaaaagaaatggtccttagccaacaagaaatgtttggctgtggtaaagaatacgattgagcctaccatattgggctcgatcccagagtgtgacgctgtctcagagtaccttgaaagaataaagagtcagtttactggctcttcaaagacttatgctacacagctgatcaagcagcttgtgacagaaaggtaccatggaggtggtgttagagaccacatacttagaatgagcaacatggcttccaaattgaagccaatggatttgggcataacagatgactttctggtccatctggttatggcctcattgccaaagcagtttgacaattttattgtcaactacaacataagtccagagaaatggaactttgagaagctcattgctaattgtgtgcaagaggaggagagaatcaaagaatcaaatggtggttcaataaactatgttaaagataagaaaaagaaccacaagtctcccacctcaaaaggtaaacagtctcagcatctgcctcaacaacaacagttcgctgttgagaaagatcaatgtctccactgcaagaagacaggacactacaagaaagattgtcctgactttttgaaaatgatcatggcaaagaaaggtgagaacattattacatttgtaaatgaatctcattatgttggttactctagatccacatggtggattgattctggagcaactattcatgcttgtaattgtttaaaggcattccgttcgacgaggactacgcaaagaagagaaagcaccattagagttgccaatggagttgaagaaaaagttgaagctgttggagatcttcctctagagctcgcgaatggcttcatacttttacttcgagatgtcttttatgttccttctttgcaaaggaacttaataagtgtatcaaagttggattttgatggatatgattgccgctttggaagtggcaaatgtgaactatggcataataatgcatgtattggtcttgctgtgttgcgagacgagctttatttgttatctctttctgagaatgtgaatgttgtgtcctcgttgacaaaagaaaacaagaaaagaaagcgaactcccgatgtctcatcgaaattatggcactgtcgtttgggccatatttcgagggggagaattgagagactagttaagaatgaaattcttcctccattggagttctcagacttagaacaatgcatagaatgcattaaaggaaaatttgtaaagagcatcaaaaagggtgcaaaacgaagcgcgggaattttagagatcattcatacagatatttgtggtccatttcctgtgaaaagtgtggatggctatgactcgttcataacattcacagatgattactcccgctatggttatatttatccaattaaagagcgatcagaagcattggataaatttaagatattcaaagctgaagttgaaaatcagcatgatataaagattaaagtagtaagatctgaccgtgggggggagtactatggtcgacatacgccttatgggcaagtccctggaccttttgcaaggttcttgctagagaatggaatagtagcccagtattcaacaccgggcgaacctcaacagaatggggtagctgaaaggcgcaaccgtacccttatggatatggtgcgcagcatgatgagctactccacactaccactcggtttatggatggaggcgttaaaaaccgccattcatattctcaacagagttccaagcaaatcggtgcccaaaacaccgtatgagctatggacaggaagagtaccctcgctaactcacctccgtgtgtgggggagtcctgcagaggccaaagtatttaacccaaatattgggaagttggaccccaaaacagtcagctgccattttattggctatcctgaaagatcaaaaggctatcgtttctactgtccaaacagttatacaaagtttgtagaaacgagacacgccgtcttcttggaagacgaaatgattagggggagctcggtagttcgagaaattgatcttgaggagaggcgggtgtctgtacccgctccgtcgactcaggaacctttcttctctctacctgctgatgttgtgcctgcaatgcctgtcattgaggtaccagcacctgttgttacccctcctgtggcaacaatgaatgagagtgaggaacctgttatacaggattcaacagaaatggttgccacaccagaggaggagctacaacaacctcaaatagataatgtgccagtacaggagactcatcaagagcctcaggtacaggatgtgccaaatgtgcaggcccctagaaggtctgaaagagtcagaagatcggctatccgtgatgactataaagtttataatatagaagagtcgcatatggaggatgatcccacctcatatgaagaggccatgagaagcgctcgctcatctgaatggttggaagccatgaaagatgaaatggaatcaatgaaactaaacgatgtttgggatttagaagaaattcctaaaggagccaaaacagtaggctgtaaatgggtctacaaaaccaaatatgactccagagggaatatagaaaagtttaaagcgcgacttgtggcaaaaggcttcacgcaacgagaagggattgattacaatgagacattttctccagtctcttgtaaagattccttcaggattataatggcactagtggcacattatgatttggaattacatcagatggatgtaaaaacggcatttctaaatggagatttggaggaaaaagtatacatggcacaaccgaaaggttttgtcatgaaaggaaacgaaaatatgggatgtcgtctaaagagatccatttatggattaaagcaagcttcgagacagtggtacttgaagtttgatgggacaataaataaatttgggtttcaagagaatgtcgaggacaactgtatttattcaaagtttaagaatgggagatttattttcctaattctgtatgtggatgacattctactggctagtagtgatgtcagtctactgcaggaaacaaagaaattcttgtcctcaaactttgacatgaaagacctcggtgaggcttcatatgttttgggcatagagattcaccgagatagaacaaagtatgcattgggactttctcaaaagacatatatagaaaaggtgttgaagaaattcaacatgtacagatgcagtgctacacctgctcctataatgaaaggcgaaaagtatggggcatcgcaatgtcccagaaatcagtatgagctcaatgaaatgaaaacaaagccatatgcgtcagctgtaggaagcctacagtacgcgcaagtgtgcacacgacctgacttggcatttgttaccgggttacttggcagatttcagagtaatccaggcctagagcactggaaattggtaaagaaagtcttgcgttatttgcaaggaacaaaaggcctcatgctgtcttacagaagatcagaatcactccagatagtggggtactcagattctgactttgcaaaagataatacaaagtcaacatcgggatacgtgtttaccctggcaggaggagctatttcatggaaaagctcaaaacagactatcactgcagggtctactatgtatgccgagtttatagcatgctatgaggcaacggggcaggtgaactggctaaagaagttcatacccggtttaaaggtggttgacagtattgagaaaccactaaagttatactgcgacaacgaacccgcagtaatgtacgctcacaacaatcagtcaagtggtgctgccaaacacattgacataaagtactatgttgtgaaggacaaagtccgggatcaaacaatcagtctcgagcacattaaaacagaaaggatgctcgcggatccgctcacgaaaggcctaccacccaacgtgttcaaggaacatgtagccggcatgggtttaagggaagccttatga

SEQ ID NO: 14431 - DNA, 1173 bp, Oryza sativa
  unsure (1)..(1173): unsure at all n locations
  Clone ID: TFbOSC401215j.C1.o34.fg
atggcgacgccgtccacgcggtcgcgtggctactccttgatgggttgcattaaagatattccgaccctaaaaggagataactacgcagaatggaaaagaaaactcgaccttgcttttatcttgggagaggtggactgggtattgactaccccatgtcctatagaacctgctgaccttgtcagaggtgaaaatgagtcagatgctgactggcaaaagagacagagggacaatgctcctctcgtcatgtcgtatgacattgaacaaaagaaatggtccttagccaacaagaaatgtttggctgtggtaaagaatacgattgagcctaccatattgggctcgatcccagagtgtgacgctgtctcagagtaccttgaaagaataaagagtcagtttactggctcttcaaagacttatgctacacagctgatcaagcagcttgtgacagaaaggtacaatggaggtggtgttagagaccacatacttagaatgagcaacatggcttccaagttgaagccaatggatttgggcataacagatgactttctggtccatctggttatggcctcattgccaaagcagtttgacaattttattgtcaactacaacataagtccagagaaatggaactttgagaagctcattgctaattgtgtgcaagaggaggagagaatcaaagaatcaaatggtggttcaataaactatgttaaagataagaaaaagaaccacaagtctcccacctcaaaaggtaaacagtctcagcatctgcctcagcaacaacagttcgctgttgagaaagatcaatgtctccactgcaagaagacaggacactacaagaaagattgtcctgattttttgaaaatgatcatggcaaagaaaggactacgcaaagaagagaaagcaccattagagttgccaatggagttgaagaaaaagttgaagctgnttggagatcttcctntagagctcgcgaatggcttcatacttttacttcgagatgtcttttatgttccttctttgcaaagaaacttaataagtgtatcaaagttggattttgatggatatgattnccgctttggaagtggcaaatgtgaactatggcataataatgcatgtattggncttgctgtgttgcgagacgagctttatttgntatcctctttcttgagaatgtga

SEQ ID NO: 14432 - DNA, 4206 bp, Oryza sativa
  Clone ID: TFbOSC401218j.C1.o17.fg
atggcgacgccgtccacgcggtcgcgtggctactccttgatgggttgcattaaagatattccgaccctaaaaggagataactacgcagaatggaaaagaaaactcgaccttgcttttatcttgggagaggtggactgggtattgactaccccatgtcctatagaacctgctgaccttgtcagaggtgaaaatgagtcagatgctgactggcaaaagagacagagggacaatgctcctctcgtcatgtcgtatgacattgaacaaaagaaatggtccttagccaacaagaaatgtttggctgtggtaaagaatacgattgagcctaccatattgggctcgatcccagagtgtgacgctgtctcagagtaccttgaaagaataaagagtcagtttactggctcttcaaagacttatgctacacagctgatcaagcagcttgtgacagaaaggtacaatggaggtggtgttagagaccacatacttagaatgagcaacatggcttccaaattgaagccaatggatttgggcataacagatgactttctggtccatctggttatggcctcattgccaaagcagtttgacaattttattgtcaactacaacataagtccagagaaatggaactttgagaagctcattgctaattgtgtgcaagaggaggagagaatcaaagaatcaaatggtggttcaataaactatgttaaagataagaaaaagaaccacaagtctcccacctcaaaaggtaaacagtctcagcatctgcctcaacaacaacagttcgctgttgagaaagatcaatgtctccactgcaagaagacaggacactacaagaaagattgtcctgattttttgaaaatgatcatggcaaagaaaggtgagaacattattacatttgtaaatgaatctcattatgttggttactctagatccacatggtggattgattctggagcaactattcatgcttgtaattgtttaaaggcattccgttcgacgaggactacgcaaagaagagaaagcaccattagagttgccaatggagttgaagaaaaagttgaagctgttggagatcttcctctagagctcgcgaatggcttcatacttttacttcgagatgtcttttatgttccttctttgcaaagaaacttaataagtgtatcaaagttggattttgatggatatgattgccgctttggaagtggcaaatgtgaactatggcataataatgcatgtattggtcttgctgtgttgcgagacgagctttatttgttatctctttctgagaatgtgaatgttgtgtcctcgttgacaaaagaaaacaagaaaagaaagcgaactcccgatgtctcatcgaaattatggcactgtcgtttgggccatatttcgagggggagaattgagagactagttaagaatgaaattcttcctccattggagttctcagacttagaacaatgcatagaatgcattaaaggaaaatttgtaaagagcatcaaaaagggtgcaaaacgaagcgcgggaattttagagatcattcatacagatatttgtggtccatttcctgtgaaaagtgtggatggctatgactcgttcataacattcacagatgattactcccgctatggttatatttatccaattaaagagcgatcagaagcattggataaatttaagatattcaaagctgaagttgaaaatcagcatgatataaagattaaagtagtaagatctgaccgtgggggggagtactatggtcgacatacgccttatgggcaagtccctggaccttttgcaaggttcttgctagagaatggaatagtagcccagtattcaacaccgggcgaacctcaacagaatggggtagctgaaaggcgcaaccgtacccttatggatatggtgcgcagcatgatgagctactccacactaccactcggtttatggatggaggcgttaaaaaccgccattcatattctcaacagagttccaagcaaatcggtgcccaaaacaccgtatgagctatggacaggaagagtaccctcgctaactcacctccgtgtgtgggggagtcctgcagaggccaaagtatttaacccaaatattgggaagttggaccccaaaacagtcagctgccattttattggctatcctgaaagatcaaaaggctatcgtttctactgtccaaacagttatacaaagtttgtagaaacgagacacgccgtcttcttggaagacgaaatgattagggggagctcggtagttcgagaaattgatcttgaggagaggcgggtgtctgtacccgctccgtcgactcaggaacctttcttctctctacctgctgatgttgtgcctgcaatgcctgtcattgaggtaccagcacctgttgttacccctcctgtggcaacaatgaatgagagtgaggaacctgttatacaggattcaacagaaatggttgccacaccagaggaggagctacaacagcctcaaatagataatgtgccagtacaggagactcatcaagagcctcaggtacaggatgtgccaaatgtgcaggcccctagaaggtctgaaagagtcagaagatcggctatccgtgatgactataaagtttataatatagaagagtcgcatatggaggatgatcccacctcatatgaagaggccatgagaagcgctcgctcatctgaatggttggaagccatgaaagatgaaatggaatcaatgaaactaaacgatgtttgggatttagaagaaattcctaaaggagccaaaacagtaggctgtaaatgggtctacaaaaccaaatatgactccagagggaatatagaaaagtttaaagcgcgacttgtggcaaaaggcttcacgcaacgagaagggattgattacaatgagacattttctccagtctcttgtaaagattccttcaggattataatggcactagtggcacattatgatttggaattacatcagatggatgtaaaaacggcatttctaaatggagatttggaggaaaaagtatacatggcacaaccgaaaggttttgtcatgaaaggaaacgaaaatatgggatgtcgtctaaagagatccatttatggattaaagcaagcttcgagacagtggtacttgaagtttgatgggacaataaataaatttgggtttcaagagaatgtcgaggacaactgtatttattcaaagtttaagaatgggagatttattttcctaattctgtatgtggatgacattctactggctagtagtgatgtcagtctactgcaggaaacaaagaaattcttgtcctcaaactttgacatgaaagacctcggtgaggcttcatatgttttgggcatagagattcaccgagatagaacaaagtatgcattgggactttctcaaaagacatatatagaaaaggtgttgaagaaattcaacatgtacagatgcagtgctacacctgctcctataatgaaaggcgaaaagtatggggcatcgcaatgtcccagaaatcagtatgagctcaatgaaatgaaaacaaagccatatgcgtcagctgtaggaagcctacagtacgcgcaagtgtgcacacgacctgacttggcatttgttaccgggttacttggcagatttcagagtaatccaggcctagagcactggaaattggtaaagaaagtcttgcgttatttgcaaggaacaaaaggcctcatgctgtcttacagaagatcagaatcactccagatagtggggtactcagattctgactttgcaaaagataatacaaagtcaacatcgggatacgtgtttaccctggcaggaggagctatttcatggaaaagctcaaaacagactatcactgcagggtctactatgtatgccgagtttatagcatgctatgaggcaacggggcaggtgaactggctaaagaagttcatacccggtttaaaggtggttgacagtattgagaaaccactaaagttatactgcgacaacgaacccgcagtaatgtacgctcacaacaatcagtcaagtggtgctgccaaacacattgacataaagtactatgttgtgaaggacaaagtccgggatcaaacaatcagtctcgagcacattaaaacagaaaggatgctcgcggatccgctcacgaaaggcctaccacccaacgtgttcaaggaacatgtagccggcatgggtttaagggaagccttatga

SEQ ID NO: 14433 - DNA, 4206 bp, Oryza sativa
  Clone ID: TFbOSC401218j.C1.o21.fg
atggcgacgccgtccacgcggtcgcgtggctactccttgatgggttgcattaaagatattccgaccctaaaaggagataactacgcagaatggaaaagaaaactcgaccttgcttttatcttgggagaggtggactgggtattgactaccccatgtcctatagaacctgctgaccttgtcagaggtgaaaatgagtcagatgctgactggcaaaagagacagagggacaatgctcctctcgtcatgtcgtatgacattgaacaaaagaaatggtccttagccaacaagaaatgtttggctgtggtaaagaatacgattgagcctaccatattgggctcgatcccagagtgtgacgctgtctcagagtaccttgaaagaataaagagtcagtttactggctcttcaaagacttatgctacacagctgatcaagcagcttgtgacagaaaggtaccatggaggtggtgttagagaccacatacttagaatgagcaacatggcttccaaattgaagccaatggatttgggcataacagatgactttctggtccatctggttatggcctcattgccaaagcagtttgacaattttattgtcaactacaacataagtccagagaaatggaactttgagaagctcattgctaattgtgtgcaagaggaggagagaatcaaagaatcaaatggtggttcaataaactatgttaaagataagaaaaagaaccacaagtctcccacctcaaaaggtaaacagtctcagcatctgcctcaacaacaacagttcgctgttgagaaagatcaatgtctccactgcaagaagacaggacactacaagaaagattgtcctgactttttgaaaatgatcatggcaaagaaaggtgagaacattattacatttgtaaatgaatctcattatgttggttactctagatccacatggtggattgattctggagcaactattcatgcttgtaattgtttaaaggcattccgttcgacgaggactacgcaaagaagagaaagcaccattagagttgccaatggagttgaagaaaaagttgaagctgttggagatcttcctctagagctcgcgaatggcttcatacttttacttcgagatgtcttttatgttccttctttgcaaagaaacttaataagtgtatcaaagttggattttgatggatatgattgccgctttggaagtggcaaatgtgaactatggcataataatgcatgtattggtcttgctgtgttgcgagacgagctttatttgttatctctttctgagaatgtgaatgttgtgtcctcgttgacaaaagaaaacaagaaaagaaagcgaactcccgatgtctcatcgaaattatggcactgtcgtttgggccatatttcgagggggagaattgagagactagttaagaatgaaattcttcctccattggagttctcagacttagaacaatgcatagaatgcattaaaggaaaatttgtaaagagcatcaaaaagggtgcaaaacgaagcgcaggaattttagagatcattcatacagatatttgtggtccatttcctgtgaaaagtgtggatggctatgactcgttcataacattcacagatgattactcccgctatggttatatttatccaattaaagagcgatcagaagcattggataaatttaagatattcaaagctgaagttgaaaatcagcatgatataaagattaaagtagtaagatctgaccgtgggggggagtactatggtcgacatacgccttatgggcaagtccctggaccttttgcaaggttcttgctagagaatggaatagtagcccagtattcaacaccgggcgaacctcaacagaatggggtagctgaaaggcgcaaccgtacccttatggatatggcgcgcagcatgatgagctactccacactaccactcggtttatggatggaggcgttaaaaaccgccattcatattctcaacagagttccaagcaaatcggtgcccaaaacaccgtatgagctatggacagggagagtaccctcgctaactcacctccgtgtgtgggggagtcctgcagaggccaaagtatttaacccaaatattgggaagttggaccccaaaacagtcagttgccattttattggctatcctgaaagatcaaaaggctatcgtttctactgtccaaacagttatacaaagtttgtagaaacgagacacgccgtcttcttggaagacgaaatgattagggggagctcggtagttcgagaaattgatcttgaggagaggcgggtgtctgtacccgctccgtcgactcaggaacctttcttctctctacctgctgatgttgtgcctgcaatgcctgtcattgaggtaccagcacctgttgttacccctcctgtggcaacaatgaatgagagtgaggaacctgttatacaggattcaacagaaatggttgccacaccagaggaggagctacaacaacctcaaatagataatgtgccagtacaggagactcatcaagagcctcaggtacaggatgtgccaaatgtgcaggcccctagaaggtctgaaagagtcagaagatcggctatccgtgatgactataaagtttataatatagaagagtcgcatatggaggatgatcccacctcatatgaagaggccatgagaagcgctcgctcatctgaatggttggaagccatgaaagatgaaatgaaatcaatgaaactaaacgatgtttgggatttagaagaaattcctaaaggagccaaaacagtaggctgtaaatgggtctacaaaaccaaatatgactccagagggaatatagaaaagtttaaagcgcgacttgtggcaaaaggcttcacgcaacgagaagggattgattacaatgagacattttctccagtctcttgtaaagattccttcaggattataatggcactagtggcacattatgatttggaattacatcagatggatgtaaaaacggcatttctaaatggagatttggaggaaaaagtatacatggcgcaaccaaaaggttttgtcatgaaaggaaacgaaaatatgggatgtcgtctaaagagatccatttatggattaaagcaagcttcgagacagtggtacttgaagtttgatgggacaataaagaaatttgggtttcaagagaatgtcgaggacaactgtatttattcaaagtttaagaatgggagatttattttcctaattctgtatgtggatgacattctactggctagtagtgatgtcagtctactgcaggaaacaaagaaattcttgtcctcaaactttgacatgaaagacctcggtgaggcttcatatgttttgggcatagagattcaccgagatagaacaaagtatgcattgggactttctcaaaagacatatatagaaaaggtgttgaagaaattcaacatgtacagatgcagtgctacacctgctcctataatgaaaggcgaaaagtatggggcatcgcaatgtcccagaaatcagtatgagctcaatgaaatgaaaacaaagccatatgcgtcagctgtaggaagcctacagtacgcgcaagtgtgcacacgacctgacttggcatttgttaccgggttacttggcagatttcagagtaatccaggcctagagcactggaaattggtaaagaaagtcttgcgttatttgcaaggaacaaaaggcctcatgctgtcttacagaagatcagaatcactccagatagtggggtactcagattctgactttgcaaaagataatacaaagtcaacatcgggatacgtgtttaccctggcaggaggagctatttcatggaaaagctcaaaacagactatcactgcagggtctactatgtatgccgagtttatagcatgctatgaggcaacggggcaggtgaactggctaaagaagttcatacccggtttaaaggtggttgacagtattgagaaaccactaaagttatactgcgacaacgaacccgcagtaatgtacgctcacaacaatcagtcaagtggtgctgccaaacacattgacataaagtactatgttgtgaaggacaaagtccgggatcaaacaatcagtctcgagcacattaaaacagaaaggatgctcgcggatccgctcacgaaaggcctaccacccaacgtgttcaaggaacatgtagccggcatgggtttaagggaagccttatga

SEQ ID NO: 14434 - DNA, 4218 bp, Oryza sativa
  Clone ID: TFbOSC401275j.C1.o16.fg
atggccggcacttcttcatcctccaacacctcaaccggtggctactccttgatgggttgcattaaagatattccgaccctaaaaggagataactacgcagaatggaaaagaaaactcgaccttgcttttatcttgggagaggtggactgggtattgactaccccatgtcctatagaacctgctgaccttgtcagaggtgaaaatgagtcagatgctgactggcaaaagagacagagggacaatgctcctctcgtcatgtcgtatgacattgaacaaaagaaatggtccttagccaacaagaaatgtttggctgtggtaaagaatacgattgagcctaccatattgggctcgatcccagagtgtgacgctgtctcagagtaccttgaaagaataaagagtcagtttactggctcttcaaagacttatgctacacagctgatcaagcagcttgtgacagaaaggtaccatggaggtggtgttagagaccacatacttagaatgagcaacatggcttccaagttgaagccaatggatttgggcataacagatgactttctggtccatctggttatggcctcattgccaaagcagtttgacaattttattgtcaactacaacataagtccagagaaatggaactttgagaagctcattgctaattgtgtgcaagaggaggagagaatcaaagaatcaaatggtggttcaataaactatgttaaagataagaaaaagaaccacaagtctcccacctcaaaaggtaaacagtctcagcatctgcctcaacaacaacagttcgctgttgagaaagatcaatgtctccactgcaagaagacaggacactacaagaaagattgtcctgactttttgaaaatgatcatggcaaagaaaggtgagaacattattacatttgtaaatgaatctcattatgttggttactctagatccacatggtggattgattctggagcaactattcatgcttgtaattgtttaaaggcattccgttcgacgaggactacgcaaagaagagaaagcaccattagagttgccaatggagttgaagaaaaagttgaagctgttggagatcttcctctagagctcgcgaatggcttcatacttttacttcgagatgtcttttatgttccttctttgcaaagaaacttaataagtgtatcaaagttggattttgatggatatgattgccgctttggaagtggcaaatgtgaactatggcataataatgcatgtattggtcttgctgtgttgcgagacgaactttatttgttatctctttctgagaatgtgaatgttgtgtcctcgttgacaaaagaaaacaagaaaagaaagcgaactcccgatgtctcatcgaaattatggcactgtcgtttgggccatatttcgagggggagaattgagagactagttaagaatgaaattcttcctccattggagttctcagacttagaacaatgcatagaatgcattaaaggaaaatttgtaaagagcatcaaaaagggtgcaaaacgaagcgcaggaattttagagatcattcatacagatatttgtggtccatttcctgtgaaaagtgtggatggctatgactcgttcataacattcacagatgattactcccgctatggttatatttatccaattaaagagcgatcagaagcattggataaatttaagatattcaaagctgaagttgaaaatcagcatgatataaagattaaagtagtaagatctgaccgtgggggggagtactatggtcgacatacgccttatgggcaagtccctggaccttttgcaaggttcttgctagagaatggaatagtagcccagtattcaacaccgggcgaacctcaacagaatggggtagctgaaaggcgcaaccgtaccctcatggatatggtgcgcagcatgatgagctactccacactaccactcggtttatggatggaggcgttaaaaaccgccattcatattctcaacagagttccaagcaaatcggtgcccaaaacaccgtatgagctatggacaggaagagtaccctcgctaactcacctccgtgtgtgggggagtcctgcagaggccaaagtatttaacccaaatattgggaagttggaccccaaaacagtcagctgccattttattggctatcctgaaagatcaaaaggctatcgtttctactgtccaaacagttatacaaagtttgtagaaacgagacacgccgtcttcttggaagacgaaatgattagggggagctcggtagttcgagaaattgatcttgaggagaggcgggtgtctgtacccgctccgtcgactcaggaacctttcttctctctacctgctgatgttgtgcctgcaatgcctgtcattgaggtaccagcacctgttgttacccttcctgtggcaacaatgaatgagagtgaggaacctgttatacaggattcaacagaaatggttgccacaccagaggaggagctacaacagtctcaaatagataatgtgccagtacaggagactcatcaagagcctcaggtacaggatgtgccaaatgtgcaggcccctagaaggtctgaaagagtcagaagatcggctatccgtgatgactataaagtttataatatagaagagtcgcatatggaggatgatcccacctcatatgaagaggccatgagaagcgctcgctcatctgaatggttggaatccatgaaagatgaaatggaatcaatgaaactaaacgatgtttgggatttagaagaaattcctaaaggagccaaaacagtaggctgtaaatgggtctacaaaaccaaatatgactccagagggaatatagaaaagtttaaagcgcgacttgtggcaaaaggcttcacacaacgagaagggattgattacaatgagacattttctccagtctcttgtaaagattccttcaggattataatggcactagtggcacattatgatttggaattacatcagatggatgtaaaaacggcatttctaaatggagatttggaggaaaaagtatacatggcgcaaccgaaaggttttgtcatgaaaggaaacgaaaatatgggatgtcgtctaaagagatccatttatggattaaagcaagcttcgagacagtggtacttgaagtttgatgggacaataaagaaatttgggtttcaagagaatgtcgaggacaactgtatttattcaaagtttaagaatgggagatttattttcctaattctgtatgtggatgacattctactggctagtagtgatgtcagtctactgcaggaaacaaagaaattcttgtcctcaaactttgacatgaaagacctcggtgaggcttcatatgttttgggcatagagattcaccgagatagaacaaagtatgcattgggactttctcaaaagacatatatagaaaaggtgttgaagaaattcaacatgtacagatgcagtgctacacctgctcctataatgaaaggcgaaaagtatggggcatcgcaatgtcccagaaatcagtttgagctcaatgaaatgaaaacaaagccatatgcgtcagctgtaggaagcctacagtacgcgcaagtgtgcacacgacctgacttggcatttgttaccgggttacttggcagatttcagagtaatccaggcctagagcactggaaattggtaaagaaagtcttgcgttatttgcaaggaacaaaaggcctcatgctgtcttacagaagatcagaatcactccagatagtggggtactcagattctgactttgcaaaagataatacaaagtcaacatcgggatatgtgtttaccctggcaggaggagctatttcatggaaaagctcaaaacagactatcactgcagggtctactatgtatgccgagtttatagcatgctatgaggcaacggggcaggtgaactggctaaagaagttcatacccggtttaaaggtggttgacagtattgagaaaccactaaagttatactgcgacaacgaacccgcagtaatgtacgctcacaacaatcagtcaagtggtgctgccaaacacattgacataaagtactatgttgtgaaggacaaagtccgggatcaaacaatcagtctcgagcacattaaaacagaaaggatgctcgcggatccgctcacgaaaggcctaccacccaacgtgttcaaggaacatgtagccggcatgggtttaagggaagccttatga

SEQ ID NO: 14435 - DNA, 4113 bp, Oryza sativa
  Clone ID: TFbOSC401336j.C1.o1.fg
atggctggtgggccccgtcacactgcgccatataaaagaggggtggaggccggcacggcacgaggtggctactccttgatgggttgcattaaagatattccgaccctaaaaggagataactacgcagaatggaaaagaaaactcgaccttgcttttatcttgggagaggtggactgggtgttgactaccccatgtcctatagaacctgctgaacttgtcagaggtgaaaatgagtcagatgctgactggcaaaagagacagagggacaatgctcctctcgtcatgtcgtatgacattgaacaaaagaaatggtccttagccaacaagaaatgtttggctgtggtaaagaatacgattgagcctaccatattgggctcgatcccagagtgtgacgctgtctcagagtaccttgaaagaataaagagtcagtttactggctcttcaaagacttatgctacacagctgatcaagcagcttgtgacagaaaggtaccatggaggtggtgttagagaccacatacttagaatgagcaacatggcttccaagttgaagccaatggatttgggcataacagatgactttctggtccatctggttatggcctcattgccaaagcagtttgacaattttattgtcaactacaacataagtccagagaaatggaactttgagaagctcattgctaattgtgtgcaagaggaggagagaatcaaagaatcaaatggtggttcaataaactatgttaaagataagaaaaagaaccacaagtctcccacctcaaaaggtaaacagtctcagcatctgcctcagcaacaacagttcgctgttgagaaagatcaatgtctccactgcaagaagacaggacactacaagaaagattgtcctgactttctgaaaatgatcatggcaaagaaaggtgagaacattattacatttgtaaatgaatctcattatgttggttactctagatccacatggtggattgattctggagcaactattcatgcttgtaattgtttaaaggcattccgttcgacgaggactacgcaaggaagagaaagctccattagagttgccaatggagttgaagaaaaagttgaagctgttggagatcttccgctagagctcgcgaatggcttcacacttttacttcgagatgtcttttatgttccttctttgcaaagaaacttaataagtgtatcaaagttggattttgatggatatgattgccgctttggaagtggcaaatgtgaactatggcataataatgcatgtattggtcttgctgtgttgcgagacgagctttatttgttatctctttctgagaatgtgaatgttgtgtcctcgttgacaaaagaaaacaagaaaagaaagcgaacttccaatgtctcatcgaaattatggcactgtcgtttgggccatatttcgagggggagaattgagagactagttaagaatgaaattctttccccattggagttctcagacttagaacaatgcatagaatgcattaaaggaaaatttgtaaagagcatcaaaaagggtgcaaaacgaagcgcaggaattttagagatcattcatacagatatttgtggtccatttcctgtgaaaagtatggatggctatgactcgttcataacattcacagatgattactcccgctatggttatatttatccaattaaagagcgatcagaagcactggataaatttaagatattcaaagctgaagttgaaaatcagcatgatataaagattaaagtaaatggggtagctgaaaggcgcaaccgtacccttatggatatggtgcgcagcatgatgagctactccacactaccactcggtttatggatggaggcgttaaaaaccgccattcatattctcaacagagttccaagcaaatcggtgcccaaaacaccgtatgagctatggacaggaagagtaccctcgctaactcacctccgtgtgtgggggagtcctacagaggccaaagtatttaacccaaatattgggaagttggaccccaaaacagtcagctgccattttattggctatcctgaaagatcaaaaggctatcgtttctactgtccaaacagttatacaaagtttgtagaaacgagacacgccgtcttcttggaagacgaaatgattagggggagctcggtagttcgagaaattgatcttgaggagaggcgggtgtctgtacccgctccgtcgactcaggaacctttcttctctctacctgctgatgttgtgcctgcaatgcctgtcattgaggtaccagcacctgttgttacccctcctgtggcaacaatgaatgagagtgaggaacctgttatacaggattcaacagaaatggttgccacaccagaggaggagctacaacagcctcaaatagataatgtgccagtacaggagactcatcaagagcctcaggtacaggatgtggcaaatgtgcaggcccctagaaggtctgaaagagtcagaagatcggctatccgtgatgactataaagtttataatatagaagagtcgcatatggaggatgatcccacctcatatgaagaggccatgagaagcgctcgctcatctgaatggttggaagccatgaaagatgaaatgaaatcaatgaaactaaacgatgtttgggatttagaagaaattcctaaaggagccaaaacagtaggctgtaaatgggtctacaaaaccaaatatgactccagagggaatatagaaaagtttaaagcgcgacttgtggcaaaaggcttcacgcaacgagaagggattgattacaatgagacattttctccagtctcttgtaaagattccttcaggattataatggcactagtggcacattatgatttggaattacatcagatggatgtaaaaacggcatttctaaatggagatttggaggaaaaagtatacatggcgcaaccgaaaggttttttcatgaaaggaaacgaaaatatgggatgtcgtctaaagagatccatttatggattaaagcaagcttcgagacagtggtacttgaagtttgatgggacaataaaaaaatttgggtttcaagagaatgtcgaggacaactgtatttattcaaagtttaagaatgggagatttattttcctaattctgtatgtggatgacattctactggctagtagtgatgtcagtctactgcaggaaacaaagaaattcttgtccacaaactttgacatgaaagacctcggtgaggcttcatatgttttgggcatagagattcaccgagatagaacaaagtatgcattgggactttctcaaaagacatatatagaaaaggtgttgaagaaattcaacatgtacagatgcagtgctacacctgctcctataatgaaaggcgaaaagtatggggcatcgcaatgtcccataaatcagtatgagctcaatgaaatgaaaacaaagccatatgtgtcagctgtaggaagcctacagtacgcgcaagtgtgcacacgacctgacttggcatttgttaccgggttacttggcagatttcagagtaatccaggcctagagcactggaaattggtaaagaaagtcttgcgttatttgcaaggaacaaaaggcctcatgctgacttacagaagatcagaatcactccagatagtggggtactcagattctgactttgcaaaagataatacaaagtcaacatcgggatacgtgtttaccctggcaggaggagctatttcatggaaaagctcaaaacagactatcactgcagggtctactatgtatgccgagtttatagcatgctatgaggcaacggggcaggtgaactggctaaagaagttcatacccggtttaaaggtggttgacagtattgagaaaccactaaagttatactgcgacaacgaacccgcagtaatgtacgctcacaacaatcagtcaagtggtgctgccaaacacattgacataaagtactatgttgtgaaggacaaagtccgggatcaaacaatcagtctcgagcacattaaaacagaaaggatgctcgcggatccgctcacgaaaggcctaccacccaacgtgttcaaggaacatgtagccggcatgggtttaagggaagccttatga

SEQ ID NO: 14436 - DNA, 3384 bp, Oryza sativa
  Clone ID: TFbOSC401727j.C1.o3.fg
atgtcgtatgacattgaacaaaagaaatggtccttagccaacaagaaatgtttggctatggtaaagaacacgattgagcctaccatattgggctcaatcccagagtgtgacgctgtctcagagtaccttgaaagaataaagaggcagtttactggctcttcaaagacttatgctacacagctgatcaagcagcttgtgaccgaaaggtaccatggaggtggtgttagagaccacatacttagaatgagcaacatggcttccaagttgaagccaatggatttgggcataacagatgactttctggtccatctggttatggcctcattgccaaagcagtttgacaattttattgtcaactacaacataagtccagagaaatggaactttgaaaaactcattgctaattgtgtgcaagaggaggagagaattaaagagtcaaatggtggttcaattaactatgttaaagataacaagaaaaagaaccacaagtctcccacctcaaaagctaaacagtctcagcatctgcctcagcaacaacagttcgctgttgagaaagatcagtgtctccattgcaagaagacgggacattacaagaaagactgtcctgacttcttgaaaatgatcatggcaaggaaaggtgagaacattgttacatttgtaaatgaatctcattatgttggttactctagatccacatggtggattgattctggagcaattattcatgcttgtaattgtttaaaggcattccgttcgacgaggactacgcaaagaagagaaagctccattagagttgccaatggagttgaaaaaaaagttgaagctgttggagatcttcctctagagctcgcgaatggcttcacacttttacttcgagatgtcttttatgttccttctttgcaaagaaacttaataagtttatcaaagttggattttgatggatatgattgccgctttggaagtggcaaatgtgaactatgtgtggatggctatgactcgttcataacattcacagatgattactcccgctatggttatatttatccaattaaagagcgatcagaagcattggataaatttaagatattcaaagctgaagttgaaaatcagcatgatataaagattaaagtaaatggggtagctgaaaggcgtaaccgtacccttatggatatggtgcgcagcatgatgagctactccacactaccactgggtttatggatggaggcgttaaaaaccgctattcatattctcaacagagttccaagcaaatcggtgcccaaaacaccgtatgagctatggacaggaagcgtaccctcgatagctcacctccgtgtgtgggggagtcctgcagaggctaaagtatttaatccaaatattgggaagttggatcccaaaacagtcagttgccattttattggctatcctgaaagatcaaaaggctatcgtttctactgtccaaacagttatacaaagtttgtagaaacgagacacgccgtcttcttggaagacgaaatgattagggagagctcggtagttcgagaaattgatcttgaggagaggcgggtgtctgtacccgctccgtcgactcaggaacctttcttctctctacctgctgatgttgtgcctgcaatacctgtcattgaggaggagctgcaacagcctcaaatagataatgtgctagtacaggagactcaacaagagcctcaggtacaggatgtgccaaatgtgcaggcccctagaaggtctgaaagagtcaaaagatcggttatccgtgatgactataaagtttataatatagaagagtcgcatatggaggatgatcacacctcatatgaagaggccatgagaagcgctcgctcatctgaatggttggaagtcatgaaagatgaaatgaaattaatgaaactaaacaatgtttgggatttagaagaaattcctaaaggagacaaaacagtaggctgtaagtgggtctacaaaaccaaatatgactccagagggaatatagaaaagtttaaagcgcgacttgtggcaaaaggcttcacgcaacgagaagggattgattacaatgagacattttctccagtctcttgtaaagattccttcaggattataatggcactagtggcacattatgatttggaattacatcagatggatgtaaaaacgacatttctaaatggagatttggaggaaaaagtatacatggcgcaaccgaaaggttttgtcatgaaaggaaacggaaatatgggatgtcgtctaaagagatccatttatgaattaaagcaagcttcgagacagtggtacttgaagtttgatgggacaataaagaaatttgggtttcaagagaatgtcgaggacaactgtatttattcaaagtttaagaatgggagatttattttcctaattctgtatgtggatgacattctactggctagtagtgatgtcagtctactgcaggaaacaaagaaatttttgtcctcaaactttgacatgaaagacctcggtgaggcttcatatgttttgggcatagagattcaccgagatagaacaaagtatgcattgggactttctcaaaagacatatatagaaaaggtgttgaagaaattcaatatgtacagatgcagtgctacacctgctcctatagtcaaaggggaaaagtatggggcatcgcaatgtcccagaaatcagtatgagctcaatgaaatgaaaacaaagccatatgcgtcagctataggaagcctagagtacgcgcaagtgtgcacacgacctaacttggcatttgttattgggttacttggcagatttcagagtaatctaggcccagagcactggaaattggtaaagaaagtcttgcattattttcaaggaacaaaaggcctcatgctgtcttatagaagatcagaatcgcttcagattatggggtattcagattctgattttacaaaagataatacaaagtcaacatcgggatatgtgttcaccctggcaggaggagctatttcatggaaaagctcaaaacagactatcactgcagggtctactatgtatgccgagtttatagcatgctatgaggcaacggggcaggtgaactggctaaagaagttcatactcagtttaaaggtggttgacagtattgagaaaccactaaagttatactgcgacaacgaacccgcagtaatgtacgctcacagcaatcagtcaagtggtgctgccaaacacattgacataaagtactatgttgtgaaggacaaagtccgggatcaaacaatcagtctcgagcacattagaacagaaaggatgctcgcggatccactcacgaaaggcctaccacccaacgtgttcaaggaacatgtagccggcatgggtttaagggaagccttatga

SEQ ID NO: 14437 - DNA, 4224 bp, Oryza sativa
  Clone ID: TFbOSC401892j.C1.o4.fg
atggcgcggcggcgcgagggccgccggcgtcggcgacgccgctcggcgcggccgcgcgcccgcgagaagagaagagaagctagggttttcggcggccggccgggagaggggggttttgatcctccgatctcggcgcccggccgtccgatcgaaaccctagctgatcggacggccggcgccggtggctactccttgatgggttgcattaaagatattccgaccctaaaaggagataactacgcagaatggaaaagaaaactcgaccttgcttttatcttgggagaggtggactgggtgttgactaccccatgtcctatagaacctgctgaacttgtcagaggtgaaaatgagtcagatgctgactggcaaaagagacagagggacaatgctcctctcgtcatgtcgtatgacattgaacaaaagaaatggtccttagccaacaagaaatgtttggctgtggtaaagaatacgattgagcctaccatattgggctcgatcccagagtgtgacactgtctcagagtaccttgaaagaataaagagtcagtttactggctcttcaaagacttatgctacacagctgatcaagcagcttgtgacagaaaggtaccatggaggtggtgttagagaccacatacttagaatgagcaacatggcttccaagttgaagccaatggatttgggcataacagatgactttctagtccatttggttatggcctcattgccaaagcagtttgataattttattgtcaactacaatataagtccagagaaatggaactttgagaagctcattgctaattgtgtgcaagaggaggagagaatcaaagaatcaaatggtggttcaataaactatgttaaagataagaaaaagaaccacaagtctcccacctcaaaaggtaaacagtctcagcatctgcctcagcaacaacagttcgctgttgagaaagatcaatgtctccactgcaagaagacaggacactacaagaaagattgtcctgactttttgaaaatgatcatggcaaagaaaggtgagaacattattacatttgtaaatgaatctcattatgttggttactctagatccacatggtggattgattctggagcaactattcatgcttgtaattgtttaaaggcattccgttcgacgaggactacgcaaagaagagaaagcaccattagagttgccaatggagttgaagaaaaagttgaagctgttggagatcttcctctagagcttgcgaatggcttcatacttttacttcgagatgtcttttatgttccttctttgcaaagaaacttaataagtgtatcaaagttggattttgatggatatgattgccgctttggaagtggcaaatgtgaactatggcataataatgcatgtattggtcttgctgtgttggggagaattgagagactagttaagaatgaaattcttcccccattggagttctcagacttagaacaatgcatagaatgcattaaaggaaaatttgtaaagagcatcaaaaagggtgcaaaacgaagcgcaggaattttagagatcattcatacagatatttgtggtccatttcctgtgaaaagtgtggatggctatgactcattcataacattcacagatgattactcccgctatggttatatttatccaattaaagagcgatcagaagcactggataaatttaagatattcaaagctgaagttgaaaatcagcatgatataaagattaaagtagtaagatctgaccgtgggggggagtactatggtcgacatacgccttatgggcaagtccctggaccttttgcaaggttcttgctagagaatggaatagtagcccagtattcaacaccgggcgaacctcaacagaatggggtagctgaaaggcgcaaccgtacccttatggatatggtgcgcagcatgatgagctactccacactaccactcggtttatggatggaggcgttaaaaaccgccattcatattctcaacagagttccaagcaaatcggtgcccaaaacaccgtatgagctatggacaggaagagtaccctcgctaactcacctccgtgtgtgggggagtcctacagaggccaaagtatttaacccaaatattgggaagttggaccccaaaacagtcagctgccattttattggctatcctgaaagatcaaaaggctatcgtttctactgtccaaacagttatacaaagtttgtagaaacgagacacgccgtcttcttggaagacgaaatgattagggggagctcggtagttcgagaaattgatcttgaggagaggcgggtgtctgtacccgctccgtcgactcaggaacctttcttctctctacctgctgatgttgtgcctgcaatgcctgtcattgaggtaccagcacctgttgttacccctcctgtggcaacaatgaatgagagtgaggaacctgttatacaggattcaacagaaatggttgccacaccagaggaggagctacaacagcctcaaatagataatgtgccagtacaggagactcatcaagagcctcaggtacaggatgtgccaaatgtgcaggcccctagaaggtctgaaagagtaagaagatcggctatccgtgatgactataaagtttataatatagaagagtcgcatatggaggatgatcccacctcatatgaagaggccatgagaagcgctcgctcatctgaatggttggaagccatgaaagatgaaatgaaatcaatgaaactaaacgatgtttgggatttagaagaaattcctaaaggagccaaaacagtaggctgtaaatgggtctacaaaaccaaatatgactccagagggaatatagaaaagtttaaagcacgacttgtggcaaaaggcttcacgcaacgagaagggattgattacaatgagacattttctccagtctcttgtaaagattccttcaggattataatggcactagtggcacattatgatttggaattacatcagatggatgtaaaaacggcatttctaaatggagatttggaggaaaaagtatacatggcgcaaccgaaaggttttgtcatgaaaggaaacgaaaatatgggatgtcgtctaaagagatccatttatggattaaagcaagcttcgagacagtggtacttgaagtttgatgggacaataaagaaatttgggtttcaagagaatgtcgaggacaactgtatttattcaaagtttaagaatgggagatttattttcctaattctgtatgtggatgacattctactggctagtagtgatgtcagtctactgcaggaaacaaagaaattcttgtcctcaaactttgacatgaaagacctcggtgaggcttcatatgttttgggcatagagattcaccgagatagaacaaagtatgcattgggactttctcaaaagacatatatagaaaaggtgttgaagaaattcaacatgtacagatgcagtgctacacctgctcctataatgaaaggcgaaaagtatggggcatcgcaatgtcccagaaatcagtatgagctcaatgaaatgaaaacaaagctatatgcgtcagctgtaggaagcctacagtacgcgcaagtgtgcacacgacctgacttggcatttgttaccgggttacttggcagatttcagagtaatccaggcctagagcactggaaattggtaaagaaagtcttgcgttatttgcaaggaacaaaaggcctcatgctgtcttacagaagatcagaatcactccagatagtggggtactcagattctgactttgcaaaagataatacaaagtcaacatcgggatacgtgtttaccctggcaggaggagctatttcatggaaaagctcaaaacagactatcactgcagggtctactatgtatgccgagtttatagcatgctatgaggcaacggggcaggtgaactggctaaagaagttcatacccggtttaaaggtggttgacagttttgagaaaccactaaagttatactgcgacaacgaacccgcagtaatgtacgctcacaacaatcagtcaagtggtgctgccaaacacattgacataaagtactatgttatgaaggacaaagtccgggatcaaacaatcagtctcgagcacattaaaacagaaaggatgctcgcggatccgctcacgaaaggcctaccacccaacgtgttcaaggaacatgtagccggcatgggtttaagggaagccttatga

SEQ ID NO: 14438 - DNA, 621 bp, Oryza sativa
  Clone ID: TFbOSC401976j.C1.o3.fg
atgtcgtatgacattgaacaaaagaaatggtccttagctaacaagaaatgtttggctgtggtaaagaacacgattgagcctaccatattgggctcaatcccagagtgtgacgctgtctcagagtaccttgaaagaatcaagagtcagtttactggctcttcaaaaacttatgctacacagctgatcaagcagcttgtgacagagaggtactatggaggaggtgttagagaccacatacttaggatgagcaacatggctttcaagttgaagccaatggatttgggcataacagatgactttctggtccatttggttatggcctcattgccaaagcagtttgacaattttattgtcaactacaacataaataataagaaaaagaaccacaagtctcccacctcaaaagctaaacagtctcagcatctacctcagcaacaacagttcgctgttgagaaagatcagtgtctccactgcaagaagacaggacattacaagaaagattgtccagacttcttgaaaatgatcatggcaaggaaaggactacgcaaagaagagaaagctccattagagttgccaatggagttgaagaaaaagttgaagctgttggagatcttcctctag

SEQ ID NO: 14439 - DNA, 3339 bp, Oryza sativa
  Clone ID: TFbOSC405551j.C1.o1.fg
atgtcatggcatagggccggtgtcctgctgctaggggctcagtcctgcctgcctgtcccgggggttccggccgtaggtgggattgggtcggtactcttgtctatggctaggatgggttggaaactatgtcacatctttcgtctgtataccgtggtggaggagagaatcaaagaatcaaatggtggttcaataaactatgttaaagataagaaaaagaaccacaagtctcccacctcaaaaggtaaacagtctcagcatctgcctcagcaacaacagttcgctgttgagaaagatcaatgtctccactgcaagaagacaggacactacaagaaagattgtcctgactttttgaaaatgatcatggcaaagaaaggtgagaacattattacatttgtaaatgaatctcattatgttggttactctagatccacatggtggattgattctggagcaactattcatgcttgtaattgtttaaaggcattccgttcgacgaggactacgcaaagaagagaaagcaccattagagttgccaatggagttgaagaaaaagttgaagctgttggagatcttcctctagagctcgcgaatggcttcatacttttacttcgagatgtcttttatgttccttctttgcaaagaaacttaataagtgtatcaaagttggattttgatggatatgattgccgctttggaagtggcaaatgtgaactatggcataataatgcatgtattggtcttgctgtgttgcgagacgagctttatttgttatctctttctgagaatgtgaatgttgtgttctcattgacaaaagaaaacaagaaaagaaagcgaactcccgatgtctcatcgaaattatggcactgtcgtttgggccatatttcgagggggagaattgagagactagttaagaatgaaattcttcctccattggagttctcagacttagaacaatgcatagaatgcattaaaggaaaatttgtaaagagcatcaaaaagggtgcaaaacgaagcgcaggaattttagagatcattcatacagatatttgtggtccatttcctgtgaaaagtgtggatggctatgactcgttcataacattcacagatgattactcccgctatggttatatttatccaattaaagagcgattagaagcactggataaatttaagatattcaaagctgaagttgaaaatcagcatgatataaagattaaagtagtaagatctgaccgtgggggggagtactatggtcgacatacgccttatgggcaagtccctggaccttttgcaaggttcttgctagagaatggaatagtagcccagtattcaacaccgggcgaacctcaacagaatggggtagctgaaaggcgcaaccgtacccttatggatatggtgcgcagcatgatgagctactccacactaccactcggtttatggatggaggcgttaaaaaccgccattcacattctcaacagagttccaagcaaatcggtgcccaaaacaccgtatgagctatggacaggaagagtaccctcgctaactcacctccgtgtgtgggggagtcctacagaggccaaagtatttaactcaaatattgggaagttggaccccaaaacagtcagctgccattttattagctatcctgaaagatcaaaaggctatcgtttctactatccaaacagttatacaaagtttgtagaaacgagacacgccgtcttcttggaagacgaaatgattagggggagctcggtagttcgagaaattgatcttgaggagaggcgggtgtctgtacccgctccgtcgactcaggaacctttcttctctctacctgctgatgttgtgcctgcaatgcctgtcattgaggtaccagcacctgttgttacccctcctgtcgcaacattgaatgagagtgaggaacctgttatacaggattcaacagaaatggttgccacaccagaggaggagctacaacagcctcaaataaataatgtgccagtacaggagactcatcaagagcctcaggtacaggatgtgccaaatgtgcaggcccctagaaggtctgaaagagtcagaagatcggctatccgtgatgactataaagtttataatatagaagagtcgcatatggaggatgatcccacttcatatgaagaggccatgagaagcgctcgctcatctgaatggttggaatccatgaaagatgaaatgaaatcaatgaaactaaacgatgtttgggatttagaagaaattcctaaaggagccaaaacagtaggctgtaaatgggtctacaaaaccaaatatgactccagagggaatatagaaaagtttaaagcgcgacttgtggcaaaaggcttcacgcaacgagaagggattgattacaatgagacattttctccagtctcttgtaaagattccttcaggattataatggcactagtggcacattatgatttggaattacatcagatggatgtaaaaacggcatttctaaatggagatttggaggaaaaagtatacatggcgcaaccgaaaggttttgtcatgaaaggaaacgaaaatatgggatgtcgtctaaagagatccatttatggattaaagcaagcttcgagacagtggtacttgaagtttgatgggacaataaagaaatttgggtttcaagagaatgtcgaggacaactgtatttattcaaagtttaagaatgggagatttattttcctaattctatatgtggatgacattctactggctagtagtgatgtcagtctactgcaggaaacaaagaaattcttatcctcaaactttgacatgaaagacctcggtgaggcttcatatgttttgggcatagagattcaccgagatagaacaaagtatgcattgggactttctcaaaagacatatatagaaaaggtgttgaagaaattcaacatgtacagatgcagtactacacctgctcctataatgaaaggcgaaaagtatggggcatcgcaatgtcccagaaatcagtatgagctcaatgaaatgaaaacaaagccatatgcgtcagctgtaggaagcctacagtatgcgcaagtgtgcacacgacctgacttggcatttgttaccgggttacttggcagatttcagagtaatccaggcctagagcactggaaattaataaagaaagtcttgcattatttgcaaggaacaaaaggcctcatgctgtcttacagaagatcagaatcactccagatagtggggtactcagattctgactttgcaaaagataatacaaagtcaacatcgggatacgtgtttaccctggcaggaggagctatttcatggaaaagctcaaaatag

SEQ ID NO: 14440 - DNA, 4206 bp, Oryza sativa
  Clone ID: TFbOSC406486j.C1.o2.fg
atggcgacgccgtccacgcggtcgcgtggctactccttgatgggttgcattaaagatattccgaccctaaaaggagataactacgcagaatggaaaagaaaactcgaccttgcttttatcttgggagaggtggactgggtattgactaccccatgtcctatagaacctgctgaccttgtcagaggtgaaaatgagtcagatgctgactggcaaaagagacagagggacaatgctcctctcgtcatgtcgtatgacattgaacaaaagaaatggtccttagccaacaagaaatgtttggctgtggtaaagaatacgattgagcctaccatattgggctcgatcccagagtgtgacgctgtctcagagtaccttgaaagaataaagagtcagtttactggctcttcaaagacttatgctacacagctgatcaagcagcttgtgacagaaaggtaccatggaggtggtgttagagaccacatacttagaatgagcaacatggcttccaaattgaagccaatggatttgggcataacagatgactttctggtccatctggttatggcctcattgccaaagcagtttgacaattttattgtcaactacaacataagtccagagaaatggaactttgagaagctcattgctaattgtgtgcaagaggaggagagaatcaaagaatcaaatggtggttcaataaactatgttaaagataagaaaaagaaccacaagtctcccacctcaaaaggtaaacagtctcagcatctgcctcaacaacaacagttcgctgttgagaaagatcaatgtctccactgcaagaagacaggacactacaagaaagattgtcctgactttttgaaaatgatcatggcaaagaaaggtgagaacattattacatttgtaaatgaatctcattatgttggttactctagatccacatggtggattgattctggagcaactattcatgcttgtaattgtttaaaggcattccgttcgacgaggactacgcaaagaagagaaagcaccattagagttgccaatggagttgaagaaaaagttgaagctgttggagatcttcctctagagctcgcgaatggcttcatacttttacttcgagatgtcttttatgttccttctttgcaaagaaacttaataagtgtatcaaagttggattttgatggatatgattgccgctttggaagtggcaaatgtgaactatggcataataatgcatgtattggtcttgctgtgttgcgagacgagctttatttgttatctctttctgagaatgtgaatgttgtgtcctcgttgacaaaagaaaacaagaaaagaaagcgaactcccgatgtctcatcgaaattatggcactgtcgtttgggccatatttcgagggggagaattgagagactagttaagaatgaaattcttcctccattggagttctcagacttagaacaatgcatagaatgcattaaaggaaaatttgtaaagagcatcaaaaagggtgcaaaacgaagcgcgggaattttagagatcattcatacagatatttgtggtccatttcctgtgaaaagtgtggatggctatgactcgttcataacattcacagatgattactcccgctatggttatatttatccaattaaagagcgatcagaagcattggataaatttaagatattcaaagctgaagttgaaaatcagcatgatataaagattaaagtagtaagatctgaccgtgggggggagtactatggtcgacatacgccttatgggcaagtccctggaccttttgcaaggttcttgctagagaatggaatagtagcccagtattcaacaccgggcgaacctcaacagaatggggtagctgaaaggcgcaaccgtacccttatggatatggtgcgcagcatgatgagctactccacactaccactcggtttatggatggaggcgttaaaaaccgccattcatattctcaacagagttccaagcaaatcggtgcccaaaacaccgtatgagctatggacaggaagagtaccctcgctaactcacctccgtgtgtgggggagtcctgcagaggccaaagtatttaacccaaatattgggaagttggaccccaaaacagtcagttgccattttattggctatcctgaaagatcaaaaggctatcgtttctactgtccaaacagttatacaaagtttgtagaaacgagacacgccgtcttcttggaagacgaaatgattagggggagctcggtagttcgagaaattgatcttgaggagaggcgggtgtctgtacccgctccgtcgactcaggaacctttcttctctctacctgctgatgttgtgcctgcaatgcctgtcattgaggtaccagcacctgttgttacccctcctgtggcaacaatgaatgagagtgaggaacctgttatacaggattcaacagaaatggttgccacaccagaggaggagctacaacaacctcaaatagataatgtgccagtacaggagactcatcaagagcctcaggtacaggatgtgccaaatgtgcaggcccctagaaggtctgaaagagtcagaagatcggctatccgtgatgactataaagtttataatatagaagagtcgcatatggaggatgatcccacctcatatgaagaggccatgagaagcgctcgctcatctgaatggttggaagccatgaaagatgaaatggaatcaatgaaactaaacgatgtttgggatttagaagaaattcctaaaggagccaaaacagtaggctgtaaatgggtctacaaaaccaaatatgactccagagggaatatagaaaagtttaaagcgcgacttgtggcaaaaggcttcacgcaacgagaagggattgattacaatgagacattttctccagtctcttgtaaagattccttcaggattataatggcactagtggcacattatgatttggaattacatcagatggatgtaaaaacggcatttctaaatggagatttggaggaaaaagtatacatggcacaaccgaaaggttttgtcatgaaaggaaacgaaaatatgggatgtcgtctaaagagatccatttatggattaaagcaagcttcgagacagtggtacttgaagtttgatgggacaataaataaatttgggtttcaagagaatgtcgaggacaactgtatttattcaaagtttaagaatgggagatttattttcctaattctgtatgtggatgacattctactggctagtagtgatgtcagtctactgcaggaaacaaagaaattcttgtcctcaaactttgacatgaaagacctcggtgaggcttcatatgttttgggcatagagattcaccgagatagaacaaagtatgcattgggactttctcaaaagacatatatagaaaaggtgttgaagaaattcaacatgtacagatgcagtgctacacctgctcctataatgaaaggcgaaaagtatggggcatcgcaatgtcccagaaatcagtatgagctcaatgaaatgaaaacaaagccatatgcgtcagctgtaggaagcctacagtacgcgcaagtgtgcacacgacctgacttggcatttgttaccgggttacttggcagatttcagagtaatccaggcctagagcactggaaattggtaaagaaagtcttgcgttatttgcaaggaacaaaaggcctcatgctgtcttacagaagatcagaatcactccagatagtggggtactcagattctgactttgcaaaagataatacaaagtcaacatcgggatacgtgtttaccctggcaggaggagctatttcatggaaaagctcaaaacagactatcactgcagggtctactatgtatgccgagtttatagcatgctatgaggcaacggggcaggtgaactggctaaagaagttcatacccggtttaaaggtggttgacagtattgagaaaccactaaagttatactgcgacaacgaacccgcagtaatgtacgctcacaacaatcagtcaagtggtgctgccaaacacattgacataaagtactatgttgtgaaggacaaagtccgggatcaaacaatcagtctcgagcacattaaaacagaaaggatgctcgcggatccgctcacgaaaggcctaccacccaacgtgttcaaggaacatgtagccggcatgggtttaagggaagccttatga

SEQ ID NO: 14441 - DNA, 4218 bp, Oryza sativa
  Clone ID: TFbOSC406486j.C1.o6.fg
atggccggcacttcttcatcctccaacacctcaaccggtggctactccttgatgggttgcattaaagatattccgaccctaaaaggagataactacgcagaatggaaaagaaaactcgaccttgcttttatcttgggagaggtggactgggtattgactaccccatgtcctatagaacctgctgaccttgtcagaggtgaaaatgagtcagatgctgactggcaaaagagacagagggacaatgctcctctcgtcatgtcgtatgacattgaacaaaagaaatggtccttagccaacaagaaatgtttggctgtggtaaagaatacgattgagcctaccatattgggctcgatcccagagtgtgacgctgtctcagagtaccttgaaagaataaagagtcagtttactggctcttcaaagacttatgctacacagctgatcaagcagcttgtgacagaaaggtacaatggaggtggtgttagagaccacatacttagaatgagcaacatggcttccaagttgaagccaatggatttgggcataacagatgactttctggtccatctggttatggcctcattgccaaagcagtttgacaattttattgtcaactacaacataagtccagagaaatggaactttgagaagctcattgctaattgtgtgcaagaggaggagagaatcaaagaatcaaatggtggttcaataaactatgttaaagataagaaaaagaaccacaagtctcccacctcaaaaggtaaacagtctcagcatctgcctcagcaacaacagttcgctgttgagaaagatcaatgtctccactgcaagaagacaggacactacaagaaagattgtcctgattttttgaaaatgatcatggcaaagaaaggtgagaacattattacatttgtaaatgaatctcattatgttggttactctagatccacatggtggattgattctggagcaactattcatgcttgtaattgtttaaaggcattccgttcgacgaggactacgcaaagaagagaaagcaccattagagttgccaatggagttgaagaaaaagttgaagctgttggagatcttcctctagagctcgcgaatggcttcatacttttacttcgagatgtcttttatgttccttctttgcaaagaaacttaataagtgtatcaaagttggattttgatggatatgattgccgctttggaagtggcaaatgtgaactatggcataataatgcatgtattggtcttgctgtgttgcgagacgagctttatttgttatctctttctgagaatgtgaatgttgtgtcctcgttgacaaaagaaaacaagaaaagaaagcgaactcccgatgtctcatcgaaattatggcactgtcgtttgggccatatttcgagggggagaattgagagactagttaagaatgaaattcttcctccattggagttctcagacttagaacaatgcatagaatgcattaaaggaaaatttgtaaagagcatcaaaaagggtgcaaaacgaagcgcaggaattttagagatcattcatacagatatttgtggtccatttcctgtgaaaagtgtggatggctatgactcgttcataacattcacagatgattactcccgctatggttatatttatccaattaaagagcgatcagaagcattggataaatttaagatattcaaagctgaagttgaaaatcagcatgatataaagattaaagtagtaagatctgaccgtgggggggagtactatggtcgacatacgccttatgggcaagtccctggaccttttgcaaggttcttgctagagaatggaatagtagcccagtattcaacaccgggcgaacctcaacagaatggggtagctgaaaggcgcaaccgtacccttatggatatggcgcgcagcatgatgagctactccacactaccactcggtttatggatggaggcgttaaaaaccgccattcatattctcaacagagttccaagcaaatcggtgcccaaaacaccgtatgagctatggacagggagagtaccctcgctaactcacctccgtgtgtgggggagtcctgcagaggccaaagtatttaacccaaatattgggaagttggaccccaaaacagtcagttgccattttattggctatcctgaaagatcaaaaggctatcgtttctactgtccaaacagttatacaaagtttgtagaaacgagacacgccgtcttcttggaagacgaaatgattagggggagctcggtagttcgagaaattgatcttgaggagaggcgggtgtctgtacccgctccgtcgactcaggaacctttcttctctctacctgctgatgttgtgcctgcaatgcctgtcattgaggtaccagcacctgttgttacccctcctgtggcaacaatgaatgagagtgaggaacctgttatacaggattcaacagaaatggttgccacgccagaggaggagctacaacagcctcaaatagataatgtgccagtacaggagactcatcaagagcctcaggtacaggatgtgccaaatgtgcaggcccctagaaggtctgaaagagtcagaagatcggctatccgtgatgactataaagtttataatatagaagagtcgcatatggaggatgatcccacctcatatgaagaggccatgagaagcgctcgctcatctgaatggttggaagccatgaaagatgaaatgaaatcaatgaaactaaacgatgtttgggatttagaagaaattcctaaaggagccaaaacagtaggctgtaaatgggtctacaaaaccaaatatgactccagagggaatatagaaaagtttaaagcgcgacttgtggcaaaaggcttcacgcaacgagaagggattgattacaatgagacattttctccagtctcttgtaaagattccttcaggattataatggcactagtggcacattatgatttggaattacatcagatggatgtaaaaacggcatttctaaatggagatttggaggaaaaagtatacatggcgcaaccaaaaggttttgtcatgaaaggaaacgaaaatatgggatgtcgtctaaagagatccatttatggattaaagcaagcttcgagacagtggtacttgaagtttgatgggacaataaagaaatttgggtttcaagagaatgtcgaggacaactgtatttattcaaagtttaagaatgggagatttattttcctaattctgtatgtggatgacattctactggctagtagtgatgtcagtctactgcaggaaacaaagaaattcttgtcctcaaactttgacatgaaagacctcggtgaggcttcatatgttttgggcatagagattcaccgagatagaacaaagtatgcattgggactttctcaaaagacatatatagaaaaggtgttgaagaaattcaacatgtacagatgcagtgctacacctgctcctataatgaaaggcgaaaagtatggggcatcgcaatgtcccagaaatcagtatgagctcaatgaaatgaaaacaaagccatatgcgtcagctgtaggaagcctacagtacgcgcaagtgtgcacacgacctgacttggcatttgttaccgggttacttggcagatttcagagtaatccaggcctagagcactggaaattggtaaagaaagtcttgcgttatttgcaaggaacaaaaggcctcatgctgtcttacagaagatcagaatcactccagatagtggggtactcagattctgactttgcaaaagataatacaaagtcaacatcgggatacgtgtttaccctggcaggaggagctatttcatggaaaagctcaaaacagactatcactgcagggtctactatgtatgccgagtttatagcatgctatgaggcaacggggcaggtgaactggctaaagaagttcatacccggtttaaaggtggttgacagtattgagaaaccactaaagttatactgcgacaacgaacccgcagtaatgtacactcacaacaatcagtcaagtggtgctgccaaacacattgacataaagtactatgttgtgaaggacaaagtccgggatcaaacaatcagtctcgagcacattaaaacagaaaggatgctcgcggatccgctcacgaaaggcctaccacccaacgtgttcaaggaacatgtagccggcatgggtttaagggaagccttatga

SEQ ID NO: 14442 - DNA, 4206 bp, Oryza sativa
  Clone ID: TFbOSC406626j.C1.o7.fg
atggcgacgccgtccacgcggtcgcgtggctactccttgatgggttgcattaaagatattccgaccctaaaaggagataactacgcagaatggaaaagaaaactcgaccttgcttttatcttgggagaggtggactgggtattgactaccccatgtcctatagaacctgctgaccttgtcagaggtgaaagtgagtcagatgctgactggcaaaagagacatagggacaatgctcctctcgtcatgtcgtatgacattgaacaaaagaaatggtccttagccaacaagaaatgtttggctgtggtaaagaatacgattgagcctaccatattgggctcgatcccagagtgtgacgctgtctcagagtaccttgaaagaataaagagtcagtttactggctcttcaaagacttatgctacacagctgatcaagcagcttgtgacagaaaggtacaatggaggtggtgttagagaccacatacttagaatgagcaacatggcttccaagttgaagccaatggatttgggcataacagatgactttctggtccatctggttatggcctcattgccaaagcagtttgacaattttattgtcaactacaacataagtccagagaaatggaactttgagaagctcattgctaattgtgtgcaagaggaggagagaatcaaagaatcaaatggtggttcaataaactatgttaaagataagaaaaagaaccacaagtctcccacctcaaaaggtaaacagtctcagcatctgcctcagcaacaacagttcgctgttgagaaagatcaatgtctccactgcaagaagacaggacactacaagaaagattgtcctgattttttgaaaatgatcatggcaaagaaaggtgagaacattattacatttgtaaatgaatctcattatgttggttactctagatccacatggtggattgattctggagcaactattcatgcttgtaattgtttaaaggcattccgttcgacgaggactacgcaaagaagagaaagcaccattagagttgccaatggagttgaagaaaaagttgaagctgttggagatcttcctctagagctctcgaatggcttcatacttttacttcgagatgtcttttatgttccttctttgcaaaggaacttaataagtgtatcaaagttggattttgatggatatgattgccgctttggaaatggcaaatgtgaactatggcataataatgcatgtattggtcttgctgtgttgcgagacgagctttatttgttatctctttctgagaatgtgaatgttgtgtcctcgttgacaaaagaaaacaagaaaagaaagcgaactcccgatgtctcatcgaaattatggcactgtcgtttgggccatatttcgagggggagaattgagagactagttaagaatgaaattcttcctccattggagttctcagacttagaacaatgcatagaatgcattaaaggaaaatttgtaaagagcatcaaaaagggtgcaaaacgaagcgcgggaattttagagatcattcatacagatatttgtggtccatttcctgtgaaaagtgtggatggctatgactcgttcataacattcacagatgattactcccgctatggttatatttatccaattaaagagcgatcagaagcattggataaatttaagatattcaaagctgaagttgaaaatcagcatgatataaagattaaagtagtaagatctgaccgtgggggggagtactatggtcgacatacgccttatgggcaagtccctggaccttttgcaaggttcttgctagagaatggaatagtagcccagtattcaacaccgggcgaacctcaacagaatggggtagctgaaaggcgcaaccgtacccttatggatatggtgcgcagcatgatgagctactccacactaccactcggtttatggatggaggcgttaaaaaccgccattcatattctcaacagagttccaagcaaatcggtgcccaaaacaccgtatgagctatggacagggagagtaccctcgctaactcacctccgtgtgtgggggagtcctgcagaggccaaagtatttaacccaaatattgggaagttggaccccaaaacagtcagttgccattttattggctatcctgaaagatcaaaaggctatcgtttctactgtccaaacagttatacaaagtttgtagaaacgagacacgccgtcttcttggaagacgaaatgattagggggagctcggtagttcgagaaattgatcttgaggagaggcgggtgtctgtacccgctccgtcgactcaggaacctttcttctctctacctgctgatgttgtgcctgcaatgcctgtcattgaggtaccagcacctgttgttacccctcctgtggcaacaatgaatgagagtgaggaacctgttatacaggattcaacagaaatggttgccacgccagaggaggagctacaacagcctcaaatagataatgtgccagtacaggagactcatcaagagcctcaggtacaggatgtgccaaatgtgcaggcccctagaaggtctgaaagagtcagaagatcggctatccgtgatgactataaagtttataatatagaagagtcgcatatggaggatgatcccacctcatatgaagaggccatgagaagcgctcgctcatctgaatggttggaagccatgaaagatgaaatgaaatcaatgaaactaaacgatgtttgggatttagaagaaattcctaaaggagccaaaacagtaggctgtaaatgggtctacaaaaccaaatatgactccagagggaatatagaaaagtttaaagcgcgacttgtggcaaaaggcttcacgcaacgagaagggattgattacaatgagacattttctccagtctcttgtaaagattccttcaggattataatggcactagtggcacattatgatttggaattacatcagatggatgtaaaaacggcatttctaaatggagatttggaggaaaaagtatacatggcgcaaccaaaaggttttgtcatgaaaggaaacgaaaatatgggatgtcgtctaaagagatccatttatggattaaagcaagattcgagacagtggtacttgaagtttgatgggacaataaagaaatttgggtttcaagagaatgtcgaggacaactgtatttattcaaagtttaagaatgggagatttattttcctaattctgtatgtggatgacattctactggctagtagtgatgtcagtctactgcaggaaacaaagaaattcttgtcctcaaactttgacatgaaagacctcggtgaggcttcatatgttttgggcatagagattcaccgagatagaacaaagtatgcattgggactttctcaaaagacatatatagaaaaggtgttgaagaaattcaacatgtacagatgcagtgctacacctgctcctataatgaaaggcgaaaagtatggggcatcgcaatgtcccagaaatcagtatgagctcaatgaaatgaaaacaaagccatatgcgtcagctgtaggaagcctacagtacgcgcaagtgtgcacacgacctgacttggcatttgttaccgggttacttggcagatttcagagtaatccaggcctagagcactggaaattggtaaagaaagtcttgcgttatttgcaaggaacaaaaggcctcatgctgtcttacagaagatcagaatcactccagatagtggggtactcagattctgactttgcaaaagataatacaaagtcaacatcgggatacgtgtttaccctggcaggaggagctatttcatggaaaagctcaaaacagactatcactgcagggtctactatgtatgccgagtttatagcatgctatgaggcaacggggcaggtgaactggctaaagaagttcatacccggtttaaaggtggttgacagtattgagaaaccactaaagttatactgcgacaacgaacccgcagtaatgtacactcacaacaatcagtcaagtggtgctgccaaacacattgacataaagtactatgttgtgaaggacaaagtccgggatcaaacaatcagtctcgagcacattaaaacagaaaggatgctcgcggatccgctcacgaaaggcctaccacccaacgtgttcaaggaacatgtagccggcatgggtttaagggaagccttatga

SEQ ID NO: 14443 - DNA, 4113 bp, Oryza sativa
  Clone ID: TFbOSC407404j.C1.o1.fg
atgggttgcattaaagatattccgaccctaaaaggagataactacgcagaatggaaaagaaaactcgaccttgcttttatcttgggagaggtggactgggtattgactaccccatgtcctatagaacctgctgaccttgtcagaggtgaaaatgagtcagatgctgactggcaaaagagacagagggacaatgctcctctcgtcatgtcgtatgacattgaacaaaagaaatggtccttagccaacaagaaatgtttggctgtggtaaagaatacgattgagcctaccatattgggctcgatcccagagtgtgacgctgtctcagagtaccttgaaagaataaagagtcagtttactggctcttcaaagacttatgctacacagctgatcaagcagcttgtgacagaaaggtaccatggaggtggtgttagagaccacatacttagaatgagcaacatggcttccaaattgaagccaatggatttgggcataacagatgactttctggtccatctggttatggcctcattgccaaagcagtttgacaattttattgtcaactacaacataagtccagagaaatggaactttgagaagctcattgctaattgtgtgcaagaggaggagagaatcaaagaatcaaatggtggttcaataaactatgttaaagataagaaaaagaaccacaagtctcccacctcaaaaggtaaacagtctcagcatctgcctcaacaacaacagttcgctgttgagaaagatcaatgtctccactgcaagaagacaggacactacaagaaagattgtcctgactttttgaaaatgatcatggcaaagaaaggtgagaacattattacatttgtaaatgaatctcattatgttggttactctagatccacatggtggattgattctggagcaactattcatgcttgtaattgtttaaaggcattccgttcgacgaggactacgcaaagaagagaaagcaccattagagttgccaatggagttgaagaaaaagttgaagctgttggagatcttcctctagagctcgcgaatggcttcatacttttacttcgagatgtcttttatgttccttctttgcaaaggaacttaataagtgtatcaaagttggattttgatggacatgattgccgctttggaagtggcaaatgtgaactatggcataataatgcatgtattggtcttgctgtgttgcgagacgagctttatttgttatctctttctgagaatgtgaatgttgtgtcctcgttgacaaaagaaaacaagaaaagaaagcgaactcccgatgtctcatcgaaattatggcactgtcgtttgggccatatttcgagggggagaattgagagactagttaagaatgaaattcttcctccattggagttctcagacttagaacaatgcatagaatgcattaaaggaaaatttgtaaagagcatcaaaaagggtgcaaaacgaagcgcaggaattttagagatcattcatacagatatttgtgatgattactcccgctatggttatatttatccaattaaagagcgatcagaagcactggataaatttaagatattcaaagctgaagttgaaaatcagcatgatataaagattaaagtagtaagatctgaccgtgggggggagtactatggtcgacatacgccttatgggcaagtccctggaccttttgcaaggttcttgctagagaatggaatagtagcccagtattcaacaccgggcgaacctcaacagaatggggtagctgaaaggcgcaaccgtacccttatggatatggtgcgcagcatgatgagctactccacactaccactcggtttatggatggaggcgttaaaaaccgccattcatattctcaacagagttccaagcaaatcggtgcccaaaacaccgtatgagctatggacagggagagtaccctcgctaactcacctccgtgtgtgggggagtcctgcagaggccaaagtatttaacccaaatattgggaagttggaccccaaaacagtcagttgccattttattggctatcctgaaagatcaaaaggctatcgtttctactgtccaaacagttatacaaagtttgtaaaaacgagacacgccgtcttcttggaagacgaaatgattaaggggagctcggtagttcgagaaattgatcttgaggagaggcgggtgtctgtacccgctccgtcgactcaggaacctttcttctctctacctgctgatgttgtgcctgcaatgcctgtcattgaggtaccagcacctgttgttacccctcctgtggcaacaatgaatgagagtgaggaacctgttatacaggattcaacagaaatggttgccacaccagaggaggagctacaacagcctcaaatagataatgtgccagtacaggagactcatcaagagcctcaggtacaggatgtgccaaatgtgcaggcccctagaaggtctgaaagagtcagaagatcggctatccgtgatgactataaagtttataatatagaagagtcgcatatggaggatgatcccacctcatatgaagaggccatgagaagcgctcgctcatctgaatggttggaagccatgaaagatgaaatgaaatcaatgaaactaaacgatgtttgggatttagaagaaattcctaaaggagccaaaacagtaggctgtaaatgggtctacaaaaccaaatatgactccagagggaatatagaaaagtttaaagcgcgacttgtggcaaaaggcttcacgcaacgagaagggattgattacaatgagacattttctccagtctcttgtaaagattccttcaggattataatggcactagtggcacattatgatttggaattacatcagatggatgtaaaaacggcatttctaaatggagatttggaggaaaaagtatacatggcgcaaccgaaaggttttgtcatgaaaggaaacgaaaatatgggatgtcgcctaaagagatccatttatggattaaagcaagcttcgagacagtggtacttgaagtttgatgggacaataaagaaatttgggtttcaagagaatgtcgaggacaactgtatttattcaaagtttaagaatgggagatttattttcctaattctgtatgtggatgacattctactggctagtagtgatgtcagtctactgcaggaaacaaagaaattcttgtcctcaaactttgacatgaaagacctcggtgaggcttcatatgttttgggcatagagattcaccgagatagaacaaagtatgcattgggactttctcaaaagacatatatagaaaaggtgttgaagaaattcaacatgtacagatgcagtgctacacctgctcctataatgaaaggcgaaaagtatggggcatcgcaatgtcccagaaatcagtatgagctcaatgaaatgaaaacaaagccatatgcgtcagctgtaggaagcctacagtacgcgcaagtgtgcacacgacctgacttggcatttgttaccgggttacttggcagatttcagagtaatccaggcctagagcactggaaattggtaaagaaagtcttgcgttatttgcaaggaacaaaaggcctcatgctgtcttacagaagatcagaatcactccagatagtggggtactcagattctgactttgcaaaagataatacaaagtcaacatcgggatacgtgtttaccctgacaggaggagctatttcatggaaaagctcaaaacagactatcactgcagggtctactatgtatggcgagtttatagcatgctatgaggcaacggggcaggtgaactggctaaagaagttcatacccggtttaaaggtggttgacagtattgagaaaccgctaaagttatactgcgacaacgaacccgcagtaatgtacgctcacaacaatcagtcaagtggtgctgccaaacacattgacataaagtactatgttgtgaaggacaaagtccgggatcaaacaatcagtctcgagcacattaaaacagaaaggatgctcgcggatccgctcacgaaaggcctaccacccaacgtgttcaaggaacatgtagccggcatgggtttaagggaagccttatga

SEQ ID NO: 14444 - DNA, 4008 bp, Oryza sativa
  Clone ID: TFbOSC410327j.C1.o10.fg
atgtccggcgcctcttcctccacgaactcctcaaccggtggctactccttgatgggttgcattaaagatattccgaccctaaaaggagataactacgcagaatggaaaagaaaactcgaccttgcttttatcttgggagaggtggactgggtattgactaccccatgtcctatagaacctgctgaacttgtcagaggtgaaaatgagtcagatgctgactggcaaaagagacagagggacaatgctcctctcgtcatgtcgtatgacattgaacaaaagaaatggtccttagccaacaagaaatgtttggctgtggtaaagaatacgattgagcctaccatattgggctcgatcccagagtgtgacgctgtctcagagtaccttgaaagaataaagagtcagtttactggctcttcaaagacttatgctacacagctgatcaagcagcttgtgacagaaaggtaccatggaggtggtgttagagaccacatacttagaatgagcaacatggcttccaagttgaagccaatggatttgggcataacagatgactttctggtccatctggaggagagaatcaaagaatcaaatggtggttcaataaactatgttaaagataagaaaaagaaccacaagtctcccacctcaaaaggtaaacagtctcagcatctgcctcagcaacaacagttcgctgttgagaaagatcaatgtctccactgcaagaagacaggacactacaagaaagattgtcctgactttttgaaaatgatcatggcaaagaaaggtgagaacattattacatttgtaaatgaatctcattatgttggttactctagatccacatggtggattgattctggagcaactattcatgcttgtaattgtttaaaggcattccgttcgacgaggactacgcaaggaagagaaagcaccattagagttgccaatggagttgaagaaaaagttgaagctgttggagatcttccgctagagctcgcgaatggcttcacacttttacttcgagatgtcttttatgttccttctttgcaaagaaacttaataagtgtatcaaagttggattttgatggatatgattgccgctttggaagtggcaaatgtgaactatggcataataatgcatgtattggtcttgctgtgttgcgagacgagctttatttgttatctctttctgagaatgtgaatgttgtgtcctcgttgacaaaagaaaacaagaaaagaaagcgaactcccgatgtctcatcgaaattatggcactgtcgtttgggccatatttcgagggggagaattgagagactagttaagaatgaaattcttcctccattggagttctcagacttagaacaatgcatagaatgcattaaaggaaaatttgtaaagagcatcaaaaaggatgattactcccgctatggttatatttatccaattaaagagcgatcagaagcactggataaatttaagatattcaaagctgaagttgaaaatcagcttgatataaagattaaagtagtaagatctgaccgtgggggagagtactatggtcgacatacgccttatgggcaagtccctagaccttttgcaaggttcttgctagagaatggaatagtagcccagtattcaacaccgggcgaacctcaacagaatggggtagctgaaaggcgcaaccgtacgcttatggatattgtgcgcagcatgatgagctactccacactaccactcggtttatggatggaggcgttaaaaaccgccattcatattctcaacagagttccaagcaaatcggtacccaaaacaccgtatgagctatggacagggagagtaccctcgctaactcacctccgtgtgtgggggagtcctgcagaggccaaagtatttaacccaaatattgggaagttggaccccaaaacagtcagctgccattttattggctatcctgaaagatcaaaaggctatcgtttctactgtccaaacagttatacaaagtttgtagaaacgagacacgccgtcttcttggaagacgaaatgattagggggagctcggtagttcgagaaattgatcttgaggagaggcgggtgtctgtacccgctccgtcgactcaggaacctttcttctctctacctgctgatgttgtgcctgcaatgcctgtcattgaggtaccagcacctgttgttacccctcctgtggcaacaatgaatgagagtgaggaacctgttatacaggattcaacagaaatggttgtcacaccagaggaggagctacaacagcctcaaatagataatgtgccagtacaggagactcatcaagagcctcaggtacaggatgtgccaaatgtgcaggcccctagaaggtctgaaagagtcagaagatcggctatccgtgatgactataaagtttataatatagaagagtcgcatatggaggatgatcccacctcatatgaagaggccatgagaagcgctcgctcatctgaatggttggaagccatgaaagatgaaatgaaatcaatgaaactaaacaatgtttgggatttagaagaaattcctaaaggagccaaaacagtaggctgtaaatgggtctacaaaaccaaatatgactccagagggaatatagaaaagtttaaagcgcgacttgtggcaaaaggcttcacgcaacgagaagggattgattacaatgagacattttctccagtctcttgtaaagattccttcaggattataatggcactagtggcacattatgatttggaattacatcagatggatgtaaaaacggcatttctaaatggagatttggaggaaaaagtatacatggcgcaaccgaaaggttttgtcatgaaaggaaacgaaaatatgggatgtcgtctaaagagatccatttatggattaaagcaagcttcgagacagtggtacttgaagtttgatgggacaataaagaaatttgggtttcaagagaatgtcgaggacaactgtatttattcaaagtttaagaatgggagatttattttcctaattctgtatgtggatgacattctactggctagtagtgatgtcagtctactgcaggaaacaaagaaattcttgtcctcaaactttgacatgaaagacctcggtgaggcttcatatgttttgggcatagagattcaccgagatagaacaaagtatgcattgggactttctcaaaagacatatatagaaaaggtgttgaagaaattcaacatgtacagatgcagtgctacacctgctcctataatgaaaggcgaaaagtatggggcatcgcaatgtcccagaaatcagtatgagctcaatgaaatgaaaacaaagccatatgcgtcagctgtaggaagcctacagtacgcgcaagtgtgcacacgacctgacttggcatttgttaccgggttacttggcagatttcagagtaatccaggcctagagcactggaaattggtaaagaaagtcttgcgttatttgcaaggaacaaaaggcctcatgctgacttacagaagatcagaatcactccagatagtggggtactcagattctgactttgcaaaagataatacaaagtcaacatcgggatacgtgtttaccctggcaggaggagctatttcatggaaaagctcaaaacagactatcactgcagggtctactatgtatgccgagtttatagcatgctatgaggcaacggggcaggtgaactggctaaagaagttcatacccggtttaaaggtggttgacagtattgagaaaccactaaagttatactgcgacaacgaacccacagtaatgtacgctcacaacaatcagtcaagtggtgctgccaaacacattgacataaagtactatgttgtgaaggacaaagtccgggatcaaacaatcagtctcgagcacattaaaacagaaaggatgctcgcggatccgctcacgaaaggcctaccacccaacgtgttcaaggaacatgtagccggcatgggtttaagggaagccttatga

SEQ ID NO: 14445 - DNA, 4137 bp, Oryza sativa
  Clone ID: TFbOSC420229j.C1.o2.fg
atggtcgccttcccttccctaacccctctatgctctctcctagggtgccgccgccgcccgttcgcgcctcggcatcaccagtcgtcgccgccgttttcttccttcgcgccggccgccgtgttcgccggtggctactccttgatgggttgcattaaagatattccgaccctaaaaggagataactacgcagaatggaaaagaaaactcgaccttgcttttatcttgggagaggtggactgggtattgactaccccatgtcctatagaacctgctgaacttgtcagaggtgaaaatgagtcagatgctgactggcaaaagagacagagggacaatgctcctctcgtcatgtcgtatgacattgaacaaaagaaatggtccttagccaacaagaaatgtttggctgtggtaaagaatacgattgagcctaccatattgggctcgatcccagagtgtgacgctgtctcagagtaccttgaaagaataaagagtcagtttactggctcttcaaagacttatgctacacagctgatcaagcagcttgtgacagaaaggtaccatggaggtggtgttagagaccacatacttagaatgagcaacatggcttccaaattgaagccaatggatttgggcataacagatgactttctggtccatctggttatggcctcattgccaaagcagtttgacaattttattgtcaactacaacataagtccagagaaatggaactttgagaagctcattgctaattgtgtgcaagaggaggagagaatcaaagaatcaaatggtggttcaataaactatgttaaagataagaaaaagaaccacaagtctcccacctcaaaaggtaaacagtctcagcatctgcctcaacaacaacagttcgctgttgagaaagatcaatgtctccactgcaagaagacaggacactacaagaaagattgtcctgactttttgaaaatgatcatggcaaagaaaggtgagaacattattacatttgtaaatgaatctcattatgttggttactctagatccacatggtggattgattctggagcaactattcatgcttgtaattgtttaaaggcattccgttcgacgaggactacgcaaagaagagaaagcaccattagagttgccaatggagttgaagaaaaagttgaagctgttggagatcttcctctagagctcgcgaatggcttcatacttttacttcgagatgtcttttatgttccttctttgcaaaggaacttaataagtgtatcaaagttggattttgatggatatgattgccgctttggaagtggcaaatgtgaactatggcataataatgcatgtattggtcttgctgtgttgcgagacgagctttatttgttatctctttctgagaatgtgaatgttgtgtcctcgttgacaaaagaaaacaagaaaagaaagcgaactcccgatgtctcatcgaaattatggcactgtcgtttgggccatatttcgagggggagaattgagagactagttaagaatgaaattcttcctccattggagttctcagacttagaacaatgcatagaatgcattaaaggaaaatttgtaaagagcatcaaaaagggtgcaaaacgaagcgcaggaattttagagatcattcatacagatatttgtggtccatttcctgtgaaaagtgtggatggctatgactcgttcataacattcacagatgattactcccgctatggttatatttatccaattaaagagcgatcagaagcactggataaatttaagatattcaaagctgaagttgaaaatcagcatgatataaagattaatgtaaatggggtagctgaaaggcgcaaccgtacccttatggatatggtgcgcagcatgatgagctactccacactaccactcggtttatggatggaggcgttaaaaaccgccattcatattctcaacagagttccaagcaaatcggtgcccaaaacaccgtatgagctatggacaggaagagtaccctcgctaactcacctccgtgtgtgggggagtcctgcagaggccaaagtatttaacccaaatattgggaagttggaccccaaaacagtcagctgccattttattggctatcctgaaagatcaaaaggctatcgtttctactgtccaaacagttatacaaagtttgtagaaacgagacacgccgtcttcttggaagacgaaatgattagggggagctcggtagttcgagaaattgatcttgaggagaggcgggtgtctgtacccgctccgtcgactcaggaacttttcttctctctacctgctgatgttgtgcctgcaatgcctgtcattgaggtacaagcacctgttgttacccctcctgtggcaacaatgaatgagagtgaggaacctgttatacaggattcaacagaaatggttgccacaccagaggaggagctacaacagcctcaaatagataatgtgccagtacaggagactcatcaagagcctcaggtacaggatgtgccaaatgtgcaggcccctagaaggtctgaaagagtcagaagatcggctatccgtgatgactataaagtttataatatagaagagtcgcatatggaggatgatcccacctcatatgaagaggccatgagaagcgctcgctcatctgaatggttggaagccatgaaagatgaaatgaaatcaatgaaactaaacgatgtttgggatttagaagaaattcctaaaggagccaaaacagtaggctgtaaatgggtctacaaaaccaaatatgactccagagggaatatagaaaagtttaaagcgcgacttgtggcaaaaggcttcacgcaacgagaagggattgattacaatgagacattttctccagtctcttgtaaagattccttcaggattataatggcactagtggcacattatgatttggaattacatcagatggatgtaaaaacggcatttctaaatggagatttggaggaaaaagtatacatggcgcaaccgaaaggttttgtcatgaaaggaaacgaaaatatgggatgtcgtctaaggagatccatttatggattaaagcaagcttcgagacagtggtacttgaagtttgatgggacaataaagaaatttgggtttcaagagaatgtcgaggacaactgtatttattcaaagtttaagaatgggagatttattttcctaattctgtatgtggatgacattctactggctagtagtgatgtcagtctactgcaggaaacaaagaaattcttgtcctcaaactttgacatgaaagacctcggtgaggcttcatatgttttgggcatagagattcaccgagatagaacaaagtatgcattgggactttctcaaaagacatatatagaaaaggtgttgaagaaattcaacatgtacagatgcagtgctacacctgctcctataatgaaaggcgaaaagtatggggcatcgcaatgtcccagaaatcagtatgagctcaatgaaatgaaaacaaagccatatgcgtcagctgtaggaagcctacagtacgcgcaagtgtgcacacgacctaacttggcatttgttaccgggttacttggcagatttcagagtaatccaggcctagagcactggaaattggtaaagaaagtcttgcgttatttgcaaggaacaaaaggcctcatgctgtcttacagaagatcagaatcactccagatagtggggtactcagattctgactttgcaaaagataatacaaagtcaacatcggggtatgtgtttaccctggcaggaggagctatttcatggaaaagctcaaaacagactatcactgcagggtctactatgtatgccgagtttatagcatgctatgaggcaatggggcaggtgaactggctaaagaagttcatacccggtttaaaggtggttgacagtattgagaaaccactaaagttatactgcgacaacgaacccgcagtaatgtacgctcacaacaatcagtcaagtggtgctgccaaacacattgacataaagtactatgttgtgaaggacaaagtccgggatcaaacaatcagtctcgagcacattaaaacagaaaggatgctcgcggatccgctcacgaaaggcctaccacccaacgtgttctag

SEQ ID NO: 14446 - DNA, 3000 bp, Oryza sativa
  Clone ID: TFbOSC900016j.C1.o35.fg
atgtcgtatgacattgaatataagaaatggtccttaaccaacaagaaatgtttggctgtggtaaagaacacaattgagccaaccatattgggctcaatcccagagtgtgacgctgtctcagagtacctcgaaagaataaagagtcaatttactggctcttcaaagacttatgctacacagctgataaagcagcttgtgacagagaggtaccatggaggtggtgtaagagaccacattcttaggatgagcaacatggcttccaagttgaagccaatggatttgggcataacagatgactttctggtccatctggttatggcctcattgccaaagcactttgacaactttattgtcaactacaacataagtccagagaaatggaattttgaaaagctcatcgctaattgtgtgcaagaggaggaaaaaatcaaagagtccaatggtggctctattaactatgttaaagataacaagaaaaagaactacaagtcaccctcctcaaaagcaaaacagcctcagcatttgcctcagcaacaacagttcgctgttgaaaaggatcagtgtctccactgcaagaagacaggacattacaagaaagactgtcctgacttcctaaaaatgatcatggcaaagaaaggtaaaaacattattacttttgtaaatgaatctcattatgttggttattctagatccacatggtggattgattctggagcaactattcatgcgtgtaattgtttaaaggcattccgttcgatgaggactacgcaaagaagcgaaagctccattagagttgccaatggagttgaagaaaaagttgacgctgttggagatctttccctagagctcgcgaatggcttcacacttttacttcgaaatgtcttttatgttccttcttttcaaagaaatttaataagtgtatcaaaattggattttgatggatatgattgccgctttggaagtggcgaatgtgaactatgggggagaattgagagactagttaagaatgaaattcttcctccattggagttctcagatttagaacaatgcatagaatgcattaaaggaaaatttgtaaagaacatcaaaaagggtgcaaaacgaagcgcaggatttttggaaataattcacacagatatttgtggtccatttcctgtgaaaagtgtggatggctatgactcgttcataacattcacagatgattattcccgttatagttatatttatccaattaaagaaagatcagaagcattggataaatttaagatattcaaagctgaagttgaaaatcagcatgatatgggcaagtccctggaccttttccttttgcaagctgaaaggcgtaaccgtacccttatggatatggtgcgcagcatgatgagctactccaccctatcattgggtttatggatggaggcgttaaaaaccgccattcatatcctcaacagagttccaagcaaatcggtgcccaaaacaccgtatgagctatggacaggaagagtaccctcgctagctcacctccgcgtgtgggggagtcctgcggaggctaaaatatttaacccagaccttaggaaattggatcccaaaacagattcaacagaaattattgccacaccagaggaggagctgcaacagcctcaaacagataatgtgccagtacaggagactcaacaagagcctcacatacagaatgtgccaaatgtggaggcccctagaaggtctgaaagagtcagaagatcggctatccgtgatgactatcaagtttataatatagaagagtcacatatggaggatgatcccacctcatataaagaggccatgagaagcgctcgttcatctgaatggttggaagccatgaaagatgaaatgaaatcaatgaaactaaacgatgtctgggatttagaagagattcctaaaggagccaaaacagtaggctgtaaatgggtctacaaaaccaaatatgactccagagggaatatagaaaaatttaaggcgcgacttgtggcaaaaggcttcacgcaaagagaagggattgattacaatgagacattttctccagtctcttgtaaagattccttcaggattataatagcattgatggcacattatgatttggaattacatcagatggatgtgaaaacgacatttctaaatggagatttggaggaaaaagaaacaaagaaattcttgtcatcaaactttgacatgaaagacatcggtgaggcttcatatgttttgggcatagagattcatcgagatagaacaaagtatgcattgggactttctcaaaaggcatatatagaaaaggtgttgatgaaattcaacatgtacagatgcagtgctacacctgctcctatagtcaagggcgaaaagtatggggcatcacaatgtcccagaaatcagtatgagctcaatgaaatgaaaacaaagccatatgcgtcagctgtgggaagcctacagtatgcgcaagtgtgcacacgccctgacttggcatttgtcaccgagttgcttggcagatttcagagtaatccaggtccaaagcactggaaattagtaaagaaagtcttgtgtttttggaaaggtacaaaaggcctcatgatgtcttacagaagattagagtcactccagatagtggggtattcagattctgattttgcaaaagacaatacaaagtcaacatcgggatacgtgttcacccttgcgggaggagctatttcatggaaaagctccaaacagactatcactgcagggtctactatgtatgccgagtttatagcatgctatgaggccacggggcaggtgaactggctaaagaagttcatatctggtttaaaggtggttgacagtattgagaaaccactaaagttatactgcgataacgaacccgcagtaatgtacgctcacaacaatcagtcaagtggtgctgccaaacacattgacataaagtactatgttgtgaaggacagtccgagatcaaacaatcagtctcgagcacattag

SEQ ID NO: 14447 - DNA, 1212 bp, Oryza sativa
  Clone ID: TFbOSC900040j.C1.o10.fg
atgcctgtccccgtctacgccgccgccgccatgctgccgccgtcgccgtgcccgtctcttgccgccgccgtcctcgtctacaagggatggctgcaaggggccgaccgcgcatgtcggggtgctcctcccgcaatgggatgcccagctatatctagtaggaatcacctgatacctggtaggtatcatccgatacctcgcaagtatcacgcgatacatggtagaaatcgtctgatacctgacaagtatcacatgatacctcgcgagaatcacgcgatacgtggtagaaatcgtttgatacatgacaggtttcacatgatacctcgcgagtatcacgcgatacgtggtagaaatcgcatgatacctgataagtatcacctgaaacgtggctactccttgatgggttgcattaaagatattccgaccctaaaagaagataactacgcacaatggaaaagaaaactcaaccttgctttcatcttgggagaggtggactgggtgttgactaccccatgtcctatagaacctgctgcacttgtcagaggtgaaaataagtcagatgctgactggaaaaagagacagagggacaatgctcctctcgtcatgtcgtatgacattgaacaaaagacatggtccttagccaacaagaaatgtttggctgtggtaaagaatacgattgagccaactatattgggctcaatcctagagtgtgacgctgtctcagagtaccttgaaagaacaaagagtcagtttactggctcttcaaagacttatgctacacagctgatcaagcagcttgtgacagaaaggtaccatggaggtggtgttagagaccacatacttagaatgagcaacatggcttccaagttgaagccaatggatttgggcataacatatgactttctggtccatcttgttatggcctcatttccaaagcagtttgacaattttattgtcaactacaacataagtccagagaaatggaactttgagaagctcattgctaattgtgtgcaagaggaggagagaatcaaagagtcaaatggtggttcaattaactatgttaaagataagaaaaagaactacaagtctcccacctcaaaagctaaacagtctcaacatctgcctcagcaacaacagttcgctgttgagaaagatcagtgtctccactgcaagaagacaggacattacaagaaagactgtcctgacttttga

SEQ ID NO: 14448 - DNA, 3933 bp, Oryza sativa
  Clone ID: TFbOSC900374j.C1.o17.fg
atgggttgcattaaagatattccgaccctaaaaggagataactacgcagaatggaaaagaaaactcgaccttgcttttatcttgggagaggtggactgggtgttgactaccccatgtcctatagaacctgctgaacttgtcagaggtgaaaatgagtcagatgctgactggcaaaagagacagagggacaatgctcctctcgtcatgtcgtatgacattgaacaaaagaaatggtccttagccaacaagaaatgtttggctgtggtaaagaatacgattgagcctaccatattgggctcgatcccagagtgtgacgctgtctcagagtaccttgaaagaataaagagtcagtttactggctcttcaaagacttatgctacacagctgatcaagcagcttgtgacagaaaggtaccatggaggtggtgttagagaccacatacttagaatgagcaacatggcttccaagttgaagccaatggatttgggcataacagatgactttctggtccatctggttatggcctcattgccaaagcagtttgacaattttattgtcaactacaacataagtccagagaaatggaactttgagaagctcattgctaattgtgtgcaagaggaggagagaatcaaagaatcaaatggtggttcaataaactatgttaaagataagaaaaagaaccacaagtctcccacctcaaaaggcaaacagtctcagcatctgcctcagcaacaacagttcgctgttgagaaagatcaatgtctccactgcaagaagacaggacactacaagaaagattgtcctgactttttgaaaatgatcatggcaaagaaaggtgagaacattattacatttgtaaatgaatctcattatgttggttactctagatccacatggtggattgattctggagcaactattcatgcttgtaattgtttaaaggcattccgttcgacgaggactacgcaaagaagagaaagcaccattagagttgccaatggagttgaagaaaaagttgaagctgttggagatcttcctctagagctcgcgaatggcttcatacttttacttcgagatgtcttttatgttccttctttgcaaagaaacttaataagtgtatcaaagttggattttgatggatatgattgccgttttggaagtggcaaatgtgaactatggcataataatgcatgtattggtcttgctgtgttgcgagacgagctttatttgttatctctttctgagaatgtgaatgttgtgtcctcgttgacaaaagaaaacaagaaaagaaagcgaactcccgatgtctcatcgaaattatggcactgtcgtttgggccatatttcgagggggagaattgagagactagttaagaatgaaattcttcctccattggagttctcagacttagaacaatgcatagaatgcattaaaggaaaatttgtaaagaacatcaaaaagggtgcaaaacgaagcgcaggaattttagagatcattcatacagatatttgtggtccatttcctgtgaaaagtgtggatggctatgactcgttcataacattcacagatgattactcccgctatggttatatttatccaattaaagagcgatcagaagcactggataaagatataaagattaaagtagtaagatctgaccgtgggggggagtactatggtcgacatacgccttatgggcaagtccctggaccttttgcaaggttcttgctagagaatggaatagtagcccagtattcaacaccgggcgaacctcaacagaatggggtagctgaaaggcgcaaccgtacccttatggatatggtgcgcagcatgatgagctactccacactaccactcggtttatggatggaggcgttaaaaaccgccattcatattctcaacagagttccaagcaaatcggtgcccaaaacaccgtatgagctatggacagggagagtaccctcgctaactcacctccgtgtgtgggggagtcctgcagaggccaaagtatttaacccaaatattgggaagttggaccccaaaacagtcagttgccattttattggctatcctgaaagatcaaaaggctatcgtttctactgtccaaacagttatacaaagtttgtagaaacgagacacgccgtcttcttggaagacgaaatgattagggggagctcggtagttcgagaaattgatcttgaggagaggcgggtgtctgtacccgctccgtcgactcaggaacctttcttctctctacctgctgatgttgtgcctgcaatgcctgtcattgaggtaccagcacctgttgttacccctcctgtggcaacaatgaatgagagtaaggaacctgttatacaggattcaacagaaatggttgccacaccagaggaggagctacaacagcctcaaatagataatgtgccagtacaggagactcatcaagagcctcaagtacaagatgtgccaaatgtgcaggcccctagaaggtctgaaagagtcagaagatcggctatccgtgatgactataaagtttataatatagaagagtcgcatatggaggatgatcccacctcatatgaagaggccatgagaagcgctcgctcatctgaatggttggaagccatgaaagatgaaatgaaatcaatgaaactaaacgatgtttgggatttagaagaaattcctaaaggagccaaaacaatggatgtaaaaacggcatttctaaatggagatttggaggaaaaagtatacatggcgcaaccgaaaggttttgtcatgaaaggaaacgaaaatatgggatgtcgtctaaagagatccatttatggattaaagcaagcttcgagacagtggtacttgaagtttgatgggacaataaagaaatttgggtttcaagagaatgtcgaggacaactgtatttattcaaagtttaaaaatgggagatttattttcctaattctgtatgtggatgacattctactggctagtagtgatgtcagtctactgcaggaaacaaagaaattcttgtcctcaaactttgacatgaaagacctcggtgaggcttcatatgttttgggcatagagattcaccgagatagaacaaagtatgcattgggactttctcaaaagacatatatagaaaaggtgttgaagaaattcaacatgtacagatgcagtgctacacctgctcctataatgaaaggcgaaaagtatggggcatcgcaatgtcccagaaatcagtatgagctcaatgaaatgaaaacaaagccatatgcatcagctgtaggaagcctacagtacgcgcaagtgtgcacacgacctgacttggcattcgttaccgggttacttggcagatttcagagtaatccaggcctagagcactggaaattggtaaagaaagtcttgcgttatttgcaaggaacaaaaggcctcatgctatcttacagaagatcagaatcactccaaatagtggggtactcagattctgactttgcaaaagataatacaaagtcaacatcgggatacgtgtttaccctggcaggaggagctatttcatggaaaagctcaaaacagactatcactgcagggtctactatgtatgccgagtttatggcatgctatgaggcaacggggcaggtgaactggctaaagaagttcatacccggtttaaaggtggttgacagtattgagaaaccactaaagttatactgcgacaacgaacccgcagtaatgtacgctcacaacaatcagtcaagtggtgctgccaaacacattgacataaagtactatgttgtgaaggacaaagtccgggatcaaacaatcagtctcgagcacattaaaacagaaaggatgctcgcggatccgctcacgaaaggcctaccacccaacgtgttcaaggaacatgtagccggcatgggtttaagggaagccttatga

SEQ ID NO: 14449 - DNA, 1503 bp, Oryza sativa
  Clone ID: TFbOSC33621j.C1.o1.np
atgggtccttaaatagagcgagttgtagatgtgagcatttctcctcctaatgataaagagctatcatttgaagaggaagagaaatgcatgcatatcaatgctcaagctactattgttttatttggtgttttaagtgaagatgtatttaaaaccgtcatgccgtttgaagatgctcatctcatttggaccactctcaaggagagatacgacaagtccaaatgtgatgattccaaatgtgatgatgtactctttttggaagaagcacttgaggagtgttcaacttcatcaccaaattgcgactaccttcgatgatcaagataatcatcccacaaccaccttatcatcaacacatgactacattgaaggtaatgaattggtgtgtaaggttgatgatcgtccaattctcccattggattccaacaacaccgataatgaatttgtcatattctattgtgttgttgactcatgcatctcacctagccccaagtatatgtgtgaggatgatatggataaatgctctacttcatatagtacttgtggaactaacctttagaagggagaagtaaatgagcgccagcggacaagtgaagaatccacctcaccaagatgctcatcttctatttccaaagatcatgcttgctttatgggagaagatggtgacttcgagtttgatcacttgagcaagaaggatattacaattgtgataaagctcatggagaccattaagaagcaacaagcatgcctcattaagaagaatgaagatatcatgagtctaaccgaagaacacaagaaacttaaggattttcattcttcattgattatgaggtatgaaaaattggaaaatgaatttgcttgtgccactaattctattgcttgtgtagcatctttggagaagcaaaatcaagagcttaaatctcaacttgacgagatcactaacaagtatgtggatttacaagaaaaacatgatgaacttttgtgttctcatgagaatcttgtggattctcatgccatgctagaggtatctcatgaggtgatagttccaatggtaaaatcctatgagcctcatgttcaagttgatctcacttgtactaaccctagttgctcccaagcaaatatttccccgagcactatatgtgacttggattgtgtaggcaaaagggagaagcaaatagattatggacttgtgtgcattgctcaaccttctcaagataaccatgagggcatggtgaagaagcttgtggaggaatcaaccgtggcttgcaccaagatccatcaaagggatagcaagtccatcaatgcttatatcaagggacgaaatcaaaagatgatcaagagttccattacttgcttcaagtgcaagaaagtgagacatcatgttagagattgcccttggaagaaaggaaataagttaaacaagaagaaggacattcctcacatcaagtgcttcaagtgcaccgaagtgggacactttgcctcaaggtattcttgcacattggatgaaca

SEQ ID NO: 14450 - DNA, 1803 bp, Oryza sativa
  Clone ID: TFbOSC401632j.C1.o1.fg
atggcatttgaagtaggttacgaggttgcccctgagtatcaccagattccccatgaccccaatgaggagaagtgtcgtgttcgcgtgacgttgactagtgatcgtgaagaccttccgtcgataaagtttgaagctgggggaagaaagtacagccatgcttgtcaagaagcaaccttggtggccattggagagctacgtcatcgctttgatgaggagttagagtcatcagctttccagtatcacccacacaagcctcatggtcaagactatggaacttacaactgtccccaaagtgaaggtagccccattgtgatgcacgccgtgtatatgcttagcgccatggatgcagtaggcgtggagcgggagaaagcagctcatgatagggaaaactggaaccgtggcaggatttgtaagttggagagcaaggtgtaccgtctgcagaagaaactagctgggcttaagggagaagcacgaccgtcagcacccaagcttcgcctcaccgcaaggaagagaacccgtccaccacctcgtctccagttagcttcgaagactcgtgtggtgggagacgctgtgcctgatcatgctgaacctgtcatccatgtcttaagtgatgaggaagaagaggaagacccagaagaaagagagccagctactccagaggaggaagatccatctcttcgttccgacgcaaggcgagagttgttgtctagtttgaccgttgccgtagttcgctgtatggtgaacacccgcactggaagtggaaatggtcacaatgaaggagatcccacacttgcccaagttttggcccagcaaacccagttgattaatctgttagtgcagcaagcgcagaaccagcaggcaaataacaagaatcaaccaccaccacctccgcagaacaagttggcagattttctacgtgtgagaccacctaccttctcaagcaccactaacccagtagaggcagcagctccaactcagaatcatcctgtcaggaaggaacagggaagcaagccaggggtgtgcttcaattgtggtgatccaagacattatgctgataagtgtccaatgcctcggcgtgtgaagaatgctcatgttcagaacaactccaatgctccagcaccaaaggctcgtgttaatcatgttgcagccgcagaaacccagaatgcacctgatgtggttttggaatccaaagatcttgatgttatcttagggatggactggctaacccgtcacataggagttatagattgtgctaaccgtaatgtgactttaacaagtagcaatggacaaacagtgtctttctttgtgtcatccccaaaatctcacggtttgacattaaatcaagttgctttgcaagagatcccaatagtacgagactatccagatgtgttccctggggatttgccaggtatgccacctaagagagacatagagttccggatagacttagtacctggaaccaaccctatccataagagaccatacagaatggcagctaatgagttagcagaggtaaagagacaggtggatgatttgcttcagaaaggatatatcagacccaataattcaccgtggggagcactagttatcttcgtggagaagaaagatcatacccaaagaatgtgtgtggattatccagcattgaatgaggtccctatcaagaataagtatcctctacctaggattgatgacctgtttgatcaactggaaggtgctacagctttctccaagatagatcttcttccggatatcaccaacttcaaatccggaggaggatataccttagactggctttaccacatg

SEQ ID NO: 14451 - DNA, 2373 bp, Oryza sativa
  Clone ID: TFbOSC900106j.C1.o17.fg
atggactccccagcgacccccgtgggcttatctccgccacttctcagtctggtgccccgcaatgaaccatgctatacaaaagataaagccgttgcccatgctggcttgtggttggcacggaaaagagggtttattgcgtcagcggctagggtttcggtggaccgggcgcacggcggcggttcacgcgaacggacggccgagatcgatccatccaaaacggacggccgagatcgatcgggtccacggcggctcacggaagaggacgactatgacgtcggcggtgacgtcaccaccggcggcggcggctcggcggctcgggcgcgcatgctcgccggcgaacggcggcacttcggcacgaacggagagcaccaacgggtagagcgcgacgcggcgaactcaccggtaaccaaaggagcggcggaagaccaacggacggcgacggcgacgacgaagaaacggcggcggtcttcgggtcgacggcggcgatggcgctccggtgatcttcggcgacggcgaaagggcgaacgaggacggcgacgcgacggcgaccacgacggcggtcttcccgagcgacggcgacgtctagaacggcggcggcgcacgactggagcgacggcggcgacggcggcgctagggcacacggcgctatggcgctacggacgacgagaggcgaaggcgaaggtggcggcgggtagagaagagcttgggggtccttttaaaggggctaggaggcgacgaagaaggcccacggcggccggcgacgagaaggaaagatcggggtttgaaggaaagagaccgatccgattcgaactcgaatcaaacacattccaaaccgatttagccgatatttccaaaggagaaaagataatcatcccacaaccaccttatcatcaacacatgactacattgaagaagggagaagtaaatgagcgccagcggacaagtgaagaatccacctcaccaagatgctcatcttctatttccaaagatcatgcttgctttatgggagaagatggtgacttcgagtttgatcacttgagcaagaaggatattacaattgtgataaagctcatggagaccattaagaagcaacaagcatgcctcattaagaagaatgaagatatcatgagtctaaccgaagaacacaagaaacttaaggattttcattcttcattgattatgaggtatgaaaaattggaaaatgaatttgcttgtgccactaattctattgcttgtgtagcatctttggagaagcaaaatcaagagcttaaatctcaacttgacgagatcactaacaagtatgtggatttacaagaaaaacatgatgaacttttgtgttctcatgagaatcttgtggattctcatgccatgctagaggtatctcatgaggtgatagttccaatggtaaaatcctatgagcctcatgttcaagttgatctcacttgtactaaccctagttgctcccaagcaaatatttccccgagcactatatgtgacttggattgtgtaggcaaaagggagaagcaaatagattatggacttgtgtgcattgctcaaccttctcaagataaccatgagggcatggtgaagaagcttgtggaggaatcaaccgtggcttgcaccaagatccatcaaagggatagcaagtccatcaatgcttatatcaagggacgaaatcaaaagatgatcaagagttccattacttgcttcaagtgcaagaaagtgagacatcatgttagagattgcccttggaagaaaggaaataagttaaacaagaagaaggacattcctcacatcaagtgcttcaagtgcaccgaagtgggacactttgcctcaaggtattcttgcacattggatgaacaatgcaaaacatcaaattttattgtggaaccaaaggctttggtaagactgctcgatttgcaatcaagctcatctatcaccatgccatcgagcccggagtctctgggtggataccccggagactccgtgaagattccttggtcacccgaagaatctaggccggaggctccaagctcacaagaacatgcatacttaaaggttatccttccatgcaagaatcacggaaggaagatggtgcacatgctaaaacgaatcgggtcatggccttacaagaagagcacaagcactatcaggacgcagactgtgatcaaggagttaaacatgttcgtgatgggaaagcttaagttctttctcgggattggaatcaagcaaatcaaggaagagatttcatcaagcccatcaaggtgccaaattcaaattggcttcaagatatcaattttatcgtatgggcatctcaaaaattcacaaggaagatgtcaaagggggagaaagaaaagattgatcaaaggatga

SEQ ID NO: 14452 - DNA, 3066 bp, Oryza sativa
  Clone ID: TFbOSC410574j.C1.o3.fg
atggaacatataaaacaatggctttcacatcaagaagaggaaggtaaaaacaattttgaagaaaaaaagaatgaagcacctaaattaggtcaagagagcatttcaggtaatttaactgatggtcaactggaccaagaaaaatatgagaaaccaaatggatggtacaacgttgatgctattgggataaattcacctaacgttgttttaaagatcaatgacaatattcaagaagggaagtgttgtgcactgttaaattcagagggatcatcaactgcgcgtcacggttgcgcgcacgagagatcggaaggagcagggccttcggaaccacaccttcgcctgagatctgcaccgggtaggcgggtgatcaggtttttggggagtgcttcagcacgactgctctcgacttctgctctgttcgtcgtcgtctcgtcgtccaccatgtctgcacctggagccgctggcgccgtctctagagttggtgcacctggagccggagccgccgccggcaccgctgccgccgtctctggagatggcgcgccgggatccagagccgctgcgaacttcaacatcaacggaggcagttctgcctcacaatccagcggagggccattctcggggaaggacatgtgggatgcacttgaggccaagttcggagtttccgacgccggcagtgagctgtatgtcatggagcagttctatgactacaagatggtcgatgaccgttctgtagtagaacaagctcatgagattcagatgctggctaaggaacttgagaacaacaactgtgagttgccggacaagtttgtggcgggtggcattattgccaaattgccaccttcttggtcggactttgccacttctctaaagcacaagagacaagagttcagtgtttctgatctcattggctctttgggtgttgaggagaaggcgagggcaaaggacaatcggggcaaaaagtttgagggaggttctagtgccaatatggtacagaagaagaaccctcatgcatcccacaacaacaagaaagtcaagcctgatgtcaaatccaaggctacaaccaattttaagaagaaaggcaagggaaaggcaaagagagactactttgtgtgtggcaagtctgggcatagggccaaggaatgtcctgagcgcaaagacaggaagtctgccaacatggtcgggagaggttcctccttgttgatgggaaacgggtcgcttgcggctgttcatggtgttggttctaagtgccatacttgtgttcaatcgaaacaacctcgcaagcctcacaaggcatctgaggcgaggaatttggcacctctagaacttgttcattccgatttgtgcgaaatgaacggcgtgttgactaaagggggaaagaaatatttcatgacactgatagatgattgcactagatttctttatgtgtatctattgaaaacaaaggatgaagctttgcattactttaagacctataaagctgaggtagaaaaccaacttgaaaggaaaatcaaacggttgaggtctgatagaggtggggagtatttttccaatgaatttgcatccttttgcaaagagtttggaattattcatgagaggacgcctccctattcaccccaatcaaatggggtggccgaaagaaagaaccgcactctaactgagatggtgaatgccatgttagacactgcagggctttctaaggaatggtggggtgaggcagttttgactgcgtgtcatatcctgaataaaattccaacgaagcataaggaagtgacaccattcgaggaatcggaaaggaagaaattaaatctctcgtacctacgaacatggggctgtttggccaagtctagagatgctacattctttgagaatgaatttcccatgaaacatacacctagcacttctagtcaagaaactgtcatgccccatgagcactttgcaccgatagaacacaatgatcaaatgcctgagggaaatcctgaggagcacaacattgtagatactcataagagtaagcaacaaagggttgcaaaatcctttggagatgactacattgtataccttgtggatgacaccccaagaaccatagaagaggcatattcatctcctgacgctgactactggaaggaagcagtacgcagtgagatggactcgattatgtctaatggtacttgggaagtcattgagtgtccatatgggtgcaagcttgtaggatgcaaatgggttttcaagaaaaagcttaggcctgatggtacaattgaaaagtacaaggcaaggcttgtggtcaagggttatacccaaaaggaagacgaggattttttcgacacatactcaccagttgctcgcttaaccacgattcgagtactacttgctctggcagcctctcatggttttctcgtccatcagatggacgttaagacagctttcctaaacggagagctcctcaatgtgattgaggaggtcaaggactttctgtccaagagttttgaaatgaaggatttgggagaggctgatgttattcttaacattaagctactaagaggagatgaggttgggattacacttgtgcaatcccactatgtggacaaagttttgagtcgctttggatatagtgactgcaagccagctcctactccttatgatcccagcgtgctattaaggaaaaacccaagaatagcaagggatcaactaagatactctcaaatcattggttcattgatgtacttggctagtgcaacgaggcctgacatctcatttgctgtaagcaagctgagcggatttgtctcaaattcgggagatgatcattggcaggctctggaaagagtaatgcgctatctaaagggcactatgagctatggaattcactataccgggtatccaaaagtactcgaaggatatagtgactcaaactggatatctgatgctaatgagataaaagccacaagtagatatgtgttcacacttggaggtggcgctgtttcttggaagtcttgcaagcagaccatcttaacgaggtcaacaatggaagcagaacttacagcactagatactgcgacagttgaggccgagtag

SEQ ID NO: 14453 - DNA, 1032 bp, Oryza sativa
  Clone ID: TFbOSC12276j.C1.o1.fg
atgtcggacatagcaaagaaggaattcgccgagcttgccttggatggtagtaactacctcacttgggcattggacgttgagattaaactcgactccatgggtctcggtcatactattgtgctgcccgaagttggcactgtggagtctacgaaggccgagaaagcaaaggcattgcatttcttgcgccaccatctccacccagacctgaagtttgagtatatgaccgagaaagatccactggtattttggcaattcctgaaggatcgctttgaccagcaagggtcaattgtgctcccaaaggcacaacatgactggatcaccctacgcttccaagactacatgtctgtggcggcgtataattctgccctccataggatcatttctcagttgcgtttatgtggcctgaagatccctgacgctgagatgatcgagaaaaccttatctacctttcatcacaacaatatagtgctacaacagcaatacaggaactcaaagtacccgaagtactctgatcttatcttagtcctgttagttgcagaaaggcagaatgaggttcttctaaagaatcattctgctagacccactgggtctatggcagtgcctgaagcacacgccaatgttgttggaaactcgcgtggccataaaagaggccatggtgagaagaaagggaaacgtaagggaagtatcatattcaagggcaagagtaagggtaaacccagaggtaaaggcgaactcaagaaggttacaggtgaatcatctggggaaaagcaggataactgctatagatgtggaggcagagggcattggtcccgtaactgccatgtccccaagcacctggttgagctctaccaacaaagcatgaatgagaaaaagagccaacatgagtcccacttcaccattgagcctgaagctcagattgaaaagcatgatgacatgcttatcaatgttaaggatggtggggacgtccgtatggacgatgattgggacaaccttcttgaaaaagatgatgacatatttggaggcttgaagtaa

SEQ ID NO: 14454 - DNA, 1506 bp, Oryza sativa
  Clone ID: TFbOSC400423j.C1.o7.gm
atgtcggacatagcaaagaaggaattcgccgagcttgccttggatggtagtaactacctcacttgggcattggacgttgagattaaactcgactccatgggtctcgatcatactattgtgctgcccgaagttggcactgtggagtctacgaaggccgagaaagcaaaggcattgcatttcttgcgccaccatctttacctagacctgaagtctgagtatatgatcgagaaagatccactggtattatggcaatccctgaaggatcgctttgaccagcaagggtcaattgtgctcccacaggcacaacatgactggatcaccctacgcttccaagactacaagtctgtggcggcgtataactctgcccaccataggatcatttctcagttgcatttatgtggcctgaagatcactgacgctgagatgatcgagaaaaccttatctacctttcatcccaacaacatagtgctgcaacagcaatacaggaactcaaagtacccgaagtactctgatcttatctcagtcctgttagttgcagaaaggcagaatgaggttcttctaaagaatcattctgctcgacccactaggtctatggtagtgcctgaagcacaagccaatgttgttggaaactcacatggccgtaaaagaggccatggtgagaagaaagggaaaggtaagggaagtatcatattcaagggcaagagtaagggtaacccagaggataactgctatagatgtggaggcagagggcattggtcccgtaactgccatgtccccaagcacctggttgagctgtaccaacaaagcatgaatgagaaaaagagccaacatgagtcccacttcaccattgagcctgaagctcagattgaaaagcatgatgacatgcttatcaatgttaaggatggtggggacatccgtatcgcgcgtttgaagagccctagcaccatgccagcttcaaacgccccctccctcatcctcttcagcattagagacgttgcatatgttgaggctgctatgataattttcttcttcttgatgcagcgttcacattgggaatttgggttaccgtaccatatcctgcacattgcttcttcttcagtatcaagagggggagacctctgggtgctcgggacaaggttccgcggagacgtccgcggagacaaggatctgagccacttgttccactcaaagaatcagttgaagaagctcaacctgaagttgagaaagccccataagtggcaactcaacctgaaggacactatcctgaagatggaggacccagtgccttacgcgtgcaccttggcactggaagatcggaacaccccaactcggtcgttatgggaaatcacgacaatcccaacacctccaagaatcatccctgtaggatgcaaatgggtcttcctccggaagaggaatggccaggtggtgaggtataaagcgaggctagtggcacaagggttcacgcagagaccggtattgactatgatgaaacttactctcctgtga

SEQ ID NO: 14455 - DNA, 893 bp, Oryza sativa
  Clone ID: TFbOSC874j.C1.o4.np
ttatttttgaacaggaaaaaggaattattgcgtcagcggctagggtttgcggtggaccgggtgcacggcggcggctcacggaaacgaacggccgagatcgatcctatccaaaacggacggccgagatcgaacggtccacggccagaccacgagagacgacgacgatgacgtcagcgacgacgtcaccaccggcggcggctcgggcgcgcatgctcaccggcgaacgacggcgtggcggcgcgaacggagagcacctacgggtagcggacggcacggcaaactcaccggtgaccaaagaagaagcggcggcgaccttcggcttgacgacgacggcggtgttccggcggtcgacagcaacggcggaggggcggacgaggacggcgacgcgacggcgaccacgatggcgaccttcccgagcgacgacgacgactggagcgacggcggcgcacggctggagcggcggcgacgacggcggcgcgaggtctcacggggctagggcgctacggacgacgagagacgaaggcaagggtggcgacgggggttggaaggcagcgtcggaggcccacggtgaccggcgacggcgaaggaaggtctagggttcagaggagagagatcgatctgaatcgaactcgaatccgcgaatttccaaacgaaattagccgacgattccataagagaaaagatagaggggattccgaagatcatttcccctctattgatttcaccggagaaggaaaggcgcggtggggcccacctgtcagcgggagagagagagaggagagcggcagctcggttgcgggccggcttgggccgaggagagagagaaaaagagaggggttttgggccgactttcggcccaaagcaaaaagagacttttaaaaacctttttcaat

SEQ ID NO: 14456 - DNA, 3645 bp, Oryza sativa
  Clone ID: TFbOSC874j.C1.o5.fg
atggaagggatcaagttgaaatttcagggatatagaagggatcagcttactacagaagaaagcttacgccagaagccaacttacagaggaagccagcttacggcgcaagccagcttacaggagaagcccgcttacggcgtaagccggcttacaacgcaagccagaaggtccaaggcttacgacgggcgatgtaggtgcctgaagcaccggcatggcaacttggacggctccgcggccgttgccaccaaatatcggaggcaaacgaaccttctgcacgaccctgaagtgtcgttttggatgtcctttgttttatggacatcacccatatgggcccttgatgccactaagaacatgtcggacataacaaagaaggaattcgccgagcttgccttggatggtagtaactacctcacttgggcattggacgttgagattaaactcgactccattggtctcgatcatactattgtgctgcccgaacttggcactgtggagtctacgaaggccgagaaagcaaaggcattgcatttcttgcgccaccatctccacccagacctgaagtctgagtatatgaccgagaaaaatccactggtattatggcaatccctgaaggatcgctttgaccagcaagggtcaattgtgctcccacaggtacaacatgactggatcaccctacacttccaagactacaagtctacggcggcgtataactctgccccccataggatcatttctcagttgcgtttttgtggccagaagatcactgacgctgagatgatcgagaaaaccttatctacctttcatcccaacaacatagtgctgcaacagcaatacaggaactcaaagtacccgaagtactctgatcttatctcagtcctgttagttgcagaaaggcagaatgaagttcttctaaagaatcattctgctagacccactgggtctatggcagtgcctgaagcacacgccaatgttgttggaaactcgcgtggccgtaaaagaggccatggtgagaagaaagggaaaggtaagggaagtatcaaattcaagggcaagagcaagggtaaacccagaggtaaaggcgaactcaagaaggttacaggtgaatcatctggggaaaagcaggataactgctatagatgtggaggcagagggcattggtcccgtaactgccatgtccccaagcacctggttgagctctaccaacaaagcatgaatgagaaaaagagccaacatgagtcccacttcaccattgagcctgaagctcagattgaaaagcatgatgacatgcttatcaatgttaaggatggtggggacgtccgtatggacgatgattggaacaaccttcttgaaaaagatgataacatatttggagacctgaaaccttatgggaatcccatggcagaagaggatatatgtctagtagacaatgccaccactaacacaatcttaagggaaactatgtatttccacaccttaactaagaaaactagaaatattatgaccattgccggaagcaatgctcatatagtaggcaccggaagtgctactctagttctccctatgggtacccatatctttgtaaaggatgctctattggatcctgattcaaagcgtaccctcttaagctttaaagatatccgtgcaaacggtttccatatagaaaccgagattgagcaagatgctgaatatctgctcataagaaaaatagatggatatcaaaagcaagtggtggaaaggctcccttcattgccatcgggtttgtactacacgtacataaaacccactgaggaatatgtggcgatgaagaccatatttagaaacccagagtcatttagagtttggtatgacaggctgggtcatcctgggttgggtatgatgaggagaatcatcagcaattctgctggccacaatgttgaaactaatgacttccctaatcctgaagattttatttgccctgcttgtgcaaaagggaagttgatcattaggccatccctcctgaagattagggatgagtcacctgttttcctggtaagaatacaaggtggaccatgtggacctgttgtccacaaggaaccatgcttttcaaagctaattgcccaaatcatcaagctaaaagcttgcttccctgatagccgcgtacaatccattcgaatggataatgctggtgagttcaggtcgaaggcttttgatgattattgtttagccatggccatgggcattaaggtagaatattcagtaccacatgtccacactcaaaatggcctagctgaatccttgatcaagaggatcaagttgattgcacagccactgttgcaggattggggagaaaggcatccagaagaatgccgagatataatatggaatgcaactgggatgcagtccttagatccacgcactagtgaagctgaactagaagttcagagaatcataaatttgcaaaatattgtaaataagttgccagatgccttcactgattacaagggagtgacaaggtcgcatatacctacagtaaatgcgccggaaagagtagaggtaacccagaaggttactgactctgctcttaccccccatcctaggaagatggggagacctccagttgaagaagctcaacctgaagttgagaaagccccagaagaggcaactcaacctgaagttgagatggtcccagaaggacaccatcctaaagatggagaacccagtgccttacgcgcgtaccttggctctggaagatcggaacactccaactcggtcgttatgggaaatcacgatgagctggaggaaataaatgaggagatttccactaattgttctgatacaggagagttacatcatagaaagaccactatcgtcgacattcactttgcctcaaagattgttgtcataatggatccagatccagaaccaaagtccatgattgagtgccagaagcgctcagattgggacaaatggaaagcagcaatagaggcaaagatgcggtcgctttataaaagagaggtttttgggcctgcagtcccaacacctccaagaatcatccctgtaggatgcaaatgggtcttcctccggaagaggaatggccaggtggtgaggtataaagcaaggctagtggcacaatggtccatgcagagacccggtattgactatgatgaaacttactctcctgtgatgagtggaatcacgttccgatacttgatctcaatggcaactaatatgaacttagatatgcagttgatggatgtagtgaccgcatacttgtatgggtcactagattcggaaatttatatgagggtccctgaaggactcaagattccgaatccgaaaggaaatcgcaacatgtatagtgttcgcctgcagcgatcattatatggattgaaacaatccggaaggatgtggttcaatcgattaagtaactatctcctgaagagagatatagtgcaaccccaaccagaagacattgggttggcgttaaaactatcctcaggtaccttcgaggtactcaagatcttgggttgtggttcccgaagaaccaagatccatccatggtgggatatgtggatgctggctatatgtctgatcctcataatgccatatcccagactgggtttatatttctttgtggtaatactgccatttcctggcggtctgtaa

SEQ ID NO: 14457 - DNA, 722 bp, Oryza sativa
  Clone ID: TFbOSC1572j.C1.o1.np
gaattcgagctcggtacccccgaatgcaccagaggatgtccggaccgacgccgataaacaagaaacgttcatgtctttttctgatgacgagctcaccaatcaactgatatgtgaagactacaccgactatgagaggctgtttgacacggcaatccgccacgaggatcaacgcaacacgacggctacgaagaggcaagctgcgcaacttactgcccatcaaggaggtaaccataagccagacttgactcaccgtcagaaggctggacctaccaccatgagtgttggtcaacaccgcacattcaaccacaccaacttgcaccatggctccagtggcagctagaatgaccatggaagtcagacgaaccgctgtacagctccacgctcaccgatggcaccggcacagacaggccagaccgcacaagccaataaggagacgggagcaaaaccaaagtcctgcttcaactgtggtgagcttggccacttcgatgacaaatgcccgaaacataggcgtgccggaccaaggtttatacaggctgacgtcaaccactcatatggggaagaggcacaagcaccaccacaggacctactggatacgattgctgataactcaatccctgcaacagaactatgtgattctggtgcaacgcattctttcatctccaagaaatttgtcgggatgcatgggttaataagagaggaacttaacacaccgatgcgggttc

SEQ ID NO: 14458 - DNA, 3810 bp, Oryza sativa
  Clone ID: TFbOSC401828j.C1.o34.fg
atgtcaggtaacgaaggtgagaagagtccccaggattttgctgactgtgtcagccaagagcaactacgaactctccaagaaaatactcaaaaggacatcacggaggccgttgcaaagtctgtccaagatgccttcgctaaaatcggcttcctgaaccacatggagaggttggacaagcggatatccacgctaactgatcgggtcgccgcgttggagacaccttccaatgaggaagtggtgagtggtgacgacgatgcttatcctgaagacacggtgtatgattccagtggctatattgacgcaccggccacaaggcaagcacggctacgacgtcgcctatgcacaaaccgcacaggtatgggtggcactcgccaccaacaaggtaataataataatcgtgtgcccgatgatccttatgctaaggttaagtttaaaataccatctttttcgggatattatgatgctgagaaataccttgattgggagatgatagtagaacaaaagtttaatgcccaccttgtacccgagcaacatagagttagacaagccagtagtgagttcaaggattttgctattatgtggtgggctgggttatctgatgagggggtgctacctactacttgggaagaacttaaggtagctatgcgcgataggtttgttcctccatcttatcatagagatttacgcaagaaactgatgcgtttggaacaaggggataaatctgtacaggattactatgagaaggaattacaggggtgcgaccatcagggcaagagcaaggcaagcacatacactccgcgcacgatgccatctgtgggactgcccaaggccgtctcttttcgggcgtcctcccagccagcgggcaagcgaccagctgcatccggagcttctgcgacaccaaaaccatctccaccacgaccagcagagtcaggtaaaggttcctcgcaggtacccgccaagagtgcctcatctgtcgcctcgacgggacgcattcagtgccaccgttgccaagggtttgggcatgtgcagaaagattgccctagtcaaccggcctatgttgctacagaagatggctacatcaccacctccgatgtggaagaggaagagggggaagaagaagttgaggatgaggatgttgaagtctttgctcgtgatgacacaacgaactacaggaccatcattgtgcagtgggtgctcagcacgcagattttcttcgtcatcaacaaccgtcgtgcacgtgtgatcattgatggaggtagctggaacaacttggtgagttctgatttggtcaagaagcttggcttgactacacgtacacatccacacccttaccatattcagtggttaaacgattccggaagagcaaatgtaacacaagtttgtagggtttcgttttccattggctcatatgcagattctgttgattgtgatgtggttcttatgcaagcttgttcacttttgctgggtcgtccttgggaacatgacaatgatgctacacaccatggtaggagtaataaatacacttttgtgcataatgggaagaaaattactttgctacctttgacccctgctgaaattgtagaagctgataaagagcgagctgctagtttgaaacttgatgaatctgaaaatcagcaagtggctaaatctgtttttccacctaaaaaagataagctttcacctagttctaaggttgagggaattaagttgaagggtggtgttatgcttgcaacgaaatgtgacattgctgaaatttcagatgatgatatgtgctatttcttgatatgcaaacaagccttggtttctttagatgatattgctagttcgatacctcctgttgttaataaccttttgcaggagtatgaggatgtctttccagctgagatacccccaggattgccacccatgagagggatagagcatcaaattgatttgattccaggagcatcattgccaaaccgtgctgccaagtctttggatgaacacatggatcatttacgtgctatttttaatgctctacgcgatgcacgtttgtttgctaaccttgaaaagtgcatcttttgcacggaacgagtctcttttcttggatatgttgttactccacagggaattgaggtggatgagtcaaaaattgaagccataaagagttggccggttccccaaaccatcacacaggtgaggagctttcttggtcttgcaggattctatcgccgtttcgtcaaagatttcagtaccttttctgcaccattgaacgagttgacgaagaaaggggtggtcttccattggggaaagacacaggagaagtcgtttgacactttgaaggacaagcttacacacgcaccattgctacaacttccaaactttggtaagacttttgagttagaatgtgatgctagtggagttggcattggaggtgtgttgatgcaagatggtaagcctgttgcatactttagcgagaagttgcatggtcctgttttgaattattccacgtatgataaggaattgtatgctcttgaagcgcatggaggagggttgatgggacattttggagctaagaagacggaagatgttttggccatgcatttcttttggccaaggatgagaaaggatgttgagaggttcgtggcacgttgcaccacttgtcagaaagctaagtctcgtttgaatccacatggtttgtatatgcctcttcctgtaccttctattccttgggcagatatttctatggactttgttttgagattgcctagaattaagagggggagggatagcatttttgtggtggtggatcgtttttctaaggtggcacatttcataccatgtcataaaagtgatgatgctgttcatattgctgatctgtttttccatgagattgttcgcttgcatggtatgccttctactattgtttcagatcgtgatgcaaaattcttaagtcatttctggcgcacgctatggaacaagttgggtacaaagctattgttttctacaacatgtcacccacaaatagatggacaaacggaggtagtcaaccacactttgggtaccatgttgagggctattttaaagaaaaatttgaagatgtgggaagaatgtttgcctcatgtggagtttgcatacaatcgggcaacacattctactaccaagatgactgaaaagtatagaattgctggtagtaaaggtaggcaagaggttaagcttgaaccgggtgatttagtttggttgcacttgagaaaggataggtttccagaattgagaaagtctaagttgatgcctcgtgctgatggtccttttaaaattgttgagaagattaatgataatgcatataaacttgagttgcctcccgagtttggggttagtcccacgtttaacatttcagatttgaagccatacttgggagaagaggatgagcttgagtcgaggatgacttcaattcaagagggggaggatgatgcggacatcactaactcggatacacacaacaatcctccaacggtcattcaaggaccgataacaagagctcgtgcgcgacaattaaatttagaggaacaatggggggggacaaggagacacttggagaaggacttagagccatggaggatcatcgaggacgtccaagtcaaggtggaggcccaaaccaagtcgacgtcgggtgcaattcggagtccaggaccagtctgcactaaaacgggcgcccaggtcgcatacgcactcagattggggcgttctttatatgtatggaaagctaagaagataacctttccaatggttttggtcccttgtccaaattctttccgagtcaatgggaattga

SEQ ID NO: 14459 - DNA, 1368 bp, Oryza sativa
  Clone ID: TFbOSC409825j.C1.o1.fg
atgtcaggtaacgaaggtgagaagagtccccaggattttgctgactgtgtcagccaagagcaactacgaactctccaacaaaatactcaaaaggacatcacggaggccgttgcaaagtctgtccaagatgccttcactaaaatcggtttcctgaaccacatggagaggttggacaagcggatatccacgctaactgatcgggtcgccgcgttggagacaccctccaatgaggaagtggtgagtggtgatgacgatgctcatcctgaagatacggtatattatgatgctgaaaaataccttgattgggagatgacagtagaacaaaagtttaatgcccaccttatacccgagcaacatagagttagacaagccagtagtgagttcaaggattttgctattatgtggtggactgggttatccgatgagggggtactacctactacttgggaagaacttaaggtagctatgcgcgataggtttgttcctccatcttattatagagatttacgcaagaaactgatgcgtttggagcaaggggataaatctatacaggattactatggtgagctacaaaagggtgtgagacgctgtggcatagtggagggggtcgaggatgctatttgtcgtttctattctggtttgagggaggaaattcagaacattgttgattataaggaatttaactctgtcaaccagttgtttcgatttgctatgcttgcagagaaggaattgcaggggcgtgaccatcagggcaagagcaaggcaagtacatacactccgcgcacgacgccatctgcgggactgcccaaggccgtctcttttcggacgtcctcccagccagcgggcaagcgaccagctgcatccggagcttctgcggcaccaaaaccatctccaccaccacgaccagcagagtcaggtaaaggttcctcgcaggtacccgccaagagtgcctcatctgtcgccttgacgggatgcattcagtgccaccgttgccaaggatttgggcatgtgcagaaagattgccctagtcaacgggcctatgttgctacggaagatggctacatcaccacctccgatgtggaagaggaagaggaggaagaagaagttgaggatgaggatggcgaagtctttggtcgtgatgacacaacggactacagaaccatcattgtgcagcgggtgctcagcacgcagatttttttcgtcatcaacaaccgtcgtgcacttgtgatcattgatggaggtagctgcaacaacttgtggttaaacgattctggaagagcaaaggtaacacaggtttgtagggtttcgttttccattggctcatatgcagattctgttgattgcaatgtggttcctatgcaagcttga

SEQ ID NO: 14460 - DNA, 1836 bp, Oryza sativa
  Clone ID: TFbOSC411208j.C1.o1.fg
atggaggggacaaggagacacttggagaaggacttagagccatggaggatcatcgaggacgtccaagtcaaggtggaggcccaaaccaattcgacctcgggtgcaattcggagtccaggaccagtctgcactaaaacggccgcccaggtcgcatacgtgctcgaattgggacgtaacgaaggtgagaagagtccccaggattttgctgactgtgtcagtcaagagcaactacgaactctccaagaaaatactcaaaagggtatcacggaggccgttgcaaagtctgtccaagatgccttcactaaaatcggtttcctgaaccacatggagaggttggacaagcggatatccacgctaactgatcgggttgccgcgttggagacaccttccaatgaggaagtgagtggtgacgacgatgctcatcctgaagacacggtgtatgattcgagtggctatattgacggaccagctacaaggcaagcacggctacgacgtcgcctaggcacaaaccgcacaggtatgggtggcactcgccaccaacaaggtaataataatcgtgtgcccgatgatccttatgctaagatgacagtagaacaaaagtttaatgcccaccttgtacctgagcaacatagagttagacaagtcagtagtgagttcaaggattttactatcatgtggtgggctgggttatctgatgagggggtactacctactacttgggaagaacttaaggtagctatgcgcgataggtttgttcctccatcttatcatagagacttacgcaagaaattgatgcgtttggaacaaggggataaatctgtacaggattactatggtgagctacaaaagggtgtcagacgctgtggcatagtggagggggtcgaggatgctatttgtcgtttttattctggtttgagggaggaaattcagaacattgttgattgtaaggaatttaactctgtcaaccagttgtttcagtttgctatacttgcagagaaggaattgcaggggcgtgagcagcagggcaagaacaaggcgagcatgtacactctgtgcacgacgccatctgtgggactgcccaaggccgtctcttttcgggcgctgtcccagccagtgagcaagcgaccagctgcattcggagcttctgcaacaccaaaaccatctccaccacgaccagcagagtcaggtaaaagttcttcgcaggtacccgccaagagtgcctcatctgttgcctcgacgggacgcattcagtgccaccgttgccaagggtttgggcatgtgcagaaagattgccctagtcaacgggcatatgttgttacagaagatggctacatcaccacctccgatgtggaagaggaagaggaggaagaagaagttgaggatgaggatggcgaagtctttggtcgtgatgacacaatggcctacaggaccatcattgtgcagcgggtgctcagcacgcagattttcttcatcatcaacaatcgtcgtgcacgtgtgatcattgatggaggtagctgcaacaacttggtgagttttgatttggtcaagaagcttggcttgaccacacgtacacatccacatccttaccatattcagtggttaaacgattctggaagagcaaaggtcgactctagaggatccccggggtaccgagctcgaattcgccctataatgagtcgtattacaattcactggccgtcgttttacaacgtcgtgactgggaaaaccctggcgttacccaacttaatcgcattgcagcacatccccctttcgccagctggcgtaatagcgaagaggcccgcaccgatcgcccttcccaacagttgcgcagcctga
